United States Patent Application Publication US 2007/0054278 A1 - sequence listing, part 83

SEQ ID NO: 96643 - DNA, 102541 bp, Homo sapiens
tactcccaaggtcgtcaccaagccaggccatatcattaagcccataaaagcagaggatgtgggctaccagtcttcctcaaggtcagacctgcctgtcatacagaggaatccaaaacgaatcaccacacgtcacaataaagaagaaaaactgtaggttgtgtagctggagaagtgacagtcaggggccctgattccacttcctttggtccagttttactctgctacagggtggattccaaaactggctcagcacattgcatgtagttgagccacattttttaaaaaaagaaaatggatgaccattaattgactagcattttagaattgatcagacattagaacacagaaaaattctagtacatttaaattctaaacaatacagtggatgacccttttgaatatacctaatgatttccttaaaaaagaaattttaaacagacttgtttaatcgtgttctcaaagcatacagtcaagaggtgggactgactgatgctttataggtgtgtgtagggtggtagaggccaaggtgctgccagcaatcctttccatactaggtactggtgaaaattgtttttgtttatgctgtcagcacatttgtgtgggtctctcattgtcccttaacagtgccgcatctcagcctggaagtcagctttaagtcattcaagagaacctcaggctgtttttctgacagtgatgatatgatatacagatacatccacagggtatctattaccagcataatgcattgtaagatggcaaggtggcattttgaaagagcgctgggcaagcagttagcacatctgggcctaccttcagcttcttcatttacaaacttctgaccttttgacactaaagctgctcctttatctttctgagtctcagattcttcatctgtaatctggagttgttaattccagtccttactaccttttagagttggaatgagatggaaagtagatgaaactactttgaaaattacgacagttaagggctgggtgcggtgtctcacacctgtaatcccagcactttgggaggccgagatgggtggatcatgaggtcagcagttgagaccagcctgaacaacatggtgaaaccctgtctgtactaaaaatacaaaaaaattagctgggcctggtggcaggcacctgtaatcccagctacttgggagactgaggcaggagaattgcttgaaactggaaggcagaggttgcagtgagccaagattgtgccactgcactctagcctgggcaataagcaaaactccatctcaaaaaagaaaaaaaggaaaaagaaaattatgagagttacttaaaggtaacatcacatactaaatgtcttctataatcctatatttattaatgcattacaactctgtagattgttagttactaggccagtagctaggaattggtataaatttaatgcaccttctatcctgaataactagcatggaaaagtgaatatatgtgtgagcagatatggctataaagacctatagcttttgcactttatgcatatataatcaatcctttctagttcagtgaattgaccccatccacaggctgattcatctttgtgttaaggggcaaatgaaacggtatattatttctttgcagtctcctctcagtcattcatcaatgtggccagcttatctactcccaattatgttgttgatacatctccaagccatctgtcatcagatcaaaaagcagcaaacagagggtcagtcacaggatgttctgacacaccattgtaactttttgttagagatgatcccatttagaaaaagactggtagaaattggagtgaaaggaaccctacagattagcccagttctctcttattttcagctttacagacaagaacaatttaaatctaaagaatttagtagattccttcagtgtcacaaagctgtttcatgaaagaatcaagattataacctggatattctgactcctggcccagtgctttttcttactttgtagctacactttgaagtaagattcaaactgttatccactcaattgccttattcctgaggatgtagtgaaggaagaaaaagttttctggaattccgtaaattatattttaagcttatttcttcaaaattattttcatatatcacagatatatcattggaagatataatttgcatatatgttcattatcagtgttcctaatttggtattacatgtattctatttttttctgaatgatagcatgaaaagtgtcaaagtggtttgtccgctagcgtctgtctgcagaactttcaggatgactattaattcctctcagatgtcatttttgagtggtccaagcctgctgttttgaacccacagcagtggagatttgtattcttatttacagttgtgtactataaagtgtgtgttacataggttttgtgtaataattatttgtaaatattatttagatttgtatttagacatgatttatatctaatatagatacaaagtctgtgtctaaatattatttaaagaagtgatttttcattctcttggattctttccagtgtggtgccttttatatgcctcacatagtctccttgttctcctactaatattcccaagctccatatgccaattaaagaagaaacaaaaataaaagtttgtcttgcttgtgaaacattaagaagaggctgtcaggtttaataaactttttaatgaatatttcagacataacaaaaaactgcagagcttcgtacacttgatttaaataattcttgagggattttataaggtcatcttatagacaaaattaagagacaccagtgtggttatcaatgctttcagaatacttgtgtttatgtaaatataccccagagtccaaaactctgatatattcatatatattcacaatgagaggatgtctgtgccaaatctgtcaatcagtacaatagaaaagttaattatataactacaacacgaaacacaaatttttagaagcaaattatgtcctgtaatttacccccctccccgctgctcctctgctaactcattttcctcttttcccactctaaatgtaaggcaacccttggctttggagaagcatctgttccaatattctggtgctatgtgctcagttgtactatatgcaaatgttactagacacagaggaggtcaaagtgttgatacacttattgctaccatttacagaatgatcaatttgatagctatcatacatggctagcaagacactgatttttctaataaaaaaatttttaatgcatacaggtctggtgaacagtttcaatttaacggatgaggccaaggctaaagccagagtaaagtaatcagagccatgcctcaggaacacgatttagctaatagtgtgtgtaaaatgggtaaggtctagaattagggactaaaatcagctgaaagtgttgcagatatgtatacttatcacagtgaatacttccagtttacagcaaagaattcaaaattgttgagtaaagcttggtgactattacctaaaatagactagactttagccaagcatcttttatcatgggaacaaacccgataacctgacatgctttttttttttttttttttttttgagacagggtctttcttactctgtcactcaaggtggagtgcagtgatgtgatcacggattatggctcactgtagcctcaacctcccaggctgaaactaaagtgatcctcccgcctcagcctcctgaagagctgggaccagaggtgcacaccaacacaccagctaattcttttttttttttttttttttctgaggggtggatagagatgggtgtttccctatgttgcccaggctggtctcaaactcctgggctcaagcgatcctcctgcctcagcctctcaaagtgttgggattacaggcatgcgccaccacacctggcgtgttcatttaccatccttaaacattcttttttttcttttttttttttttttttgcccttaattgacttgatctttggatgtttgaggttattagggatcatgtttcatttcccttgctttcaaatacagttcagaataaggattacatgaagtcactagcagttttactatgtctgaactagtcctgaaagtaaataaacatgcacatccggagcactaaaagagttgcagaattaatgatactccaatctctcaggccatgtgtcagttggaaactaacacaatggtgagaacattttaaatatttacagcctcatgatgtgaacaaacagcattctccctaaaagagtagactgtaactctacaccaagttgaaagaacagtctgtcaaacatcaggaaatagtcacaaaaaactggatgtacctcaggtgactcctaagacttgcattctccacatttaatgaaaattatatgaaatgtaaatagtaaacagaccttagaaataatctgacccaccttacctcatctttgttttctcagtttaacagtgtatcggtgagacattttacttttattataaagcagatatttcaggcagaattctaccaccctgaaatgtaaccaccctctccttcctaagcccagacatactccttagtatttaaataaacatctgttaagctccaggccatgttcaacgttggaattgttatgatcaattttaaaaagttagttttcctacaccaaacagcttacagtcttaatgaggaaatgttttagcatttattaattcaggaaacatttctggcactgtgctaataactatataagaaaatcattgtaagatataaagaccagatatagtccctgccctcaacctatacacttgaaactattggaaactattgaaactattagacaaaatggccatggtcatttagtgcataattaacacaccatgccttgttgttcttgctcaattgccttattcctgtgtcaacatcagcttcaaaaaagtgtattcaatgcaacaagaaacttcaaaatcacagttttgtaaaacggcagattatgttaaatgagtgaacctgtatattgtatttgttttctattgctgtcctaacaaattatcacaaacttagttaacacaaatttattatcttaacagttctgcaagtcagaagtatgaaattgaactcactaggctaaaattaagttgttggcagggctgtgttccttctggaggctctagggaagaatccatttctttgccttttccagattccagaggctgtctgaattcttagtttgtggccttgtccaacatcttcaaagccagcaacatcaggctgagtccttttcatgctgcgatctctctggttttctcttttgtcttcctcttccacttgtaaggacccttgtgattacactgcacccaggtggataaaccaagataacctccctattttaaggtcagctgataagcaaacaatttcacctgcaaccttaattctcctttgccatatttgcaaactgtggggattaggatgggacatgttttggagggggcattgagccacattactctgcctaccacatatattagctgaaagcttttttttttttttctttttttgagacagagtttcgctcttgttgcccaggctggagtgcagtggcacaatctcggctcacttgcaacttccatctcctgggttcaggtgattctcctgcctcagcctcccaagtaactgggattacaggcatgcaccaccatgcccagctaattttgtatttttagtagagacggggtttcaccatgttggttggactggtctcaaactcctgacctcatgatctgcctgccttggcctcccaaagtgatgagactgcccggcctaagatttcttaatagaaactttaaagtaaaaatattaatggctatattcaaaagttctacttcctaaattgaaagaaaaattaataaatccttgagattactagaaaacccttacagtaaatgagcatttatgacttgtacccaaataaatactataggtaatagacactaacttattacttaagaaaaagtacaataatcacacttgtatattttgactggttgttgatgttccttggtcttcatcagtaatacaaatgtggtcattagatgtagtagaaatattctccaagccctcccttaattcttcagatttctgcatacttatcccctctctttctcttgactttctagagtccttagaggtactggaggcctcttctgttttttcttcccctttgaaagtagcgagtttttctaagtattctactacttcatctctcaactcatcttcagattcttcaaaatttctgaaataataagcagtaaaaatcagcattatgatatgaaagtactgaagaatacatgtaaaaactcgtttcccttttctccatccccagttgagcaatataaaagttgcattttcacctaggtttttctaagcatgataaacagctaatgttgggagaatcagtcttctgttgagttttacattgtgttaaacaccctttattatatttattaatgtccatcatctaatgtttaagaggagaggaagagagaattaaaaaaaaagaaaaaaacaattgccgtacatcgagctcttactatatgtccatcaatatcctagggtacttataccatattccacttaatactaacaacattttgaggtagacattatcatcaaattataaataaagaagctaaggctcagagaggttaaaaaatgtggccgggcgcggtggctcacgcctgtaatcccagcactttgggaggccgaggcgggcggatcacgaggtcaggagatcgagaccatcctggctaacacggtgaaaccccgtctctactaaaaatacaaaaaattagccgggcgtggtaccgggcgcctgtagtcccagctactcgggaggctgaggcaggagaatggcatgaacctgggaggcggagcttgcagtgagccgagatcgcgccactgcactccagcctgggcgacagagcgagactccgtctcaaaaaaaaaaaatgtgttgaaggtctcacagctactaattcatagaaccaggaattaaaattgtgtctaagactgcaacattggtatttttagaaaggaaagggaatagatcaataagacaatctgcaccaacctaaattaaacctaaaagtaactgcaccaacctaatatttaagtagcaagtatgaggtcaggagtttgagaccagcctggccaacatggcaaaaccccttctctactaaaaatacaaaaaattaggcatggtggcgcacacttgtagttccagctactcaggaggctgagacaggagaatcacttgaatgcaggaggcggaggttgcagtgagccgagatcgcaccactgcactccagcctgggagacagagcgagactccatctcaaaacaaaacggaacaaaaaaagtggcaagtggaggagattgagaaagagctgataagagccaagaagatgtgtatcgtggaagccaaaggagtagccaaataggatgaggactgagaaatgattacctgacttgccaatttcaaggtaatagatgactgttgaaagaatatttcagatgagtgccgtgcagcaggagccaatgtacagtgggtccagaaagcaatggagattaacaaagtggtgacaggtggggactacaggtgagcaccactatgcccaggttttttatttttagcagctaggaggtctcactgtgttacccaggctggtcataaactactgtgttcaaacaatcctctcacctcagcctcccaaagtgctgggagagctactcaggaggctgatgcaggaggattgcttgagcccaggagtttacagttgtaatgagctatgatcatgccactgcactccagcctaggcatcagagcaagacactcatctgaaaaaaaaaaaaaaaaaaaagtggtgacaatgaatttaaactcctctttcagcgagcctaactccgaaaggaatggtattatttagagaacatgggggcaatggtttttggttattgtttttaatgggagagagttgggcatgtttatatgctgaggaaaggaggtagtagatattcaaaacaggagacaggtggaataaccaataggagccaggtcactgaaaagaggctgggttttagagcacctgcagagcatgggctttcagcaggaagagggacagtttttcctaagaaaaagaagatagggagagagaaggagagaaggactcatggatatagagaagttatggagctagaaaactgattctgcagaaygcgtactatctctgtgaaggaggaggcacagtcacacgatgagtgtgtgtggatgggagtgagctgagggatgagggtttggaatcactgatacactgggaaggaagctgaccaggcttaggattgccagtcatcatggaggaccccactaaaactggagaccataaatttgggtggaccagtaagtgcaactcccacttactgttaccattcctgagatatgtgctttacacagatctttcctttgtctttgttcctctactaaactatgctgtgtctaggtataaatttattttcgttgttgctgcttgataattgttttatttcccagatatgatgattactggcttcaaataattatagaaagttcacagctggaattgatttgcatattgttttctcatattcttttcttctggaactccttttcatatacatttgacttcatgcctcttaacttctctgtcacattttccatcatgtttttacttagacctatcttccagttactaactcctttattatctgcacctattctgttttttaaaccatcagtcgaattttaatttctattcatagatttttttcaacttccagaagttctagtgaattataaaaatttttgctatggtctgaatgtttgtgcccctgttcccaattcatgtgttgaaacctaatcctcaatgtgatagtattaaggggtggagcctttaggaggtgatgaggtcatgagagcacagccctcatgagtgggatcagtgcccttataaaagaagcccaaggaagcttgtatgctccttccaccaagtgaggacacagctagcaggtgctgtgtatggagccaaaagctagcccttaccagacaccaaatctactggcactttttttttttttttttttttgagagaaatctcacttttgtcccccaggcttgagtgcaatggctcaacctcggctcactgcaacctccgcctcccaggttcaaatgattctcccgcctctacctcccaagtagctgggattaaggcacctgccaccatgcccagctaatttttctattttttagtagagacggggtttcaccatgttggccaggctggttttgaactcctgacctcagatgatccgcccacctcagcctcccaaagtgctgggattacaggcgtgagccactgcacccagcctctactggcaccttgatcttggacttcctagcctctagaactagaagaagtatatttctgatatttttgttaactcatctaaggtattgtgttagagtagcccaaacaggctaagagaaacttcctgctctttaccgagggactatatttttcttatgtttggattcctgaatttaattaaattaaataattttaaatatacagtattatagtcttcctaagataattatattatctgaaattctttatgatctaatcagcatttgttctatttgcartctctcatagtggattctgtttttaaatgttcaattgtaagttcatcttcaccagtgcttcagtgaaaaaatccaacatttatccctccagaatgtcttatatttacttctaaaaatcccaggagtattaccaccccttaatgttaattttartgttaatttctcaacatagatgtttccagcccatacaagtattgtaattcaagctccaaacacaagtgaagtcaaatctatggttataaatgtcttagggagaatttttcttccagagattgggctaaaacagacaagccacattactggtattttttttctagaccacacttgctcttcaagggtcccagctagcaagaatggagggggacctaaggaagaagaccctattagatatttaggaggtatacaggaagaggmaggaaaggaagaaaaagcaattttaaaccctccaaaacaaaatgagcccacaaactaaaattctaacacctgaataaatctaatggtaagacagatggcataaaattaataaaagaaaaaaattggaccatgaactaactccagatgaaattattttttatggaggattttgataagtctcctaaagtaagtatgcccaaaaagataaactaaagcaaagcatttaaattttttaattatgagaaatcattatgcattaatgaaacaagaccatataaatataagaaaaaataattatcttgggcatgaaatatataatcatttaaattaaaaactcaatagatggtacccagataggcttagaaaacagtattcaaggattcatccacgcctgtaatcccagcactttgggaggctgaggcaggtgaattgcctgaggtcaggagttcgagaccagcctggccaacatggtgaaaccccatctctgctaaaaatacaaaaattagctgggcgtggtggcacaagcctgtaatcccagctactcaggaggctgaggcagtagaattgcttgaacccaggaggcggaggttgcagtgagccgagatcacaccactgcactccagcctgggcaacaagagcgaaactctgtctcaaaaaaaaaaaaaaaaaaaaaaaaattcacctggaaaggaacaaagaagagaataaaaaatatgaaagtacaattaggtactactggagataattgagaagataaaaaatatatctaatatctaattggagaatcaaaatggatgcaataagaaaagcaaatattaaaattttccagaactaaagaaagtcatgtgttctcaaaagaaagtgaagcaagcaggataaaagacatttttagacctagacataccatagtgaaacataagaatgtaaggaattaaaaaaattataaaagtatcagggagaaagttagcatccctataaaggaaaaataatgagatgatagttgatttgtcatcaacaataatagaagccaggagaaaaaatagttgtcaacctaaaattatatgcccagcaaaattactgctgaagactcaagtcaaaacaaaaacaatctttgatatgaaaagaataagaaagtttactactcactgacatatcataaataattactaaagaatatacatcaacaagaaaaaaactgaaatcagagggaaagcacgggataggaaaaaaatggcaagttcagaaaaatgataaactaaattggcaaagtgagttacatttgagaatatgtatatattaatacatataataatatatataatatttttgtttgaaaaaaggtaaaattggatgaaatgatttgatatctgagacttaaagtattccacacttacaaaaaaaaaagtgtgggggacatgaagacagaaaagaaacaatgttgataattgttgaagctagatgatggatacatgagggttcattatgctgttctctacttgcactataaatgtttgaaatttttaataataaaaaagctttttaagtaaaattatacttctatattaaaatatcagaataaaagggttttgtggtgattaaaattgtgtttttcatatttgggaggaaggaaggaatactgagcaacttttgaatttgttagatcaatttgtaggtagtgtataaaagctaaccattaaaagattagaaatataatctgtatcttcaaaattattatggggggaaaattaatatagaaaagtttgtcaaccaacaaaaggctaggaaagaagggtaaaaaagaaataagaaaagataataaatagaaaaccaaaatggtatggtagagtgaaatccaaatttgtcaacattataataaattttactaaattaacattaaaagacattttcacatgacaaggagcacataaaccaactacatgcactttataagaaatacagcataacaaaatcacaaagaaatgatgaaaataaaagaatagaaaaatacatattataaaagtacttaaaaaaataaagaagttagaatagtaatatctgtatcagaccaaatagaacttaatgcaaacagcattaataggaaaaaaaagtgacaatgtaaaaaagggacactttactttttaaaggacactttaaaaaaaatcaatttttaaagtgattaaggccgggtacagtggatcatgcctgtaatcccagcactttgggaggctgaggtgggtgaatcacaaggtcaggagttcaagaccagcctggccaagatggtgaaaccctgtctctactaaaaatacaaaaattagccaggcatggtggcaggtacctgtaatcccagctactcgggaggctgaggcagagaattggcttgaaccccggaggcagaggttgcagtgagccgagatcacaccactgcactccaacctgggtgacagagcaagactccatctcaaaaaaaaaaaaaaagaaagaaaaagaaaaagaaaagaaaaaaaagtgcttaaaaaaatacattagtcagaaatttccaacttgaatcataccattaagaaaatgaacacaaatacccagatggtgagaaaatgttagcaaagcagatatctgacaaagaactagtagcaaagatatataaataattttaaaattataaagacaccacttcacacctagtagatgggttaaaaatgttaaaactgaccataccaagtgttggtaaggatgttgaacaactggaactcttacacactgttcacaggaatgtgaaatagaataaccactttggaaaacagtaagttaaacatttaccaactgtgatggtttatacagagtgtcaacttgattggattgaaggattcaaagtattgatcctgggtgtgtctgtgagggtgttgccaaaggagattaacatttgagtcagtgggctgggaaaggcagactcacccttaatctgagtgggcgcaatctattcggctgccagcacggctagaatrtaagcaggcagaaaaatgtgaaaagagagactggcctagcttcgcagcctacagctttctcctatgctggatgcttcctgccctcgaacatcagactccaagttcttcggttttgaatttggactggctctcctctctcctcagcctgcagatggcctattgtgggaccctgtgattgtgtgagttatacttaataaactcccctttatattccattacttctgtcgctctagagaaccctagtacaccaaccatacaactccgccattccactcctaggtgtttgcccacaagaaatgaaaacttaggttcacatacagaatatacacaaatattcatagccaaatgaaaacttaggttcacatacagaatatacacaaatattcatagcccaaatctggaaacaacataaacgtccccaacaggtgaatctacaaacaaattgtggtatatctacacaatgggatactactgagcaatataaagtaaatgaactatcaatatatacaacaacatgaataagtctcaaaattattctcaaacagtagggtttctaggcaatttaagggtgttgtttctctgtagcctaagccaaagcccaagatagagaagggcttatatcaaaaagatttgtgggtctggctgttatctaacgaagtgcctcccaataagagttgcagagacctctaagatttttgaaagaaatatatatacagaagcataaccaggttggaatgaaagggacacagacagtatgaaacgaaaagaggcctttggattccaaaattctgctggcaaggaggctaagaaaactccttcttttcctccttcctttgctagacaaggtgattctaatgtccatatggaaaaataagcaaaacaagcctgaaaactctaaggaagagtatttaggggacctagccctcaaaataataaactatattataaacaatgtgtttataaatcaataattagactagaaagaataggaattgaatgcaaatacgtataaaaacgtaccataacagtagcatttcaaattagaataaaaaatctttttttttttttttttttgagacggagtctctctgtcgcccaggctggagtgcagtggtgtgatctcggctcactgcaagctctgcctccccggttcacgccattctcctgactcagcctgccgagtagctgggacgacaggcacctgcccccacgcccggctaatttttttgtatttttagtagagatggggtttcaccgtgttagccaggatggtctcgatctcctgaccttgtgatctgccctcctcggcctcccaaagtgctgccgcgcccggccagaataaaaaacctttttaagtaaatggtgctggaataagtgaggagttatttggggaaaaaaaaaagttgggggccgagcacggtggcgcacgcctgtaatcccagcactttgggaggccgaggcgagcggatcacgaggtcaggagatcgagaccatcctggctaacaaggtgaaaccccgtctctaccaaaaatacaaaaaattagccgggcgtggtggccggcgcctgtagtcccagctactcgggaggctgaggcaggagaatggcgtgaacctgggaggtggagcttgcagtgagccaagattgcaccactgcactccagcctgggcgacagaccaagactctgtctcaaaaaaaaaaaaaaaaaaaaaagttgggacctgcacggtggctcacgcctgtaatcccagcactttgggaggctgaggcgggtggatcacgaggtcaggggtttgagaccagcctgaacaacatggtgaaaccccatctctactaaaaatacaaaaattagccagccacggtggtgtgcgcctgtaatcccagctactcaggaggctgagacaggagaatcgcttgaacccaggaggtggaggttgcagtgagccaagatcatgccactacactccagtctgggcaacagagcgagactccatctcaaaaaaaaaaaaaaaaaagttggatccacactttgtagtgtaatatgaataaagttaaagatgaataaaatattttactatagagaaaattaaataataaatatatttttaaaatcctgggattgacaaggtacagtggctcatgcctgtaatcttaaccccttggggggccaaggcatgaaaatcacttgagtctaggagttcaagaccagcctgggcaacacggcaagaccctgtctctacaaaaaaaaaaaaaaatagctgggcatggtggtgcatgcctatactcccagccactcaggaggctgagaggcaggaggatcacttgagcccaggaattcaaggttacagtaagccatgatcgggccactgcattccagcctggggaacaaagtaagatcctgtatgtttaaaaaaaaaaaaaaagaagaagaagaagaagaaagagtttaagaccagtctgggcaatatggtgaaacctcatctctacaaaaaataaaaaataaaataattagtcaggcatagtggcaagtgcctgtagtcccggctactcagcaggctgaagtgggaagttagattgagcccaggaggtcgaggctgcagtgaggtgcgatcatgccgctgcactccaacctgggtgatagacggacaccctgtctcaaaaaaaaaaaaatcctagaatctttgttttataaaataattgattaatctaactaaacaaaaataacatggcacaagtcaccataaacaaaataaaaggcaaaaaccaaggaaaatatttttgaatcatgttacagataaaagactaatttccctgaagtgcagaaagttcccaaatcaatacaatgttaatacccaaattttaaaaatggcccatgaacgaattttcctgaaagaggaaataaagatggctctttagcatatggaaagataacctcactcacaaaagaaatgccaattaaaactatcatgaactgacttttatttaacctatcaattatgcaataatccaaaaatctgacaacacactgagcaagagaatggggaaataggcacttctagatactgatgttaataggtgtaacctctgtgaaggacaattttatgatatccaatttacaagtgtacatgctctttgacccaatactttttgttctggaaatttaaactatacatatactagtttttgaaacaataatatgtattcaacataatactgttaaataaaaaaaaagcaaattataggacagtgcactatggaaccatttatataaaaagacacatttacacaagaaatatatttttgcttatatttgtatggaattcctctggagaagtatacacaagaagcagattagattggttgactgtagggaggaggactgtgtagctgatgtaaagagttaggtagtaggaagactgaaaagggtctacttaaaaaatttgggacgtattttaaaagtaaatcatgggccaagtgcagtggctcatgctgtaatcccagcatctggctcacagtttactttatgggaggcccaggtgggaggatcacttgaggccaggagttcaagatgagcctgggcaacatagcaagaccccgtctctacaaaaaacaaaaaaattagccggccatggtggcatgctacacctgtagtcccagctattctggagcctgaggcaagaggatcacttgagcccaggagttcaaggctgcagtgaatatgatcatgctgccacactccagcctgggcaacagagaaagatcctgtctcaaaacaaatgttaagtaaattataataaaattttaaaaattcaaaggactccaaaatttagaactaataagagagtttagtaaagttacaggatacatcagtagtgttctatacagtagcagtagttctatacattcctcttgaaaacacaagaggaaaaaagggagagatttgttaaaggacagaaaattacagctagataagaggaataaattctagtgctctataccactgtaggatgactatagttaatagtaatatggtatatagttttaaatcactagaaggaagatattaaatgctcccaacacacagaaacaataaatgtttgagatgatggatatgctaattaccttgaactgactgctatacttcatatgtattgaaacatcactgtgtatcctatgaatatgtaaaatcaaaatttttcaattaaaaaataaaattaggcaggcacagtggctcacgcctataatcctagcattctgggaggctgagacgggaggatcacttgagcccaggagttcgagaccagcctgaacaacactgtgagacccccatctctataaaaaataaataaaattaaaatacaaaaaaatcccatttaaaataccaacaacaacaaaattaagtggtacctatgccayaaacaaaattataaaaatacttaaaaatacaaagaaaaaagagacatagagagctatactatatttatggatgttaaaattcataatcacatcaatgcatgaatagataaagaaaatgtggtgtatatatacaggatggaatactattcagctattaaaaagaaggaaattctggcatttgtgacaacatgaataaccctggagggcattctgccaagtgaaataagccagacacagaaagacaaatgctgtatgagctcactaacgtggaatcaaaaacaatcgaactmatagaagcagagagtagaatggtggtttctaggggctggggttgggagaaggtggaagggaaagccaggagatgttggtcaaagagtagaaaatttcacttagacaggtggaataatttcagaagatctatggtacagcatggtgactatagttaataacaatttattgtatacttgaaaattgctgagagtagattttaagtgctctcaccataaataaatgataagcatgtgaggtaatacatatatttattagcttgatttagctattccacaatgtgtacatatttcaaaacatcatgttgtataccgtaagtatatattaatacaatttttatttgccaattaaaaataatttttaggacaagtgcagtggctcacacctgtaatcccagcactttgggtggccaaggtgggaggacaacttgaagctgggagttcaagaccagcctgcacaacataacaagacctcatgtctacaaaaaataaaaaagattagctgggcatggtggcatgtgcctgtggtcccagctacttgggaggctgaggtgggaggattgcttgagcccaggaattcgaggctacagtgagctgtgattgcgcctccacactccagcctgggcaacagagtgaggctctgtctcaaataataataataataataataattttaaaagattcataatcccaaatatgccaattcccataatttaatcaataaataaaatgtcattcccaccaaaatcccaacaacgtttctcatactttataagagaatgcaaagaggtacagcaggggtgtccaatcttttggcttccctggcacattggaagaattgtcttgggccacacataaaatacactaacactaacaacagctgatgaactaaaaaaaaaaaaaaattgcaaaaaaatctcataatgttttaagaaagtttacaaacttgtgttgggccgcattcaaagctgtcctgggctgtggcttggacaagcttgatatactgtgtatgatgaggaatgggcaacaatagttaagataattttgaagaaaatgctgtgaagactgctagcacaatatgtgaggactggccccaccaggtatcaggaggtacaatggaagccatggaagttaagacagagtatcactgatgcaaatgtagaaaatgatgccattggagaagaatggagagcccagaaccaaacccgtgcattgtaaaacttgatctttgtagccaggtctcagttggctattttgaatgtctcaactgcagcattttcactttgtaccagtgctcgacttaggtatcggcaaatgatctacttacgtatcatcatcatcagatcttggttctagttgttcctcatctacttcaatgccagagaccatttctaccttcccttcatcttcttctttgggtagccattgttttaatgttcccattgctaaagaaatgacagagaaagatatgaaagcatcccagcctatatacccaatgaggggcatataccaaaaacctgatagtgaacatcagtataatggtaaaccttttagccatttccatcaaaacagagaataagaaagggataacacaaccagacaagtaaaagtgacaggaataaggatcagagaggaagagataaaacacctccacttttggggtagatgctttcattgtattagaaaaattaagaaaatctttgtgtaaaaaaaagatttaccacagttggaccactcttattctccactgtttctataacctgagtctcccaccatggttagacttcatcatgaatgcctgtagggaaaacccaaagcacacacacaccttcatctttttttttttttttgcagtttttttttttacttaaaatgtgctttttatttttcctcttgggaaaaggactagattgaagatagcacaatatttcatttgtttttttctttttttttttttttttgagacagagtctggctttgtcacccaggctggagtgcaatagtgcaatcttagctcactgcaacctctgcctcccaggttcaagcaattctcctgcctaagcctcctgagtagctgggattacaggcacatgccaccacacctggctaatttttgtatttttagtagagacggggtttcaccatgttggtcaggctggtctcaaactcctgacctcctgatccacctgcctcggcctcccaaagtgctgggattacaggtgtgagccaccgtgcccggccctagtgttcgttttttaataccacaaagaattataaggcagrggctttttttttttttagaactctggtcagaagtcaggttaattaaaagtttaatatttaggctataaacgttttttaaaggccttttctgctttttcttcttttggatgctgtttccagaattttttttttcagttgcttcctatctttttggcatgacttctgctgagaaaaatgtacaacttctcactggccttttagttagcttaaaaacctccccaaattggctcctatatgacttgttcttctatttccttccacttctgctcctcctyccttttgccattttcaataacacgtgaaggaatctgcaggagacttctaatgactctaaaacccctcgaagaatgcagaaaaggtgccattcatccctccttaggttggtctgttttcctagtggagtacaaagagtcatgggcaggttcctctcagatctaaagctctactgtcttttgcagtaagttacttgatcaatctgactttggggtaccagggattacattgtactgtgagagagaactgatttttgtgtgtgcaatggctgacgagtcactgataaaagctgtagttttggaagtggctgacagcggctgcggttgtgaaaggaaaataaatctcgggaccgatttatcactaaggcaagagaaaagctgaaaactacgtcaggcaaacctgcctcccattttattcctaaataagatagctacaattataaaaaagctacatacctccctcacaatttgcccacagggaagttccttgtaggcctcaggatctttaccctaaaacaattctgttgaatttcaccctggcaatgtaaactgatcgctgatcttcacaggtgcaggacagaaagtcattcctctgctcacctgagacaaatcatatctgattgcttctgccctattgtttatgtaaaaatgcagattcactgagccagactaaattgtgtattcagtgaaaggctgatcaaggactcaaaagmatgcaaacttttgtctcttatctacctatgacctggaagccctccccccgaccccacccccgccctgcttcaagtcgcccctcttttctggaccaaaccaaggtacaatttacacatagtaattgatttctcatgtctccctaaaatgtataaaagcaaactgtaccctgaccaccttggacacatgtcatcaggacctcctgaggctttgtcacagacgcatctgtaaccttggcaaaataaactttctaaattgagacctatctcagatattttgggtacacacagtgaatggttgttactggatggggctacttacttctttgtgcatttagattgaaagacaggtttgaacacttggaggttatgggaacaccaccaaggtataagactcctattggggatgggctgctcacagagtagcttgactggcattaggttacccaccagcctcaggggaaygtatttgcagcaaggagcacagactcatggtgtttccctctttgtgggggacccaggattcaatatagaagtgagatccttgattttgaaagatttagatgcactgccttcgagttttgcctgcttttcacatattaaatattaggccctgttttaaaattctttgtaaaaaaaaaagatttatatctataaaggaaatcttcatttgtaaggcctccctctacacccaagccaccagaaatttttaagatgggaaaggcattggtttaaagttcacataacaaaccttacctttgttccagacacctttcctggcaatcttgtcttgactaaaccttgactgtgcctttttttttccagcaaacaatagtgtttagatctaagttctgtgcccttaagagtcatcctttcagaagtacaaatttagggttggcttgctaacaattgtttagggcaatggaacaggtaatcaagagattgatagtctaaagttggaggacatggtggctcaggctgggtgcagtggctcacrcctgtaatcccagtactttgggaggctgaggcaggtggatcacttgaggtcaggagttcraaaccagcctggccaacatggtgaaacccagtctgtactaaaaatacaaaaattagctgggcatagtggcatgcgcctgtaatcccagctgctccagaggctgaggcaggagaatcacttgaacctgggaggtagagggtgcagtgagccgaaactccaacctgcgtaacaaagtgagactccgtctcaaaaataaataaataaataaaataaaaaataaagttggaggaaaaattatttgaaaactggcaaatgaaagccttatgaagctacaaaacctgcttctgtgtgtatgtttatatgtatcatgtgtatgtgattttgtaactgagtgccctatttttaatttttttttcctcctgcagccctctgtattaactttttagtaatgaaataaaaatcttgactttctttccaccaagcactcccttgcattgctggcttatctaattatgtttgcttagaagttccagagattgaatcttgagacaatccagatgcatatgaaattctcccccaccaggaacttcaaggctgcagctaatttacaacccagacaagcccgagatggtaccagcccaattcaccagatggggcaataactcaagataagtcattggaacaagtcacgtagacttgcaccatctcgccccacataccctccataccaaacatcctcttcttaagccctagcattttgcctgagaattccgaagtggttttattaaggcaggagcctgaaccatctccccactgctagcgctgaaaaataaaggcactttccttctactgcaccttgtccttgttattcaattttgcaagcggagggcagctgaacytgtgttttgttgatatttcactaccaaaatatatgaaagagctatagttaattggcttaaagaaaaagtaagtgcttaaatgaaatattttatcagaaaagtagaaatgcactaaaatgccttttaattcttgtaacttgggtaaatttttggtaaataagactagttttttggtttaatgaaagcagcagtgtcatttgatcagcaaaacgtccatgtattaaccttagggcttttgctttggtggtgactgcctaacattcacaaactgtagaaatgattaataaagaaataagatgatggctagatttgtccaatgtttcctgaaaatttccaaacatagttgttatgaaggaataaataaatgtaatgaaataagaggtttttgtttgtttgtttagagttggagtctcactctgtcacactaactggagtgcagcagcacaatcatggctcatggcagcctccaactccagggctcaagtgatcctcctgcctcagcctcccaaagggctgggattacaggcatgagcctggccaggtagaagttttaataataattaggttttccaaaaagrcagcagtaacctctgcagacttaaaagtccctgtctgacagctttgaagagagcagtggttctcccagcacgcagctggagatctgagaacaggcagactgcctcctcaagtgggtccctgacccctgacccctgagcagcctaactgggaggcaccccccagcaggggcagactgacacctcacacggccgggtaytccaacagacctgcagctgagggtcctgtctgttagaaggaaaactaacaaacagaagggacatccacaccaaaaacccatctgtacatcaccatcatcaaagaccaaaagtagataaaaccacaaagatggggaaaaaacagagcagaaaaactggaaactctaaaaagcagagcacctctcctcctccaaaggaacgcagttcctcaccagcaacagaacaaagctggacggagaatgactttgacaagctgagagaagaaggcttcagacgatcaaattactccgagctatgggaggacattcaaaccaaaggcaaagaagttgaaaactttgaaaaaaatttagaagaatgtatgactagaataaccaatacagagaagtgcttaaaggagctgatggagctgaaaaccaaggctcgagaactacgtgaagaatgcagaagcctcaggagccgatgcgatcaactggaaggaagggtatcagtgatggaagatcaaatgaatgaaatgaagcaagaagggaagtttagagaaaaaagaataaaaagaaacgagcaaagcctccaagaaatatgggactatgtgaaaagaccaaatctacgtctgattggtgtacctgaaagtgatggggagaatggaaccaagttggaaaacactctgcaggatattatccaggagaacttccccaatctagcaaggcaggccaacattcaggttcaggaaatacagagaacaccacaaagatactcctcgagaagagcaactccaagacacataattgtcagattcaccaaagttgaaatgaaggaaaaaatgttaagggcagccagagagaaatgtcaggttatcctcaaagggaagcccatcagactaacagtggatctctcggcagaaactctacaagccagaacagaggggggccaatattcaacattcttaaagaaaagaattttcaacccagaatttcatatccagccaaactaagcttcataagtgaaggagaaataaaatactttacagacaagcaaatgctgagagattttgtcaccaccggcctgccctacaagagctcctgaaggaagcgctaaacatggaaaggaacaaccggtaccagccactgcaaaatcatgccaaaatgtaaagaccatcgagactacgaagaaactgcaccaactaacgagcgaaataaccagctaacatcataatgacaggatcaaattcacacataacaatattaactttaaatgtaaatggactaaatgctccaattaaaagacacagactggcaaattggataaagagtcaagacccatcagtgtgctgtattcaggaaacccatctcacatgcagagacacacatacgctcaaaataaaaggatggaggaagatctaccaagcaaatggaaaacaaaaaaaggcagggttgcaatcctagtctctgataaaacagactttaaaccaacaaagatcaaaagagacaaagaaggccattacataatggtaaagggatcaattcaacaagaagagctaactatcctaaatatatatgcacccaatacaggagcacccagattcataaagcaagtcctgagccacctacaaagagacttagactctcacacattaataatgggagactttaacaccccactgtcaacattagacagatcaacgagacagaaaatcaacaaggatacccaggaattgaactcagctctgcaccaagcggacctaatagacatctacagaactctccaccccaaatcaacagaatatacatttttttcagcaccacaccacacctattccaaaattgaccacatacttggaagtaaagctctcctcagcaaatgtaaaagaacagaaattataacaaactatctctcagaccacagtgcaatcaaactagaactcaggattaagaatctcactcaaaaccgctcaactacatggaaactgaacaacctgctcctgaatgactagtgggtacataacgatatgaaggcagaaataaagatgttctttgaaaccaacgagaacaaagatacaacataccagaatctctgggacgcattcaaagcagtgtgtagagggaaatttatagcactaaatgcccacaagagaaagcaggaaagatccaaaattgacaccctaacatcataattaaaagaactagaaaagcaagagcaaacacattcaaaagctagcagaacgcaagaaataactaaaatcagagcagaactgaaggaaatagagacacaaaaaacccttcaaaaaattaatgaatccaggagctggtttttcgaaaggatcaacaaaattgataaaccgctagcaagactaataaagaaaaaaagagagaagaatcaaatagatgcaataaaaaatgataaaggggatatcaccaccaatcccacagaaatacgaactaccatcagagaatactacaaacatctctacgcaaataaactagaaaatctagaagacatggataaattcctcgacacatacactctcccaagactaaaccaggaagaagttgaatctctgaatagaccaataacaggakctgaaattgtggcaataatcaatagcttaccaaccaaaaagagtccaggaccagatggattcacagcygaattctaccagaggtacaaggaggaactggtaccattccttctgaaactattccaatcaatagaaaaagagggaatcctccctaactcattttatgaggccagcatcatcctgataccaaagcctggcagagacacaaccacaaaagagaattttagaccaatatccttgatgaacattgatgcaaaaatcctcaataaaatactggcaaaccgaatccagcagcacatcaaaaagcttatccaccatgatcaagtgggcttcaaccctgggatgcaaggctggttcaataatatacgcaaatcaataaatgtaatccagcatataaacagaaccaaagacaaaaaccacatgattatctcaatagatgcagaaaaggcctttgacaaaattcaacaacccttcatgctaaaaactctcaataaattaggtattgatgggacgtatctcaaaacaataagagctatctatgacaaacccacagccaatatcatactgaatgggcaaaaactggaagcattccctttgaaaactggcacaagacagggatgccctctctcaccactcctattcaacatagtgttggaagttctggccagggcaatgaggcaggagaagcaaataaagagtattcaattaggaaaagaggaagtcaaattgtctgtgtttgcggatgacatgattgtgtatctagaaaaccccattgtctcagcccaaaatctccttaagctgataagcaacttcagcaaagtctcaggatacaaaatcaatgtacaaaaatcacaagcattcttatacaccaacaacagacaaacagagagccaaatcatgagtgaactcccattcacaattgcttcaaagagaataaaatacctaggaatccaacttacaagggatgtgaaggacctcttcaaggagaactacaaaccactgctcaaggaaataaaagaggatacaaacaaatggaagaacattctatgctcatgggtaggaagaatcaatatcgtgaaaatggccatactgcccaaggtaatttacagattcaatgccatccccatcaagctaccaatgactttcttcacagaattggaaaaaactactttaaagttcatatggaaccaaaaaagagcctgcatcgccaagtcaatcctgagccaaaagaacaaagctggaggcatcacactacctgacttcaaactatactacaaggctacagtaaccaaaacagcatggtactgctaccaaaacagagatatagatcaatggaacagaacagagccctcagaaataacgccacatatctacaactatctgatctttgacaaacctgacaaaaacaagcaatggggaaaggattccctatttaataaatggtgctgggaaaactggctagccacatgtagaaagctgaaactggatcccttccttataccttatacaaaaatcaattcaagatggattaaagacttaaacgttagacctaaaaccataaaaaccatagaagaaaacctaggctttaccattcaggacataggcatgggcaaggacttcatgtctaaaacaccaaaagcaatggcaacraaagccaaaattgacaaatgggatctaattaaactaaagagcttctgcacagcaaaagaaactaccatcagagtgaacaggcaacctacaaaatgggagaaaattttcgcaacctactcatctgacaaagggctaatatccagaatctacaatgaactcaaacaaatttacaagaaaaaaacaaacaaccccatcaaaaagtgggcaaaggacatgaacagacacttytcaaaagaagacatttatgcagccaaaaaacacatgaaaaaatgctcaccatcactggccatcagagaaatgcaaatcaaaaccacaatgagataccatctcacaccagttagaatggcaatcattaaaaagtcaggaaacaacaggtgctggagaggatgtggagaaataggaacacttttacactgttggtgggactgtaaactagttcaaccattgtggaagtcagtgtggcgattcctcagggatctagaactggaaataccatttgacccagccatcccattactgggtatatacccaaaggactataaatcatgctgttataaagacagatgcacacgtatgtttattgaggcattattcacaatagcaaagacttggaaccaacccaaatgtccaacaatgatagactggattaagaaaatgtggcacatatacaccatggaatactatgcacccataaaaaatgatgagttcacgtcctttgtagggacatggatgaaattggaaatcatcattctcagtaaactatcgcaagaacaaaaaaccaaacaccgcatattctcactcataggtgggaattgaacaataagaacacatggacacaggaaggggaacatcacactctggggcctgttgtggggtggggggacgggggagggatagcattgggagatatacctaatgcttgatgacgagttagtgggtgcagcacaccagcatggcacatgtatacatatgtaactaacctgcacattgtgcacatgtaccctaaaacttaaagtataataataaaaaaataaaaaaataataataatcataataataattaggttttctaatgtgtttacttaaaaaaggtttttcaaatccttttggtaactttttctcctcaagttttgctaagctaaattaaatgataggtattcattatctagatcatctccaaataacatataatgctaagatattaatgactaattatgagtttataatcttaaacttttggcttcatacttcagagaaacaaagatacttagatgtgttaataaaatgtcctgttccacataaaaaaattccattagaaagcctctttcaaaatattataaaatgtgtattcattaactgttgggactcaactgacagttaaaaattactatgtttttgtagtggtaattaactttgtaaacttttttttgtttttttttagacaaagtcccactcttgtcccccaggctggagtgcaatggcgccatctcggctcactgcaacctccgccacccgggttcaagcgttcctcctgcctcaacytcccaagtagctgggattacaggcgcctgccaccatgcccacctaatttttgtatttttagtagagacgaggtttggccaggctggtctcgaactcctgacctcaggtgatccacctgcctcggcctcccaaagtgccgggattacaggcataagccaccgcgcccagcctaactttgtaaacatttatcagyctccaagaatatctagtaccttagtttttctacttgtttttcaacctcacttcaccacaaaaccaggtcccagacctcacactcatgcagatgctcctgggatccctgcttgcctgcagtagcttttcttgtagcacttcacacttgaatatctgatataagaacaaaccctcattatgatgtgatttccctcaaactttattttttatttttagagacaagttcttgctctgtcagccaggctggagagcagtgatcatagttcacagcatcctctaactcctagcctcaagagatcctcctgcctcagcctcccaaagtcctggaattataggcgtgagccattacacccaggcccctcaaattttagaaaatgatggttggcttcccttaaagcagtggtccccaacctttctggcaccagggaccagtttcatggaagacaatttttccatgggggcagggaaggggagtggttttggggacctcagatcatcaggcattagattctcataaggagcacacagcgtagatctctcacatgcacagttcacaatagggttcatgctcccatgagaactgaatgcagctgctgatctgacaggaggcagagctcaggcagtaatgctcacctgcctgccactcacctcctgctgtgtggcctggttcctaacaggccacagactggtactggtctgcggcccgagggttgggggctcctgccttaaagtaaacaaaagcagaatcttgctaaaaattggaggaaaaaaacaaatgatattatgttgtatttttattgtccatgggatagtaatttgagtccactgaatagctgtcagaaataaactgactcaggtagagcaaaacaatactggatcgtcagctacaaagccactagccctacttaaacttttcaccagttgtcagctgattgcattaaagaaaattacaccactctcctggaaagctcatgtcttttgttagtagcatttggaataggattggacaaagcaaatcagcttctgaaaaggctagacaccctcccaattctctctcccagctgaaggtatttttatcccctttcagcatttgcaagtcttgacaaaattcctctgaggactggttatgttgttaaaaataaactacataccaaattcttcatcggcagaaaatgagctactcgttagatgtgctgctgccaaaacactcattaaagttcctggagcttcatgccgccactgtttcctgtttcctggaatgccttcaatcacaataacttggccatctgaagaggaaagtgttattaaaaataaaaatgcttcttcactggcatttgtataagatcaaagaatgttaaaaccttggaggtaacctaatcccacctctcattttattaataaagaagccgagatatagaaaagtttagtgacttcttgtcacatagctgatgaggggaagagtcattcattgctttgtaaactggccattttggtgtgataacaatttttattctatttgcctattttaaattgatttataacttaataagacaattgaggggaaactcaatttatagacataattgctcatttcagtgatatacttacatatttcaacttacagcacatgtacaaattttagctccctctcagcccatgttatcaagaacataggaaataagtaataaaaatctttaccacctgtgaagataacatccagaggttggaggctgctatggccctcttcttttttttctttctttctttttttttttgagacagagtctcactctgtcagccaggagtgtagtgtcacgatcttggctcactgcaacctccgccgcccaggttcaagcaattctcctgcctcagcctcccgagtagctgggattacaggtgtgtgccatcacacccggctaatttttctatttttagtagagacagggtttcaccatgttggccaggctgatcttgaactcctgacctcatgatctgcccacctcagcctcccaaagtgctgggattacaggcgtaaaccactgcacccagcctgctatgatcctcttctaaggaaaggctatgtgagaggttcaaatgtaaatgatggaatttaggtagaaaacataatcatatcctaaacactcctaacatttaaatagcacattggcttcaaagcaatttatatgtatctttgaactattaactctcgaaatcttgtagagatagctactcttttaattcttattttactggtggaaaaaaaaatgacccgacaacaatgacaacagcagcagctaccactactatggctattactgtgctcagcagtaataacatactattaagaatgacaatctctccctctccctctccccayggtccccctctccccacggtccccctctccccacggtctccctctccctctctttccacggtctccctctgatgccgagctgaagctggactgtactgttgccatctcggctcactgcaacctccctgcctgattctcctgcctcagcctgccgagtgcccgtgattacagacacgcgtcgccacgcctgactggttttcgtacttttttggtggagacggggtttcgctgtgttggccgggctggtctccagctcctaaccgcgagtgatctgccagcctcggcctcccgaggtgccgggtttgcagacggagtctggttcactcagtgctcaatggtgcccaggctggagtgcagtggcgtgatcgcggctcgctacaacctccacctcccagccgcctgccttggcctcccaaagtgctgagattgcagcctctgcccggccgccaccccgtctgggaagtgaggagcgtctctgcccggccgcccatcgtctgggacgtgaggagcccctctgcctggctgcccagtctggaaagtgaggagcgtctctgcccagccgccatcccatctaggaagtgaggagcatctctgcccggccrcccatcgtctgagatgtggggagcacctctgccctgccgccccgtctgggatgtgagaagcgcctctgcccggccgcgaccccgtctgggaggtgaggagcgtctctgcccggccgccccatctgagaagtgaggagaccctccgcctggcaaccgccccatctgagaagtgaggagccccttcgcccggcagccaccctgtctgggaagtgaggagcgtctccgcccggcagcctccccatccgggaaggaggtgggggtcagcccctgccaggccagccgccccgtccgggagggaggtgggggggtcagccccccgcccagccagccaccccgtccgggagggaggtgggggggggggtcagccccccgcccggccagctgccccatccgggagggaggtgggggggtcagccccccgcccggccagccaccccatccgggaggtgaggggtgcctctgcccggccgcccctactgggaagtcaggagcccctctgcctggccagccgccctgtccgggagggaggtgggggggtcagccccccgcccggccagccgccccgtccgggagggaggtgggggggtcagccccccgcccagccagccgccccgtccgggaggtgaggggcgcctctgcccggccgcccctactgggaagtgaggagcccctctgcctggccagccgccccatccaggagggaggtgggggggtcagcccccccgcccggccagccgccccgtccgggaggtgggggagccagccccccgcccggccagccaccccgtccgggagggaggtggggggggtcagccccccgcccggccagccgccccgtctgggagggaggtgggggggtcagccccccgcctggccagccgccccgtccgggaggtgaggggcacctctgcccggccgcccctactgggatgtgaggagcccctctgcccggccaccaccctgtctgggaggtgtacccaacagctcattgagaacgggccgggatgacaatggcggttttgtggaatagaaagggcggaaaggtggggaaaagattgagaaatcggatggttgccgtgtctgtgtagaaagaagtagacatgggagacttttcattttgttccgtactaagaaaaattcttctgccttgggatcctgctaatcggtgaccttacccccaaccctgtgctctctgaaacatgtgctgtgtccactcagagatgaatggattaagggcagtgcaagatgtgctttgttaaacagatgcttgaaggcagcatgctcgttaagaatcatcaccactccctaatctcaagtacccagggacacaaacactgcggaaggccacagggtcctctgcctagaaaaaccagagacctttgttcacttgtttatctgctgaccttccctccactattgtcctatgaccctgccaaatccccctctgcgagaaacacccaagaatgatcaataaaaaataaaaattaaaaaaaaaaaaatgaccctatgaaatcgcaaaaaaagttgttgagctggccttggaaggtaaatcaagtcagctgtccttcctcacgcattttccctcactctgaggaaggtggcatcctggatttttcctcctttatatgtgcatgtctagagtggtcatttgtccaggataattagcaggcaagtctctttaggcatagggagatatcaaaacaacatatttgaaagtgtctgatacaagatctatagggtgtatagtgagaagtagactatcacatcaggatgagcactgggctgtacgggtccttggtcttcccttcctgacgactgacgctaagcacagactcactgtcaggccccgtggggcaggtggaggtgatgtcggccactgccatcatctgcagcagagtctgaggcgctcctccatcccactgcctcctgtttcccacagcagctacagtctgcgtggaaaaccctgggtgtaagaaaacaactcattaattcgaaagcagtcaaagtgtgactaattgtcccaaacacttcttaggaactcagaggcagtttatcagcaggtatgttcaaaaccagaaaaatgaccacccttgttctaacagatataagactgaaatgacaaaaaggtgtcaacactgttttacttttactcttagtgtttgactgactagccaatattgctaaatgctaaggaaatatcagtgacacaaatggacttccttgaggcatctatgagaactttcaatctagtctttttccacagaaacaaaatctgttccattttcttaatttaaaaaataacttgttctgtctttttccttattactgttttcactatagaaaatctgaaaatcaggtaggtagaagaaaaaaaaaaatcacccataatctcactgtccagagactataataatttcaatttttcccttctgcatatggtttttgctttgttttgaaacaaaaaattggaccacatactacatgtcctctcagagcttgcttttttcaatcagctacagatcatatccaggttattaagtattcttctatacagctgttttaaagcaatcataatattctgctttatgaatgtaatataactaatcatttcctgccagatttttaggttgctagtgatttttcactattaaaaataataccattatataatgacctcatttgtagctaaatttttgtggacatttatgattatttaaactagatacattattgaaaatgacaattctaggggttagtatgatttgctttattacagctttttgttgttaaagttgaattattactaatttattctgtgktttttttttctatgtattttgaacagatagctcttccctgttcaaaaaaaattaactcggccgggtgcagtggctcacgcctgtaatctcagcactttgggaggccgaggcgggcggatcacaaggtcaagagatcgaaaccatcctggccaacatggtgaaacccygtctctatcaaaaatataaaaattagctgggcgtggtagcgggtgcctgtagtcccagctactcgggaggctgaggcaggagaatcgcttgaacccagaaggcggagtttgcagtgagccgagatmacgcctttgcactccagccttggtgacagagtgagacgctgtctcaaaaaaaaaaaaaaatgacctatgttcttttatttcattttctaatgtataactttttacatataactcttttttaaaaaatttattttgttgtatcatattatatagggtctgatttcacaatcttccccaaactgttaaccaattggcccagcagcatttatctgaataatcctttcttttcacgctgacttgtgatgttacttttcatttgtgctgaattatgatacatactaggatctgtttctaactttctcttctcactgttttaactatttgggtgctactatcatattgtgtgaatgactataatttctgtaatatattttgacatttggaaatgtaagtaccacttcactgttcttctttttcaaaatttttggccacttaagaagctccaggattctccaacctgccaagatctccctataccattaaaaaaaaaatcctactgtggttttgattgaaatagccataaatccacatattgagggaggagaaagaaagaatcagttaggcaggcagttagggcaggtcctcagaattctttcaaacaaaagaacagtctgaaaaatcaagctgcagacacagataagggaactagcacaggaagcttgcctaaaacatgcccacagctgcacagataagggagcaaagtccaacacagaaatgcctttgttctttgtgcaatcagtgggcctctagcaaatagttccttctccttttgtgggcatgtacatggtgggccccagtgagcacattcctttcctttttggggcatactttggactgtgagccaagcctctgtgaaccatcactccaacactcagctggttgtgggccaaggctccaactggtctttacaccacgtcattttttttttttttttttttgagatggagtcttgcttgctctgtcacccagctggagtgtgactggagtgtggtggcacaatctygtctcactgcaaccttcacctcccaggtccaagtgattcttgtggctcagcctcccaagtagctgagattacaggtgtgcaccaccacacctggctaatttttgtatttttagtagagatgggctttagccatattggccaggctagtctcgaactcctggccttgagagatctgcccacctcagcctcccaaagtgctgggattacaggcatgaactaccatgcctggtcaaccatcatgtcattttctgagtggtgccttttccaaaaacaacccctagccagtcagcatactaggagaacagggtggagctgccagaaattcatgccttatgcaaatgaaacccccagccctatcaggttcctcataaaagcctttgtactcagctgtgaaatggcaaccctcttgggtcccctctccacagtgaagagctttcctcttttgtttattaaattttcggtccaaactcacccttactgtccaccctccttattcttttggtcgtgagacaaagagttctgggtaatacctcagacaacgatactgcaatatttatttggaaaaaatatttccaatrtatagcaccgttatttctctccatttattcaagtggtctgtaaatacctcagtaaggttttacagttttctttctatatgccgcacaattctcataaaatttattcctaagtggatgaatacacaaatacacacacacacacacacacacacacacacacactcatatatatttgctgttattactataaatgagatctgacaaccaactgaggaaaacatttgcaatacatattacaggcaaaggtttgatttaaatcagtcttataaagaaaaaaacaaacatgccattttcagtagaaaaaaggatgaagggcatgagtacataattcataacagaaatatgaagggttggccaggcgtggtggctcaygcctgtaatcccagcactttgggaggccaaggtgggcagatcacctgagatcaagagttcaaataccagcctggcaaacatggtgaaacctcatctctactaaaaatattttaaaaatcagctaggcgtggtggcgcgcacctatgccagctactcagggaggctgaggcaggagaatcgcttgaacccaggaggcggaggttacagtgagccaagattgtgccactgcactccagcctgggcgacagagggagactccctctcaaaaaaaaaacaaaaaaagaaaaaagaaaaaaaaaggagaaatatgaatggtcaacaaacatayggaaaaatccttcagcctaaataataattacaggaatacagattaaaatgagagacaattttcagtatactactgatgaaggtttttttttctttcatctaaaaaacagccaaccccctctgcttttcccagcaaactgatgcaaagataaccattgaatttaccccttacacagttgactgctttccctgaggccattaacggctcctgaagggccaaatcccactcacctcatctggcctttctcttccagttgatgctgccaattcctgtgcctcctccatgacctgtctctcctcctttggctttactctctcctgattctccaaagtttgtttatatagtggtagggttatgtcctaagctccatttccttctcactccagtccttctgcataggtattttgaccatcaccaaagttaaaaaccacggatatgctaagggccaccaagctatatctttatccctgatatgccccaggccttcagtcttatatagaatctgcaactgatgctctatagacctaaatctcaacatgttccaaatttagatcactaccttgtctctcccgaccccattaccctcyatgtgatgtatttttggttgatgaaagcttcatgcatttgaattagaaaactgggaatatccttgagccccttctcttcctcagttcccacactcagtatctattctccctgcaccactctggctcatgcacttggactcttctcctgccttcagtcttgccctccatgccatcctttgctctgcagccagcatgatccttctcaatcacaaaaatgatggcatgtgaagccctggaggagtgcggacctccctgactctccacccagctcgcacttcaaacagtgattaacatttcaggctcagaaaacatgttttgtgacttttttgctcataacacttctgtgatattgagaacagggcccagatttcattcatctttgagctccctaccagtgagcagtctttggcacaaaggagatcctcaataagatgcctgctgaatggagatttttccagaaggaaatgaggcagagagtattccaggaagaggaaactgagccaagtcagttctgtaaatgctgtaggagaaaatgggcattccagctgtaggagaaaatgggcattccagcaggctgtatggatcccattttccatggaaggaaagaggccatgctgggatgagaaaagtgggtcacagcagaattaggccatgtagtgttaaatgtgataatatgtggaatggaccttattctgcaggtattatccaaaaaaaaatctgagcagagtaataatatgccaagataactttagtaactgatatcgtttggctgtgtcccacccaaatctcatcttgaattcctgtgtgttgtggggtgacccagagggaggtggttgaatcatgggggcggatctttcccatgctgttctcgtgatggtgaatgagtctcacgagataagatggttttaaaaagaggagttcctctgcacaagttctttctctttgcctgctgccatccatgtaaaatgtgacttgcttttccttgccttccaccatgattgtgaggcttccccagccatgtggaactgtaagtccaattaaacctctttcttttgtaaattgctcagtctcaggtatgtctttatcagcagcaagaaaatggactaatacagtaaccatttagagaatgaaggggaaatactagagaaagaaggtcacataagcaaataaggcaatacagcaaggggaaggaaaagggaaaatgaaaagacagcacttaatttaggcacctagtatgtgccaggtcgtttatacatcaaaactcactttggtcctcacaattaccctgtgtggttattcctactactattatcccctgttcctaaggtgaaactgagattcagtgttggaataacttgtgaaagaaaggtcacataaccagaaggtggcagcaacagctgagattcaattcccatctgtctctgaagcctacaccacactactgagagatgacagagccctaaaccagtaacagagagaatgaaggaagaggaagactccagagacatctcagaatagacactatgctaagggtgcaccctggtgacagcactgactgtgaagttctcataagataagtaaacaacaaaaagggaggggtcccaggttgggggtggggatgggggaacaactgttctgagagatgactcatcacagacaagctgctgtcacatcctgttcccaaatacctcattccttccacatgtagcccaagcagcaaaaccttatctgcacaccttatcagcatgtagctcctccaatatgaccctataaaacttccctctagcccctgcctcttagcagacagcctcttctctgctgtgctgcccattgcactcttgcaaygtatctctgtactttaataaatctgcctttctttacttacaattgtgttgataaattcttttactgcccacaacaytggccccagccagttgcatctgtgacactaaccaaaataaagggtcactgggaagagcacagaagagcttgactttacacagctgagtttcagatactggcaacacttgtccatggagcttcccagaagacaatgagaaagactggtaagtctggagctcctgggagaagccaaagctgcaagagggagtgggtatggagcaggagaggagggctggatctcagggagtgtggccactgcatgggtggcaggagaataataagtgtgtttctgccttgcttagagagggcagaaaggggtcaagtaacagtggagccgaggcagatgcatggggacagagttcaaaatgggttgctaataaaacagttccttctcatttacaactttcaagaaacacatacctgcttctgggcagtgaagtttttcaaatgctttgtctgtataatctccatgctcctttacacattcatattccttaaacttcatgccatcctcaaaggtcaaagtttcatttggtatatccattgcctaaatcaattccacagtgtttcatgataaattagccatattttgaaagaaagaaaaaccatattttcgtgttcctagtaaaattaattagcaaggtatatagtaaatattcaacaaatgtttactaaacaaataaatccatagagttttaaarctagagctatgttagataaaaacagaaatgttttcatttcttctccatgttaacagtgtcaagcactggtcataaggcaacttaattttatctagactttctgacttcaatagtattccacttcagctccattctacagtgctctcaagcttttctcattcatgccctgttttaagtgtacaacattcttaaccagctccctaaatctgctcctagtattttgtagtcaataccaaaatgamcacttctgtttcacgcagatcaaagcaaagaataagaaagagtggcagttaaaactttttggactccattctttcatttcagcagggcaacgtcagcacctcacttcacagaagctctgtgagagtaccacttctcaagttcccactcagaagcaggtccccagatctgctccactctgatgtctcacctctggggcatttaggaatttatggttgaacagaggtgaatgctaactatcaccactctaatgaagtctttatgtagcaaatgctcataaaaataagaaatgctaacatgaaaatgttttaagctaataaagaacattaaataaaaactgagcatcaggtataattattcatacttatattgacttaaaaggtgaattcagaaaaggtaaaatggaaaaataaaccaattaattttgacatttgttataggtctgataaaaccaggataaaaaaagattttgaaatcaactaataaaatgaaatttggatttactgtattggatttactgtatttactccttgctgtggcaaggagagcccaaatgcataaatgagatttacttaaagttatcaataactaattaagacctaaaataaatgtgcctggtttcagggtacctgttcaattttttaggtcagtatattagttgttgacaatgtatcaggtcttctattttaatttggctatgataaaaattaatattatgagtaaaatagctcttttatttaaagaaaagtaaawtaaaatgtaataatttatctaaagaaataacaccaataaaataaaatgggagaataaaaagtatttggaggactcatttgaacaccaaacatttttctttccctttttttttttttgagacagtgtctcactctgttgcccaggctcgagtgcagtacagygatctcagctcactgcaacctctgcctcctgggttcaagtgattctcctgcctcagcctcctaagtagctgagactacaggtgggtgacaccacacccagctaattttttgtatttttagtagagatggggtttcaccatgttagccaggatggtctcaatctcctgatctcatgatctgcccgtctcagcctcccaaagtgctgggattacagctgtgagccaccgttccctggccttgagcaccaaacatttttctagaaatattttctaaaattctaggcatccaaataagaaaagaagaagtcaaaccatctcttcacgcttatgatactataggttgaaaacccaaagactcgacccaaaggttcctggaactgatgaacaacttcagcaaagtttcaggatacaatatcgaagtacaataatcaataggattcctatacaccaataacattcaagcagagagccaaatcaagaaygtaatcccatttacaatagccaccaaaaaataaaataaaatacctaggagtacatctaaccaaggaggtgaaagatctctacaagaagagctacacaacacagaaagaaatcatacatgacataaacaaatggaaaaacatgccacatgcatggattggaataatcaatatcattaaaatggccatactgcccaaagtaatctatagattcaacactattcctgtcaaactaccaatgtaacttttcacaggattggagaaaaaaaaaactattctaaaattcatatgtaaacaaaaaagagcccaaatagccaaagtaattctaagcaaaaagaacaacgccagagtcgtcacattacccaacttcaaactataccataagactacagtaatcaaaactgtatggtactggttcaaaaacaaacacataaaccaaggaacagaatagagaacccagaaataaagccactcatctacagccatataatctttgacaaaatcgacaaaaataagcaatggggaaaggacttcctatccaataagtggtgctgggatagctggttagctacatgcagaagaatgaaactggacccctacctttcactgtatacaaaaatcagctaaagatgacttaacaatttaaaagtaagaccttaaactataagaatcctaaaagaaaacctaggaaacaccattatgaacatgggccttgggaaagaatttgtgattaagtcctcaaaagcaattgcaacaaaaacaaaattgacaagtggaacctaattaaactaaggagcttctgcacagcaaaagaaactatcaacagagtaaatagacaacctacagaatagaagaaaatatttgcaaactatgcatccaacaaaggtctaatatccagactctataaggaacttaactgaacaagaaaaaacaacccaaattttaaagtggacaaaagatagaaagagacacttctcaaaagaagacatacaagcagccaacaaatatataaaagaatactcatcatcactaattatcagagaactacaaatcaaaaccacaatgagacaccatctcacacgagtcagaatggctattactaaaaagtcaaaaaacaaatattggcgaggctgcagagaaaagggaatgcttatgtagtgttggcggaaatgtaatgtaaattagttcaaccactgtagaaagcagtttggatatttctcaaagaacttagaactactgttcaacccagcaatcccattactgggtatatatccaaaagaaaacaaaccattctaccaaaaagacacatatactcacatgttcatcccagcactattcacaatagcaaagtcatggaatcaacctaggtgcccatcagtggtggtctggataaagaaaatgtggtacatatacaccatgggatactatgcagccataaaaaagaatgaaatcatgtccatgcaacatggatgcagctggaggctactatcctaagcaaattacatagggatagaaaaccaattacatagggatagaaaaccaaattctgcatgttctcacttataagtgggagctaaacattgggtactcatggacataaagatagcaacaatagatactgggagctactacagtgggggtaagaaaggagggaagcaaggcttgaaaaactaactactgggtattatgctcaatacctgggtgacgggatcattcatatcccaaacctcaacatcacacaacatatccaggtaacaaacctgcacatgtaccacctgaatctaaaataaaagttgaaaaaaattatccctacagcctgtgaaataatttcatgaaacatgctattaagatatatgcattttctgatacctactaatggaaatttagacttaatggcatacctcttcctcttggaggatgttttcatcagaaatacatttgtctaaattaatttcaaattttacccccttctaggagaaagcaaaaaaaaaaaaaaagtttagcaattcagtaaaagccttaaaattacaactccctaggtcaattttgtttgacattatagattcttaaaacyattggtctcatatcacaaaatagagcaattctataaaatactagggggaaaatcatgcaggcaaccgagatcacaaggtggctccccagccagctatttaatatggaacccaaagacaaaagtatttcttaccttagctttatatttctgttctggatttttactttcctttgtgttctgaagcctcatttgtttcaagtctttttcaatgtcctgaaaatttagagaaaaatacaattctctcactgtatgtttacatgagttgatttctgcgttaaatctgatgattgatttaataacaaaaacaagcttttataatggaaagttaataataattaactaaaaacttgggcagagtatccattaacttgaaatattaatacatttaacacttgcacttcagtgggtggaattctataatgtgacaatacttatcactccagtccactccagtccaacccaattcaattcaagaatgtaattttgactacaggatctttcccttaagaggcttatgatcttaatcaggaaaataagcaaagtgcgcaactcatgacggtataaaggaaggagagggctctgaaaattggtaggcaatttcaagtaggaagagaagaaaactaaaagtggatgacaagaatttcaaaggcacaactgagatgtgaactccatattcggaggtttcttagcatcctatcttgggccatctgctcttctattccctaatacaaggggtttcattcattcctatggatttaaatgccactgttaagcagagactcttaaatgtgtatcttcaggcttcacttttcctctcctctgagctccagactcacatatccaactgcctacttagcattatcttcatcttaatattcactccacaaattcacactgagcactccccaggggccagaaaccctcaaaatgggttagcacagtggacatgaccagaaaggtccctgctgacacgaaaattacattttactggagtaggataggtaataaatgagttaacgaatgacataatttcagaaagtgttaagtgctatcaagggaacaaaataggataacaggacagaaaatgagtagggagtgagagtaatacaggcaaagcttatctggcaatcaatttaagccctggaatgatattggaccttggcatatgccagtctggggagagcattttccatgcagagggaacagtggggtaaaggctccagagcaggtatgtaaactctcacaacttctctaactcaatgtccaaatggaactcttgagtgccctccacccctctccagcagtgggcactgaaaacgtatgctttcagccaagacagagtatcagaaaccagatttaattccgcacctgaaacaaccaaagagccaaatcaaacatataatagataaatggtttttaatacattagacatccagcaatgaaagacagtaatccctaagaaacagaaaaccaatgagacaagccctgcaactgccccagcctcctgtcttgagagagtttgcaagccatggtgcggggatggggaactgaagaggtgcagggatggaaaccgaagatgagtgtggccaactccctgagttgataagacaaggcttggggggtattaaggtgctagagtctgaaagacaaagacccaaagaggagagagctgcacagagagaactgaaacactcatacaatgtcaaggggagtgtaacacagtgcgaccattctggaacaccatttggtagttctctgaaagttaaatatacacctactatatgatccatccatcccagtccaatgtatttacccaaaagaaagaaaagaagcacatgaccacataaagatttgtacatgatagccaggcacagtggctcacacctgtaatcccagcactttgggaggctgaggtgggtggatcacctcaggtcgggagttcgagaccagcctgaccaacatggtgaaaccctgtctctattaaaaatacaaaattagtcaggcgtggtggcgcatgcctgtaatcccagctacttgggaggctgaggcagaagaatcacttgaatccagcaggcagaggttgtggtgaactgagattgtgccattgcactccagcctgggcaacaagggcgaaacttgtctcaaaaaaaaaaaaaaagatttgtatatgaatgttcctagcagctttatttataatagccaaaagctggagacaacccaaatatccatctacagtgaatggatcaataaattttgatacattcatacaatagaatatactcagcaataaagaataataatgaactattaatatgtgcaacatagataaatctcaacattattatgtgaatgaaagtagccagaaaaaagagcacatacagcacgactccatttatgtaatccaaacaaatctagaaaattcaaaccaacctacagcgacagaaagcagatccgtgattgcatggggatgagatgggaggagaggtagggagaataagagagaggagtttacaaaagggcgcaacaaacttttgcaggtgatggatatgttcactatattgattgtggtgatgggtttcatgggtgtgcctgccaaattttataaagtatatacattaaatatgtgtggtttattatgatcaattatatctcaataaaactgtttttttttttaaagagatggcggactcaagtcctaatctgtggcagtacattggagtagtgagcaagagactgcacaccagcctagagttcctgcctcaagatcccagactccatggctacacagttaatcagtcttcacagggccaagagggcctttcagatgacatgaccctggagagcttgacagcacactaaggttgaatgtcccacccactggagtagattggggttggaatctgagatcgttgtattttaaggaaagtaaagtaatggagcacttattgtacaattgagatgaccagactatccaagcaaatcagacaaccaacttcacaaatataagtaagatagataagtcatagtcctgatttcagacttcatactactgcaaggcagaaaaacccttcccaagtttgcagggcaaatagctaataatgcttcaaactgacacaggctggtgtatgaagtacttggaaatgctgtggaaatacagatgaggcagttattaattctaagggagaaagagaaaaaagctgtgctagaaacttcaccaggaggtctgatagatgtgttctgcaagaagagaagagagggaagggatatttcagtagagaaataagcattttacaaaagcctggaggttaaaaggaagatgtctttttaaataagtagggctttaaaaagtaatctgatccctctccctctccctctccctctccctctcccctctttccacggtctccctctgatgccgagccgaagctggactgtactgctgccatctcggctcactgcaacttccctgcctgattctcctgcctcagcctgccgagtgcctgcgattgcaggggcgcaccgccacgcctgactggttttcgtatttttttggtggagacggggtttcgctgtgttggccgggctggtctccagctcctaacagcgagtgatccgccagcctcagcctcccgaggtgccgggattgcagacggagtctggttcactcagtgctcaatggtgcccaggctggagcgcagtggcgtgatctcggctggctacaacctccacctcccacccgcctgccttggcctcccaaagtgccgagattgcagcctctgcccggccgccaccccgtctgggaagtgaggagcgtctctgcccggccgcccatcgtctgggacgtgaggagcccctctgcctggctgcccagtctggaaagtgaggagcgtctctgccccgccgccatcccatctaggaagtgaggagcgtctctgcccggccgcccatcgtctgagatgtggggagcgcctttgccccgccgccccgtctgggatgtgaggagcgcctctacccggccgcgaccctgtctgggaggtgaggagcgtctctgcccggccgccccatctgagaagcgaggagaccctccgcctggcaaccgccccgtctaagaagtgaggagcccctccgcccggcagccgcccggtctgagaagtgaggagcctatccgcccggcagccaccccgtctgggaggtgaggagcgtctccgcccggcagccaccccgtccaggagggaggtgggggtcagcccccgccaggccagccgccccgtccgggagggaggtgggggggggtcagccccccgcccggccagccgccccatccgggagggaggtgggggggggtcagccccccgcccggccagccgcctcgtccgggaggtgaggggcgcctctgcccggccgcccctactgggaagtgagaagcccctctgcccggccaccaccccgtctgggaggtgtacccaacagctcattgagaacgggccatgatgacaatggcggttttgtggaatagaaagaggggaaaggcggggaaaagattgagaaatcggatggttgccgtgtctgtgtagaaagaggtagacatgggagacttttcattttgttctatagtaagaaaaattcttctgccttgtgatcctgttgatctgtgaccttacccccaaccctgtgccctctgaaacatgtgctgtgtccactcagggttaaatggattaagggcggtgcaagatgtgctttgttaaacagatgcttgaaggcagcatgctcgttaagagtcatcaccactccctaatctcaagtacccagggacacaaacactgcggaaggccgcagggtcctctgcctaggaaaaccagagacctttgttcacttgtttgtctgctgaccttccctccactgttgtcctatgaccctgccaaatacccctctgcgagaaacacccaagaatgatcaattaaaaaaaaaaaaaaaaatggttagggtggtaaaggcgatgttatatgtattttaccacagtgaaaaaaatcacttaaagaaataaaaaatatgtcatttaaaaaaaaaaaaggtaatctgagacatttagagctttgggtatgtttgggggaaatgtgagcaatgaggctggaacattctgttaggaacaactcacaaaagtctagcatgccatgctaagagaaatggcagtcgccattgattgtcgtgtagagaaataatgttcaaatcagtattttggaaagataactctacaagtagagacttttttaaagtgtcttattatatagctgcatattcccttcaaaaaagataattaaaacctaaatccaaaaattagacaaattaagtgataattatttcctttacaaaagtttgcaaaggtatctgctgctggattgctctggaggagccttcaggaaatatcagatgccttttctttttttttagagatggggtctcactatattaccaaggctggtctcaaactcctgagctcaagggatcctcggcctcctaaatagctggaactatagtctcgtgccaccatttctgtctttcagatggcttttttgtttgaagatattgattagagtgctgacagaactaaggaacggatactttattatacatatttgtagtaaaagttctgtaaccttcttataaaaaatctaaaaagtagagagacaataatcattcctactcacaccaatccagataccaccaattaccaccattggcattttggtgtgttttctttcaaagttactcctcttgcataaaatatacaagattttattcacccaattcctgatacaaactttttgaggcttccagtggtttatttttaattacctgacttattaaaaactttaaggcactggatttactctaaccaggttaaaaaatgtgagagaaaaacatgtctgtaacatctgagccgtgtttttatggaatgtgactgtgatcctactggcacctttaaatgacaagtttataataccttgaggattttccatttctagttgactctggaccaagctctaataataaatataatttaaaacacagagaattactctaattataaagataataataattcgctcaggcggggtggctcatgcctataatcccagcactttgggaggctgaggcaggtggatcacccgaggtcaggagttcaagaccagcctggccaacatggtgagaccctgtctctactaaaatacaaaaattagctgggcgcggtggcaggcgcctataattccagctactcaggaggctgaggcaggagaatcgcttgaacctgggaggcggaggttgcggtgagccaagatcgtgccattgcactccagcctgggcaacaagagcgaaattccatctaaaaaaaaaagataataataattcttagtatgggccaaatcattgagaatcttcttactaagcaaaaataaaagcacacttgggcttcttattcgcaaaataaatataactccttggaaagtaaaacattttatgtaattattttatgtaaccataaaagcattgtttatcaggtcatttcacaggtttaataattctcagaattggttgaaatcaacagattcatcttgtattataattgcattatcttttctcagaagggaaaaaaactctcttgagatttatttgttatttcaactctgcccaggctcttacctccaccaaaaacataaggttgaaatggaagagaacttgactcagatttcctgaccaatgtgtctgatacactgacttagaccctccagagagtggaacgttcttatactaaatagcagcagttctcaaacttggctgcttactaaatcacccagcaagcttctgcagacagaatgcctgggcctcatcccagaccatctggggcagagagaggcatctgagtttttaaaagttctggtaaaaaggcggtggctcatgcctataatcccagcattttaggaggccgaggctggtggatcacgaggtcaagagataaagaccatcctggccaacatggtgaaatcctgtctctactaaaaatacaaaaattagctgggcatggtggcgcatgcctgtagtcccagctactcgggagcctgaagcaggaaatcacttgaacccaggaggcagacactgcagtgagccaagatcgcacgactgcactccaacctggcgacagagtgagactccgtctcatagaaaaaaaaaaaaagttccctacgtggttctgctgcacagagaagggtaagagccacttggggtagagcacacacactgcaagcacacacatctgatcatagccatcattacctgcacaggtgcttctccctcagatgcatcttgatggacaggcaggttactcttcttcaccaaataggttttatgacttatttttgagttctcctttaacacaaattatacacagtcaacaagattggttctgagtgagctctgaaggctacttggctgatgcgcgatcaatgatgaaatggctggacagaaccctttttatagctccttttccccgccacagcttcagtatttcccaaatccttcctccatagcctctgtagaaatgtctgatatccaccatttttttttttttgagatggagtctcactctgtcacccaggctggagtgcagtggtgcgatcttggctcactgcaagctctgcctcctgagttcatgccattctcctgccttagcctcccaagtagctgggactataggcacgcaccaccacgcctggctaattttttgtctttttagtagagacagggtttcactgtgttagccaggatgatctcgatctcccgacctcgtgatccgcccacctcagcctcccaaagtgctgggattacaggcgtgagctaccgcgcctgaccaatgtctgctatccatttttgcagggctcaggctgcccatcccagatcagccttagacataaggctgatgatggctccaggctgcccatgagccaggcctctgctccagagagaacaacctccaggctgcccctcccagcacacacagtcctctgtcccaacctttgcatggttctttcagaatgcccactctcctcctttaactctgcctctccaaattccactctttaggccccacccacttcttccataaatacccgctacctgctcattctgctcatcttggctcctgtgcacctacagggcttactctatgattgttttatacatgtgtctcgtcattccaaccatttataagtagaactgcatatgccagaaagaatagtggttataattgtatttttttattttttgggacagggcctccctctgttgcccaggctggagtgcagtggaaaaatcacagttcacagcagcttcaacctcagcctcccaactcagcctcctgagtagctgggactacaagcatttgccaccatgacccactaattttttaaattttttgtacatatggagtctcattatgttgcccaggccggtctcaaactcctgggctcaagcgatccttctgccttggcctcccaaaatgctaggattacaggcatgaacatgagtaggggttttagagtcagattttcattttattttactttatttttttgagaccgagtcttgctctgtatcccaggctggggtacagtggcacaatcatggctcactgcagcctttagctcctagctcaagcaatccttctgctttagcctcccaagtagctaggactacaggtgcaaaccaccatgtccggctaatttaaagagagagagagagagagagagagtgagagagagagagagagagagagagagagtgtgtgtgtgtgtgtgtgtgtgtgtgtgtgtgtgtgtgtgtgtgtgtgtgtgtttagagctagggtttccctatgttgcccaggctggtctcaaactcctaggctcaagcaatcctcccacctcagcctttcaaattgctgggattacaggcatgagctaccgtgcccagcctagagtcagatatttaaatatttcgtctgccttgtaatagctacgtgactttggatgagctacttaacttctctgtacaggggtaaataaaagaaagtatgaacgtgatatggtttggctctgtatccccacccaaatctcaccttgaattgtaataatcctcatttgtcaagggtggggccaggtggagataactgaatcatcggggtggtttctcccatactattttaatggtagtgagtaagtctcacaagatctgatggttttgtaaataggagttcccctacacaagctctcttgcctgccttcatgtaaggcatgactttgctcctcctttgccttctgccatgattgtgaggcctccccagccatgtgaaactgtgcgtctattacacctctttttctttataaattacccagtcttgggtatgtctttattagcagtatgagagcagactaatacagtatgtgaaagctctagttcatggcctggcaaacacaactgaattgcaccatacattcatttgacttatatgaatttatctgtatgcactgcggtgggagaaagagagagagagatcaatttcagcagyatggtagctctactcaatgagtgtgtggccaagtgcatgtgggatgggagacagctgtctcagtgcctgcaagcttctcctaggagagcattccagggcactgagtgtgttcctagtgtttcaatagccatgtgtctttcttacaacatggtttccaaacacaggctggctatttcatgtgaagctcttctgaagaagcagtgatctgtgccaactctagagaccttcttgggagatggaaggatgaatttccaatgtggcgcctttaagagatttttaagaatcagttcaactgcactcagattttgccttaaatagcctttagaaccttaccctgcagagagttgaaaaaatgctagtgtgttgggtttgtttttttcccaccttctgggcatgaacttacactcattttggactttctgcatctaatccagctctkgtctaaagttgccactcaataaatatgtattgagtgattcatgaaggaaacaatcaataagtacttttaataatagccattcctgagaatctcagatatccttattatcttgtgtagtctctcataaaccataataaactgaagctccaatgaggtctgacagctttcctattaaaaaagaagtctacatgattatctctatgataaaactttatcttttctataaggaaatcattacttttaataccagctcaatttagttagctctaaatcgatagaacaatgtttcccctagaagaatgaatttacctctggttctctccccatcttctttctaatttctttcatgtcattgtggtactgttggcgtatttcctctaactgcttccaatattcctggaaagcaaacccaatccagaaactttaaatgtttatgaacaccataacaaaaataatctttctgcagcctacaatttcaaaagtgtgtaatataaaataaggttagaaaaatatgttgctcctaaagatgataatctgccttatgttttggctgcagtacttcactccctgtgagacagtggctttagctacagagctcaattttatatataacccaaatgtgttcatgatgtacacttactttataaatcccacttttatatataaccctcttatgcactgaagtttgttcctccccaaaaagagatatgttgaagtcctaacccccagtgccttagaatgtgaccccatttgaaaacagggtcgctgcagatgagactacttaagatgagatcataccagtgggcccttagttcaatatgactgatgtccttgcaagaagatggccatgtgaagacagggacacacaggaagaacagcatgtgatgaaggcagagaatggagtgatgcgactgcaagtaaagaaatgccaaagattgccagtgacgcaccagaagctaggaagaggcaaggaaggattcccctacaggtttcagagggcacttggtcctgctgacaccttgattttctatttccactcttccagaattgtgagacaatacatttctattgtgttaagccacctagtttgttgaactctgttacagcagcccaggaaactaatacaaatcccaaacctgttactgatggacagttactctatgaatctcaaggtgaaaagctttatgaacttagccatatcgcattatctgagaaagtgaaatacctaactctgtatcccctataacactcagcatggtgttgacatattcaggggcactgtaggaaatagaagtaactccctattacagtacaaaagacagtaatacaaagaaatacaagggtagccctggaattaaacagtttttaacctgttccttcatttcgtttttcctaaatggcagctcctggaatctaggctcttctccattacttcttagctcttgtctctggttgtaatttggctcggcagaagatggacgaagaccctatttattgaatgaaataatttataatgcatactttgatttcggaaacatcttctgatttgacattgactttttcctataaataagaattatatcactaagcaaactcagtatttgggagttttttttgtggtaagtagtagaattttcttaattataaagcattaaaaaatatatatttttttctgtttgagagcgtctcactctgtcacccaggctggagtacagcggcatgatcttggctcactgcagcctccaactcctaggctcaagcaattgtcctgtctcagccttccgagtagctgggactacaggcacccgccaccacacccggctaattttttgtattttcagtagagacagggtttcactgtgttagccaggatggtctcaatctcctgacctcgtgatctgcccgccttggcctcccaaagtgctgggattacaggcatgagccatcaagcccagcctttctttttttttttttttttaagacagagtctcactctgtcacccaggctggagtacagtggcgcaatcttagctcactgtaacctttgcctcccaagcttaagcaatcctccggcctcagccccctcagtagctgggactacaggcacacaccacaacacctgggtaatttttgttttttttggtagagataaggtctcattatgttgcctaggctagtctcgaactcctgggctcaagcaatccacccacctcagcctcccaaagtgctgggattacaggcatgagccataatatctggcctaatcacttttttgttgttggtttttgttttttttgttttttttgagacagagtctcgttctgtcgcccaggctagagtgcagtagggcgatctcggctcactgcaacctcctcctcctgggttcaagtaattctcctgcctcagcctcccaagtagctgggattacaggtgtgcaccatcatgcctggctaatttttgtatttttagtagagacgggctttcaccatgttggtcaggctcatcttgaactcctgatcttatgatccgcccaccttggcctcccaaagtgctgggattacaggcatgagccaccgcacctggccccttgtcactttttttaatgtgcagcagaatctttaacaaaatagaaccaaagcactacagcactgcaaggaaatttgaagctcatctactctaaaaattgtcatttatagaaaaggaaattaaggctcagataggctgaatgaactgtccaaggtcccacagaagagatagagccaaggaagaaaccggactgctaagactctgattcaagcctgttcccattattttatttagctattaaaaactggggactcgggccaggtgcagtggctcacgtctgtaaccccagcactttgggaggcctaggtgggtggatcacccgagatcaggagttcgagaccagcctggacaacatggtgaaaccctgtctctactaaaaatacagaagttagctgggcgtggtggtgggcgcctgtaatcccagctactcaggaggctggggaaggagaattgcttgaacctgggaggcagaggttgcagtgagccaagatcacaccactgcactccagcctggtgacagagcgagactctgtctcagaaaacaacaacaacaaaaacaaaaacaaaaaaaactggggactagtagagagtattcttgaccttctggtggaatgaactttgacttgaaaatctgtgaacagaaaaactattaggaaattcctaattgcttcccatatttggtattttacttaccaattgcttctccactttcaacttatattgttgagcttcaaattttctctgaaggtactcagcaggccttagaaaataagaatgttcagcttaagtagaaacttgaacaaatcttaggcaccaatttgacgagtaattttcagtttagtaatgagattcacaattcaccagtggcttgaagttccaagttcaagaagtagttcacagttacagaatctttacattggaaaagaaaattttggaatcaaaaggaaaaaaggatgaagagtaacaagtggggatacaggagaggattaaacagaaaaatattcttatccagtgatttttcttcaggacaagattcagtccttccattctctataatatgttgtggggaggaaaacagacccacacccagaagttctcacgctttgtgtaggtgtctaatgtacaggttgtcgctcctgatttaacaatagtggctagatgtggtggctcacacctgtaaccccagcactttgggaggccgaggtgggtggatcacgaggtcaggagttcgagatcagcctggccaacatggtgaaaccccgtctctgctaaaaaaaattagtggggcgtggtggtgggcacctgtaatcccagctactggggaggctgagcagggaggcagaggttgcagtaagccaaaatcgcaccactgcactccagcctgagtgacagagtgagactccatctcaaaaaaaaaagaaaaaaagaaaagaaaagaaaaaaaagaatggctgcatatctgtttcctgcaccacatactgagctccctgagagcagaatgtgtccctccatccatccctttatctccgcacataaatgcttaatgaggaaagaaataatggtttagctgtctctccaaatgtttaaggtatttttccagcacaattttagtcaattccagtcaaacaattttcaagtttatactcacattttatgtatcttttttttggcagaatttcctgtaaaacatttctgtaattattggttgctaaataaaaaccgcatttcagaccrtaagttttttggaatacgagtaacttctaaggctccaaagacagaactgtaatttcagaaataactcctttaggaaggaacatcatgataagcatccccaatttacaaagaggcaagttaataatcagggatttagaaataggatgaaatgacaagctaaagtctttgagtcttagttcctcagctgtaaagtgggcatggtaccatttcacaggaattgatacgaggattagaagagattagggctgtgaagtgcctgacacacagatagttcttgaatcaaatgagggtaaattgtagcactcatctgtctcataagcctaactggcacatgtatcaatatcttcatgagaaaaatgattccaacacccaggggctgtccaaaagacattctctatctctctgtctacctattccctctccaccccccaaatcctatacaaattcctcttcctcggccgggcatggtggctcatgcctgtaatgccagcactttgggaggccraggcgggtggatcacaaggtcaggagattgagaccctcctggctgacacagtgaaaccctgtctcttctaaaaatacaaaaaaattaaccaggtgtcgtggcaggcgcctgtagtcccagctactctggagactgaggcaggagaatggtgtgaacccagggggcggagcttgcagtgagccaagatcgcgtcactgcactccagcctgggcgacagagcgagactctgtctcaaaaaaaaaaaaaatccttttcctccatcccatggcctgtaattggacctccagcagacagaaagctggggatgagggagtatacaaagaggaggggttaccaggcatcaaaggggcatccaggaaagagaaggacccttcctactgtttcatgtgagagcttgggagatataaaatcacatgtggtcaaaataattgatagcttgacagctctcaaatctagacaaagagtggaagatatattttcccagtggttgagaaaagagaaagggagttttgtggctgctccagttcttctgtaaaatctatgtccctcactaattgagtccaatatggatattacaatttgaacggacagaagacataacttttgataattgtggagataattaaaaatgtgttatgaagatcgataaaaaccacaacagtgcccaatatctttaaagataaaacatatgcttttcccgttatatgtttctgaagaaattattctcttatcattcttgcttatctcattttcactattaatgagattgccatcccatagtatcttgtgtttttcataattcatccaaaatttcaacaataaacaatcagagtcgccaaagtaacaaattcttaaccctgaacaaaaaaaattgatgacaaaacatttttaaaatagaactcttagacttaagtcttcaggcctctgttaggtgtcaattattctgaacacaggaatgtcaacatcagtgtgaaaaaaatttgaaaatattgtagatctgcagaaatctattatggagtaaattttttgaaaatctaccataagaccaatttaagaatactattttctttctaacatgtccatattttgaaaatccctagaacataaatgccgaatgaaatatatcttatttctcaaaatgtctcaaatgatcatttgattttaatgattcaattattgattcatattagtaacctctttgagaaatgaaatatacacaactattttttcacctgccatatagtggaatttagtaggaggaagaaagaatattaaaagagcaagggtatgggtctgtgcctacagttaagcagctctatgaataagaaaataagctagatcagacttgagatgaagaagggttacaggaaaaagaagataatttatcaattacttatcaattgtaataatctatcaacacatttattgctttatttaattacaagactttgttacttctgtaggctaaattataatatacattacatcataattacaacacttctcacagtacatgtaattcccacgtaatttataagaacacgtaattgttataagcttgagatgtcaacagatttgatttgtgtaacatatatgacattctgatggaaataaaaacaaaatctttctaacaaaaaaaaaagaaagaaaggctgggaatagtggctcttgcctgtagtcccagcactttaggaggccaaggcaggtggatcacatgaggtcagtggctgcctggtgagagggtacctgagaatttgaagaaccaactaacaagcaggtatagggctgacatagaaagaagggactaacatggccaggcatggtggctcatgcctgtaatcccagcactttgggaggctgaggcgggcagatcacctgaggtcaggagttcaagatcaggttggccaacatggtgaaaccctgtctttactaaaaatataaaaatcagttgggcatggtggtgcacgcctgtagtcccagctactggagaggccgaggcacgagaatcgcttgaactcagaaggcagaggttgcagtgagctgagattgcgccaccgcactctagcctaggcatcagagtgagactgtctacaaaagcaaacaaaagaaaaaggtcaagggaactatgtgtttaaaatgaagatttggaaagttcttcttggattatttgtgttaggagaatttggatttcagaataataaatgttaatatataaagatatttttagattaaccaaagcttaagctagaccacaatattaccattgacttggggatggaccatgcctcgtttcctgaccgtaatcctcaactccagtattttcttgaggaatagggtgataacttggtttgtgggctctcctcctcagcatatcaagttgagcataataataatcataatgtccacagacagcagcaattttgggtctttctatcatttttatctgaagaaaacaagaggggatgtttttaaaaaccataatacaggctgggtgcagtggctcacacctgtaaccctagcactttgggaggctgaggcgggtggatcacctgaggtcaggagttcaagaccagcctggccaacatggcaaaacctcgtctgtactaaaaatacaaaaattatccaggcatggtggcgcacgcctgtaatcccagctacttgggaggctgaggaaggagaatcacttgaacccaggaggtggaggttgcagtgagctgagatcatgccactgcactccaacctgcacaatgtgagcgagactccatctcaaaaaaaaaaaccataatacaaatttataatacttgacaatataacagtgaccatagctaagataaggcactgaaggtgtatttttgctgtttttcttctatacttttttttccagaataatcttaagagtccccaaatcctagagtacaaaaagacctaagtactagatagtatagtggtttacaattttgctaaggtatggatatgaatcatgcatacttcatggctagtatgtgaaaaatacttagctagtgagtatgcccaggcaacccaagatccaaaactaaactcagaattattgttttctatttttcataaactcatttataccttaccatactttacagggaaataaaaagcatagtgaaactcacacatatggggatttgcaacatttttagtttctgataaattgactaaatgcaaaatggcatcatgacttaaaggaaagaagatgctgaatcagaatcattcttccagagaaaatattaaaaaaggtcatataacagccatgatgggcatatcaccatcccagccctcaccacccttcccaaccagaacagaatgagaataggagaaccagaaatgacagtttatcttccaactgagtagaagccactgagctagaagacaagaaacagatcaaattaagatataaaagccagtcaagaccttcttgctaaagagcaaagtggggtcaatttaacctaaagcgtggcaactctgtctagtttacagtttacagttaataataaaaagagaaaaaaagataaaactactggaaagacctaggaactaatagttgggaatatgaataacaagaacaattaaaaccaaaatgtcctcatgtaaagaggtaacatgttatattctttgttgtttttactgctatatggttcacatatatgttagattggaccatatgaaattgcacataattggctgggcgcagtggctcatgcctgtaatcccagaactttgggaggctgaggcaggcggatcacgaggtcaggagatcgagaccaccatggctaacaaggtgaaaccccgtctctactaaaaacacaaaaacaaaattagctgggcgtgatggcgggtgcctatagtcccagctactcgggagaatggcacaaacccgggaggcggagcttgcagtgagccaagatcgtaccactgcactccagcctgggtgacagagtgagactccgtctcaaaaaaagaaattgcccagaattgaccataattaatctagaaaaatggcactttcatatagttctatttaaatatttaagtaaatgtataaaatttagttcattaatctaaatacaaattatatgtttatttttaaaatattttcttttctttttaaattctgagacaggatctcactctgtcacccagcctgcaggactgtggtgtgatcatagctcatcgcagcttcaaactcctgggatccagggatctcctgcctcatcctcccaagtaactgggactacaggcacatgctactgtgtccagtaaaaaacaaaaaattttttttttaattttactttttgtagaggtggggtctcaatgtgttgaccaggctggtctcgaactcctgggctgaaatgatcctcctgcctcagcctcccaaagtgttggattataggcgtgagccactgcacctgcctatttttaaaatcttttaaaacaagaagtagttttctttgttttacaatttcacctatatacaacctagaagaaaatgctactaatgacttgttgaaaagtggtaaaaaatatagaaaagtattgaaaggcaataaacattttctttaaaatgttctctaacatcccaacagtaataggaatatcagaggtagttcctgtggaaatcaattttaccttttcaaggaactggaaaaatgtcagcgtgttcaacagttcgtaatttaattcatcctcaaatcttttagatgtgttttcccttctacaggtctgataaagagtcctctgaatcacaacatacttttcttatttctttaataaaattaagcccttaggctgggcacagtggctcacgcctataatcccagcactttgggaggctgaggcgggcatatcactagagcccaggaattcaagaacagcctgggcaacacagtgagaccctgactctacaaaaagtaaaaactagctgggcatcatggtgcataccggtagtatagctattcaggaggctgagacggtaggatcacttgagcctgggaggtcgagtgatatgctttggatttgtgtctcagcctgggaggtcgagtgatatgctttggatttgtgtctctgcccaatctcatgttgcactgtaatccccaatgttgggagacgaggcctggtaaatggatcgttggggcagattccccccttgctgttcttgtgatagtgagtgagttttcatgagatctggttgttcaaaagtttgtagcggctaccccttcactcttttcctcctgcatgtaagatgagcctgcctccccttctgctatgattataaatttcctgaggcctccccagccatacttcctgtacagcctgcagaactgtgagccaattaaatgtattttctttataaattacccagtctcaggtgttctttatagcagtatgagaatggactaacacagtacattgataccaggagtggggtattgtataaagatacctgaaaatgtgaaagtgactttggaactgggtaatgggcggaggttggaagagcgtggagggctcagaagaagataggaagatgatggaaagtttggaatgccctagagacttcttaaaatcatagtgaccaaaatgctgatagtgatatggtcaataaagtccaggctaaggaggtctcagatggagatgaggaacttattgagaaatgcagcaaaggacacttttgttatgaattagcaaagaggttggaggcattgtgccactaccctagggatctgtggaactttgaacttgagagtgatgatttagggcgtctgacagaaaaaatttctaagcaacaaagtattcaagatgtggcctggctgctctagcaccctatggtcatatttgtgagcaaataaatgatgtaaaaccagagcttatacttaaaagagaagcagagtgtaaaagttaggaaagtttgcagcctagaaagaaaaacccattttctggggagcaattcaaaccagctgcagaaattttcaaaaataaagaggagtcaaatgttgttagccaagataatgggggaaatgccttgaaggcatttcagagacctttgaggcagcccctctcatcacaggcccagaggcctaggagggaagaatggctttgaggaccaagcccagggccccactgctctgtgcagcctcaggacatggtgtcctgtattgtggctgctccagctccagccatggttaaaacggcccaaggtacagctcaggccattgcttcagagggtgcaagccgtaaatcttggtggcttccacatggtgttaagtctgcagatgcacagagtgcaagagttgaggcgtgggagcctccaccaagatctcagaagatgtatggaaaagcctagtcgtccaggcagaagcctgtttcagggggaccctctactagggcagtgcagaggggaaatgtggcattggagcctccacacagagtccccactggggcactgcttagtggagctgtgagaagagggccaccattctcctgactccaaaaacggtagattgaacgacagcttgcaccacgcacctggaaaagccgcagacactcaacagcagcctgtgagagcagccgcaggggctgtagcctgcaaagcctcaggagcagagctgcccaaggccttgagagcccactcctcacaccagtatgccctggatgtgagacatggggtcaaaggaatttggagctttaagatttaatgactgccctgctaggttttgaatttgcatggggtctataaaccctttgttttggctgatttctcccttttgaaatgggtgtatttacccaatgcctgtaccctcattgtattttggaagtaactaacttgttttttattttacagcctcacaggtggaagggacttgacttgtctcagagagaccttgaattgtggacttttgagttaatgctgaaatgagttaagccttgggggactgttgagaagggataattgtattttgcaatgtgagaaggatatgggaattgggaggggccaaaggtggaatgatatggtttggatttgtgtccctgcccaaatttcatgttgaattgtaatccctgatgttggaggaggggcctggtggaaggtgattagattatggggacagatttccctcttactgttcttgtgatagtaagttctccagagatctggttgtttacaagtgtgtagcacctccccctttgctctctttctcctgctctggccatttaagatgagcctgcttccccttctgccatgattataagtttcctgcggcctccccagcaatgcatcctgtacagcctgcagaactgtaagccaattaaacctcttgtctttatcaactacccagtctcaagcagttctttatagtagtatgagaacagactaatacatccaggctgcagtgagctgagacatgccactgccctctagcctgggtgacacagcaggaccctctttcwaataaataaataaataaataaataaataaataaataaataaagccctttatcaaatgaagggcaataacttaaacaatcggtttttaaaaaaatgtttatataccaacacattttctaaaatgtctatatatcaagtaaacacttagtaaatacacttccaaatggttcttaatttaaccatgagccttctttaaaaatacaattctttaattaaaagacagtagccattttatcatttacataccagaagcatttcactagtatgacctaaaagattcaacactctgctgaagtgaattcaaataattaaacacaaagaatcactagggaaatatcaattattatatcataaaaacttctcaatcctatacataatatgttagaattaagaatattaaatgcagagtgttttctgttgctatgttactcactttycctatacagaaaaatcttatttattagaaattagaagaatttcagttataaaaagaaaattaagcctaaagtatacttataagagcatacagcattgtttcataaaatataaaaactagaagttgtccaacaaaataccattataatgctcagtacagaatacttcattktaagtacaaaatttgtggactccaaacaataagcttgtacctcatgaacatgtgcagataggtctgtcagaatataccatagcttaatgggttaaaaaaacaaaagaatgaataagacctactatttgatagcacaatagactgcctatggtcaatagtaacttaattgtacattttgaaataagttacagagtataactgggttgtttgtaactcaaaggataaatacttgaggggacaaacaccctattctccatgatgtgcttatttcacattgcttgcctgtatcaaaacatctcatataccccataaatatatacacttactatgtacccacaaaaattttttttttaattaaaaaattaaagaaaaagaatatamcagctgggtgcagtggcttatgcttgtaataccagcactttgggaggccgaggcaggctgatcgcaaggtcaggagttcgagaccagtctgaccaacatggtgaaaccctgtctctactaaaagtataaaaattagccggggccgggcgccatggctcacacctgtaatcccagcactttgggaggcccaggcaggtggatcacgaggtcaagagatggagaccattctggccaatatggtgaaaccccatctctaccaaaaatacaaaaattagctgggcatagtggcacacgtctgtagtcccagctactcaggaggctggggcagaagaattgcttgaacccgggaggtggagtttgcggtgagccgagatcgcgccactgcactccagcctggcgacagagcgagactccgtctcaaaacaaacaaacaaacaaacaaaaagcatataccatagctaaaaaacacaaaggagggtttagaatgacttacagatctggccttctgggctccagctggtggtctccattcatttctatgcaatatagcattccttttaattggcacagatatccttgatcttggtgggcactttccctggaatctcactttttgtattttacactcttaattaaccaaaataaaacagcttcaattttttaaaaattgtacaccattaatactgatacttgtaagagtataaacataagctacatttcataacacagtaagtttactttttagccagagatattttacacacagtgagagtactgatgaaaaattaatatgcaatttctttaaatgaaaaaaaccattttttcagagtccctttgcatatttctagtaatayataacatcactttttttcagaaaaatagaaattaatattaacatttacagaaacaatatgtatggggtaataataaaagttattaaatttggtcattagagcttgggttatcaggccactccattcatgccacattgtttggaatttatgagtagatcttctctcttttttttttgttgagacagtctcactctgtcacccgggctacggtgcagtggcagggtctgagctcactgcaaccttcacctcccgagttcatgcgattcttgtgcctcagccacccaaggagctgggattacaggcatgggccaccaggtccagctaatttttgtatttttagtaaagacatggtttggccatgttggccagactggcatcaaactcctggcctccggtgacctgccctccttggcctcccaaagtgccaggactgaggtatgagtagatcttctaatgcttgtctttatctccatcaaaatttgttcttgggctgagtaaggtggctcgcacctgtaatcccagcaatttgggaggccaaggtaggaggattgtttgagctcaggagttcgagaccagcctgggcaacacagtgagaccccatctcaataaaaaaaaaattgttcttgttctcctatcttacctagattagaaatatggacaatacacagtcccatactctgtacttgtctattttctaaacattctcaatctagactggtatacaacaatgttagtcaaattaaatggcaaagaggctcattcactttctctttaactttccttgattttagaatctctgtctcaatggataacatttccctgtcatggattcctttgagaggctttctgctcctcctgatattgtaagtccaggcattcagttacagctaaattctggggctttgactttcacagcatcaaatgaattagtaattttctctttcttaacgtacccctccctctgacacacagcttagctgattcttgacaccaggactaaaatagttttctccggcctggcgcggtggctcacgcctgtaatcccagcactttgggaggcagaggcgggcggatcacgaggtccggagatcgagaccatcctagctaacacagtgaaacctcgtctctactaaaaaaatacaaaaaattagccgggagtggtgatgggcggctgtagtcccagctactcgggaggctgaggcaggagaatggcatgaacccgggaggtggagtttgcagtgagcagagatcgcgccattgcactccagcctgggcgacagagcgagactccgtctcggaaaaaaaaaaaagttttctgtatttattactaccataaaatatctcctgccttctttgggaaccacaaagtaacagttcttactgttatcaattaggccccaagatcctaacttcagctccaatggtcctttgcaacagaattcttaattgccagtctatcctcttttagaaaaataagtttcatctcatcatccatgtctatctgcaaccttctcccactctgtcccttcactacacaaaagttaagtttgggctcaacctcttcaagcatctctattagcatgtcctctgcttcatggaggtttcctgactaacgagaaggaaccctgcaggtcatgcatgagctagatatacaactttcaggcacactcactagttgccatttgacaagatgatttttctcctgcttatactgcttgtattttttaaaatgtccactttcaatatgtttggtgaaatttccttgcattactctctgtgtgagacatgtgtaataaatacttttgattgcatgccaaagtcacacttactctggaccaccttcccagcatgtcgagaagctggcgctcctgctctgcatataagcatgtgactgaattcttcctgaatgacctaaaaccgaacacacgtgtcaaggacctgcaacccaaaatctctgccaaaatccaaacagtcacctcaaaacttacctcaggagtcaaatatttgggaataagattctctaaaaagggcctttkcaaaatggaatttatggatggtcggtctcgaggagatacttgaaagagctgagatatcaaggaatggagctcacgagaaaaccccggagatattggggcaaaatgtgcttgacaaatcttcagaaccagctgctgtaagttgttaccctcaaactgaaaggacaaggagaaatgacactaaatcagagaaaagttactaaagtaacaaataataaaagtgttaaagtaacaaatataccaagaagcaaaacaatgtttttaaattgtagttaraagcactagggtcacctgtaatcccagcaatttgggaggccaaggcaggaggatcacttgagcccaggagttcaagaccagcctgggaaacatagttagacctcatctctccaaatcatggtttttaaacatttgctgggcttggtggcatgagcctgtggtcccagctacttgggaggctgaggcaagaggaytgtmtaagcccaggcggtcaaagctgcagtaagccgtgattgcgtcactgcactccagcctgggtgacagagtgagaccctgtctcaatcaaaaaataaaaaagaagcactgtggtccaccttaaattgttttcatcaactaatctttcatgagcagatactgcagttattcaacaagatgccatgttatttaaaacaagtttttattttgttttaattctgtcttattatcaaaataatgtttactcataataaaaaaactggaaggtataggaagttataaagacaggggaaaatatgtataattttaccactcagaggtatagctccttctgatctcttttaaaaatgatgtttattttacaaagttgaggtcatattgatatgaaattttatctcttgctttttaaaattaacataaacatcrtttaatttcctctaaaatgcttcatagaccagaaatcttctattgtatgaaaccaatagttatttatacataataatattcaactccatggtgtagcaataaaggtacacattggccgggcatggtggctcacgcctgtaatcccagcactctgggaggccaaggtgggcagatcacccaaggtcaggagttcaagaccaacctggccaacatggcaaaaccctgactctactaaaaatacaaaaaaattagccgggtgtggtggtgggtgcctgtaatcccagctcctcgggaggctgaggcaagagaattgcttgtacccaggagtcagaggttgcagtgagctgagatcgtgccaccgcactccagtctgggcaacagagcgggactccatctcaaaaaaacaatggagtacacattttggtcagacactggctgtgcaacccttgacaataattaataacaatgatgacagctgtggagaaaagagttgatgtagcaagctctcctcagaaaggcctgcttacaatgttggcccgtggctggtgtctgggaactaagatttcagaagaattcccaccattccctgaatgtcaagagtggctatctttgcctcagctatttatgtgaacaaaatggtttatgctgaacacgggctttctttccaggagtctggaagtttggcatatgccaggtagagggtgcctatgtgaccagtccccagtaaaaatcctgggcactgggtatatccgatgagctttcttatagatcacatttcacaggtgacgtgggtaacaatgctggaggatytggcacatcccatgtgacctctgggaaaagactcttaaaagcttgtgcctggtttcctatgaactttgcccatgtacatttttcttttgctgaacgtatctattcatacagtaattaattaattaattattttttttagatggagtctcgctgtcacccaggctggagtgcagtggcgcaatctcagctgactgcagcctctgcctcctgggttctagcaattctcgtgcctcagcctcccaactagctgggactgcaggcacatgccaccatgcctggctaatttttgtatttttagtagagacggggtgtcaccatcatgttggccaggttggtctccaactcctgacctcaagtgatccacccgcctcagcctcccaaagtgctgggattacaggcatgagccaccacgccaagcccacacaatttatttttaatggaaatatgctacacatactattctccaacttggactttttactttataatattgcttggacagctttccatgtcatctatcattattttaagtagcttatccatataatttttaacaatctaataaaaccaaacattaacctttttctcccagaagttaatttcttttctacaattccaataattcaagattagtctgacaatgagcatacttacaggatgtttaagtgtgcagagctcatataagacacagccaaragaccaaatatccctaaagaagataagagtttacatgccaagaaaatatccataattcytaataaragcttttatccttacagtgccttaaatttgtgtcgctttacaattttatgtaagttgatcagcttttacaaatgctttcagatatatcatcaattcttattagaagataagaggtaaaatgaaaaccatttgtagtttgtcagatttctagtcaaagaaaggcacacaaactttgctacaacctggtggcttaatatttagttcagcttcctgctcaaaaacaatrtatgtatgatgaaatgttgagcaatttggaggaggcaggcagaactcaaacatggatttgttttgactcaaaaggtaatatttggttgattttgaaagatatatcctactcaaggcttttgacagaaccaaagttatattatgtgataaacatagtatctgattctcaataaacatttaaaaatatacttaaaatatatatcatgagctttgctccttacagatttagtacttcataaatatttatatgtgattggtttgaggagttattttatagaacaaaaagcacaattaaatctaaaagatcaaaaaatgtctaatcagaagtcaaggagtcaaagcaagaaggaatcattaaagtgaggagtgaggtaaatggctcctctagcagcaatgctttgtgcatragtgtgtgtgtgtgtgtgtgtgtgtgtgtgtgtgtgtcagagagaaggagagagagatagactcatactaaaagtttgagtacaaaagatggtagtaagtacaatagacggtaagattggtgggaaacaaatttgtgggattttttttaataattttttttttcattaacaaggtttcaccatgttgctcaggctggtctcaaactcttgagctcaagcaatactcccttcttggcctcccaaagtgctgggattacaggtgtgagccgcctgcacctgacccaggaaacaaacatgaactttctagaccttctagaaactcactgaccatttcacaccacacagacttttgtctttactagggcttccacagacccaaacttctcttctgttcccagaggaccctctgcagccagggcagagaattcatatgcccccagggctcaggcagtactgcagccacctgggggttgggtggggccagttgcaggcctgagaccactctgcatattgaggactgtggtgaaccagtcctctaatggagccagcggctacccacctgattattgctaagatcttccaattttcagaggtacaaactatgcatattttaaagtctttcaatatttaatttttttttggatgtagtgacagggtctcacaatgttgtccaggttggtcttgaacccctggactcaagcaatcatccccctcagcctcccaaagtgctgggattataggcatgagccaccatatccagcagcatttaaatgttgattcaaattcttgaaaagcagtacaagcaaacaaaacaatgcagctgacccaaggctgtctgtggcatgccctgctctgaacagmctactttccgtccaacacaccctacctgaattcctgcacaactaacttgaggccaaactccttggtgccaggggatgtctcaaaaaaaaaaaaaatccctgttattttattatgcagagaaattcttactattctttttgtaaatctctattgtctgagctttgccttccatttatctccttcaaagtccaatagccaagtatctcttgggcattttttcctaaacaaaaggacaattaacttccaaagggaactcaatcttccttatcgccaacttgttcaatggcagccagctttgaaaaatgaaatttttttccttctccttataggaagcaaaagctcctcttcaccttttcttgcagtatacattagcattactgctgagggccaggtgcggtggctcacacctgcaatcccagcactttgagaggctgaggcgggcagatcacctgaggtcaagaattcaagaccagcccgaccaacatggtgaaaccccatctctactaaaaatacaaaatattagctgggcatggtggggcgtgcttgcagtcccaggtacttgggagactgaggcacgagaattgcttgaacctgggaggcagagattgcagtgagccgagatcacaccactgcactccagcctggatgacagagccagactccatctcaaaaaaaaaaaaaattattgctgagaaccagactctgatatcacatacataaaaactaactgggttttaaagctggaagacaccttgaagattacctagtcaatactctcattattatgagttagggaactgaagcccacagaggtcaactgacttggtcaagttagcaactgagccaagactaggattcctagctcctaatccagtgagcggtcaccagaccacattgtcttctacttcatcctcttcaatctttcttgcaatagactaaacagtgcttcaaagatatgaacatataatacaaaaatggacatcacagtgactgcaattttcgatgttattttttataccacttgtatctttaaatgaagagaaatggctttcttctaaacaagtttgaaaccttcaggtaacactgctcagagatagtcactgggatccccattttgtggcaggccaggtcttaccaatgcaggcctccatcacaactgtttctatactaactgagtggtgaagttaaatattaaaagctwaaaaagccagtgcccagccaggcacagtggctcacacctgtaatctcaacactttgggaggctgaggcaggcagatcgtgaggtcaggagtttgagaccagcctggacaacatggtgaaactccatctctactaaaaacacaaaactttagctgggcatggtggcagscacctgtaatcccagatactcaggaggctgaggcaggagaatcgyttgaacctgggaggtggaggttgcagtgagccgagatcgtgccattgcactctagcctgggtgacaagagcaagactctatctcaaaaaataaaaaaaaaaaagccagtgcccttatacaaaggctgtaatgtaacaaaagcccaccaagagttttgcctaggcctttcctgggccttaaaccatgacaaaataatgaaggaattcttaacaaggagccttttaagattaaacaagttttattggtggtctgaagaaactccccaggcctccacaaacaagtttattggaggtctgcaggaactccctaaacctccatgatttagcaggagacaaaataagggtaatcaccccaggacctagacccatttagattaagtaagcttactgaggctccagaagaaagtcttcaggactcagaccttagttatagattaaaaggagttaatcagtatgtctttaaatgaatgcacacttacacatagacatatagcttagaaggtgtataagctctgaaaaactttgtaattttgagtcggtctggtgataatttccaggccttctccctgtactggttacagaaataaaaactctcttcctccccagttcatctgcatctcgtattggaccgcgagaaatagcaacccaaccctcagtttggtccagaacaatttcacacatgaagcaaatgaaattacaaaagtaccataagaaagaaagaagagatttgaattttagtttctggaatcttcattcagtgtcatccatcagattttactgacactttcaaactaagagtcagcaacttacgttttattgttgtagggtttattctgacagatctctggggacaggtagtaaggtgttccaatacaagttcgagcaagttccatggaactagtaaattatattaaataataaatcagcatgattttttattggagtaagaaaagtcttaagacatggacatgcaagaaaaaatgtgaaaatggataacacaagatttgatgcatacatgtgttagaagaaagcaaaacactgtatgttgataaagtaactaaatcagctgatttttaaacttacaattcacctcccaaaaatttacacattaaaatatattttttatggcttaaagactccacaaagagatgaaattgtcatgttataaaaatctctcagatgtagagattatcaaattgcaacctcatgatttaaaacttggaaaatacaaaaatgaataagggagaaaaaagttacccagaatcttagcacctaaaacaactattgttaaaattctgatatatttccttcctgtcttctttccacacatatttttcatataaccgtgatcacaatgtatttaaaattcagaattccattttctttgcttagtataacaaagttatcaagaagtcttcaaaaccataaatgtttatgatatattcaggtacatggccatggccatgccaagctttattaaatttaaccatttcccaattatttaggcatttacgttattccaaatttcaaattattcccttggaagaagtcccagaaacaggatatttaaaaatctcttggtacatattgccaccaaattgtcttccaaacaggtgcacmaatttattttgctagaaagtgtgtaaaccaaaaataaaattctaagccccccaaccaactcataaaccctccctttggccaaggacattccaaagttaacctgaaaaactagttcaggccatgatgggaagcagggtctgatatgcctcattaactcctcctcccctttggaattcaggcacagttgaccagcattaacattaaaacagaccttaagactgacaaagcagactccttgtagcaataagataccaaagtccagcctgactctagtataacatcacatgacagatagcaggcctgaaaggaatcaaaatattttaccccaaatcatgtttctttgtccatatcttgaaatagtcctgcaaaggtatctcttgtggggaaaatctacattctgaagaaaattcccttctttttccaaggctttttcctgatccaggaaaaagttaactaagagtctggcacctttttaaatccgataagaggaaatatttacaatctattctctctgaggcctgctacttggagatttcatctgcataataaaaaccttcatttccacaaccccttatcttaacccagacactcccttccactaattccaggtcttcagatagactctttcaatcaattgccaatcagaaaagtttttaatcyacctatgacctggaagctccctcccattcttcccagctttgagttgtcctgcttttctggaccaaacccatgtacatctaattgatgtcttgcatctccctaaaatgtacaaaaccaggttgtagaccggccaccttgggtacatgttcttaggatctcctgagggctatgtcacaggcatggacctttggtcactcgtatttggctcagaataaatctcttcaaatattttatagagtttgacttttttcattaagaagtgtaaacctgcctatttcacgaaattctctctagctttatgcatattacagtcacatccatatttgasaaactggaatcacactacagaatattagcaacatcattctattacaccacaatttatcttgagaattttaatctcaaagtaccatctgatgtaatgcatttacataaagctacctaaaattatttagacaaccaagattttaatatcttcttaatccatgatatctaaaaatacatatttgggctattttgactagaaagaaaaattattttcaaagtacttacttattcaggactcttgctataccaaagtccccaagctttgccaccattccgttcttgctaagaaaaatgttctataaatggagaaaatgtcatgttgttygaggtacttcaagaaaagatcagttctgtcttagtcttctctctgagctgttacctgagcttttatgtccctgtgtaatatcttcctgtcatgaatatgttttagtcctagagaaatctgtacaaaccaaccgaggatctatagagagaacacaaaacaaagccactgaatagcctggtagtcactgaaatgtcttcatggtaacatgcaaaaagatagaaattatayacacacacacacacacatacacacatatagtgtatgtgtatttataggaatgaagttaataggtacactttatcatattattattttcattctacaactaaaaaaatggaggcacagaaaagtaatccaaatatcactggtaaaatcaagggaaattccacatgcagaaaaagataagtagaagcaagggaaagaggcatgccgttcatgwttttctttttttcctacttaaccctggggtgctaactgcatcgtgaatagtacacaagcagccctgtttcctgataacctgggagccattggttcttcctttacagtggaaggagggtgacaagggtggggagagaaagaggaagaaatgggggatctgtgaggttaggaattgtaataaaatatcagtatatctaatataaaaccaacaaatactttacctttgaagtttagttttatttctaagtcatgatttgattttatctttgttgaccatgagcctctttatgaaaatgtgttctatgcctacagagatttatttaaactattctaaaatttcactggttctttgtctgccaaattatacagaaagaggaaaataataggaataaagctatattccagacattaatattcagttgtaattttagttcattcccaacaaaaagaaatgtaactcaaaattttgtcatgagaagcatttttataaaatgtggcaaaataatacctagataagaaaaaagagtttctatcaatatggaatttaatatataatataaatgagcatacaaagaatgcttgattaatcttacagaagttagagatattgattttttaatccttcatatattcaaaatattcaactttaagaggaaattatatgggcatgatgctcttacatgctaaaatagaacaaagaaacaatggccaaaggaaagatggtgggcctttcctgtgtgcttcttgaggcaatggccttaccatcaatcataaaggagctaattcagattcctctccacacatacaaacctgtctccttcatgagtaccactcccaagagagttccagggaggcttggagtatagaagagaaatacatttgtgcaaagagaaagtgggagaggccattattcttcatcttttatctccccctcttaataaccaatgaaactaaataggcattgccaagacaagcttctatcctccctagcaaagtgggatatctagtttaaaacagagcaccaaatggtaaaagagaaaacagtgaagctataaatatgttacatgttaaatggctaaggaacactcacattcagatttttttttaaccatgaagacttatctcagaggcatcctacatgagattttccaaacagattatcttttctcaagaaaatctcactctctaaaaaacaattcagtttaagttcaattgcaaacttgttcyggactgaatctaccaagaatattgatccactattttatggtttcaatctgtctaccaaaacacatgctttatatcaacatagtctactacttatgacattataaatttaattctccccccaccacacatacataaaattaaaaagcaaattagaagtttttacctgatcttcactaaataacacaccccgttgtctattgatccttttcatgagatcccctccatcacaatattccattacaataaacagcctgccattctctgtaagaaaaggaatcatttggtgctggaaggatttcagatatttatcagccatgttctggctgtggaatcaagatggactgggttctaattccactataccatttatatttcttagctctgtgactctgggcaagtcactttaacttctccgtgcctcattacctcatctgtaaaatggaaatattatagaaatttcttctttggattgttggaaagattaaatgagttaatccatgtcagatgcttagaataatgcctgtacataatgagagtttaagaaatgttggctatttttattaatacattcctttgagaggttagaaatctgctgtaaaaatagcagctgtgactctttcataacaccccaggaagaattaatagccccttcttgaatttgggcataaagccatatttatatggcacttatttatctatgttgttgaatacaatagaaactcttataactgacctctgcctaaaccactcactagattacaggacactctccattgctattgccccatcaacgttaccactaaatactactaggctctctagtatgtccaagtacctctgctcttaccaattgaactgaatcttaccaagatcattttgttttttcccaaatatgtttacgccatttattcttgtctttgtaacataaactgatgaaatatgaatagaaaatgaaaggtgattattttccaaaagctatgctgaatattttggaggactcagtaaaagtgagtagtttttaaaaaaaatagctattgacctaaatgttgatgggatgaatgaaatataactggaaaacttctaaaaggattatgtacagactatccacaaatccttgctccacattaaagaaaagagactagaaattctaaataagacacataacttacataagaaagaaaattcagaactatagtcagtggactcataatctaccaactataattctgaattttcttgaactgtagtgagttattcttgtctttattacataaactgatgaaatatgaatagaaaatgaaagatgtgattattcctccaaaagctatgctgaatattttggaggactcagtgagtttaaaaataaataaataaataaccattgacctaaatgttgaatgaaatgaatgaaatataactagaaaacttctaaaaggattgtggacagattatccacaaacacttgctccgtattaaagaaaagaaattatcctttaacaaatgcttgtcatttccttaaattttttttctttttttttttcctggccatttccactcaaaggatgattatgtcttcttatgttaaaatatgtctgtataattgctaggatccaaatgtctttgtcttccccaaatgtatatgttgaaattttaacccccacagtgatggtattaggaggtatagggcttttggaaggtgactaggtcatgagggtggagcccacattaatggattgctgtccaagagagaaccctctccccttccaccatgtgaagtcacaatgaggcggaccatctatgaaccagaaagtgaaccctcaccagacactgaatctgcctgcaccttgatcttgcacttcccagcctccagaactgccagaaataaatttctgctgtttataagccacctagtttatggtattttgttatagctgctggaatagactaaaacagatgattttctgctctaaccagctttcttcattagccaaccaactaacagctgggatcttgttagaaaagaaggatttctactcacttgtttgtctacacttcattcttttgtacctaaacagtagttagcacatcaaaggggcttaaatgtttgttgagtggattcattaaaaacaaacaaacaaaaaaaccctgaaggaacacaaaacataagcgccaaaatcagtcttataagcaattgttgataacattttcccctgtagtacccattaaatgccaaaatctcttgccaaatatctatcttttgctatcctactctttaaagtaccctaaccaactttactgtggatatcagtaacctggcagtgtctacccttggttgcttctaattcacaaaccatgcatcttctttcacatatttcaatttttcctcctctcttctttaagagacgatccattcagttattaacaaacttctattgaggacatgcaaaagcaaggaatgctgtgtaggaataaaaagcaaagaagccatccattctactgttaaggaggcgaagtctagttggggagtccctcagcattgggtgagaagtgctgtgaagaagtctgtaggctggagggtgaggagaaagcgcatgcaagtaagactggagatctaggaagggttctgagaagatgcttccccatatgccttaatgtctagagatcggttattttcaggaatgtgttacttttaggagaattgatgtttcttgtcattgaagctcagtcagtaaaaggtctgccacagcaatgaagggatggcaatttcaaaaccatggaagaatcagaataatgaaacagaggagacacattatttcatctcacttccttttcaccaacctccaactcactcaaccttacactggcttttggtgaaagaaactgactaaaaattcatcatgacagagatacctttttttttttttttgagacggaatctcgctctgtcacctgggctggagtgcagtggcgcaatctcggctcactgcaagctccgcctcctgggttcacgccattctcctgcctcagcctctccgagtagctgggactacaggcgcccgccaccatgcccggctaattttttgtatttttagtagagacagggtttcactgtggtctcgatctcctgacctcgtgatccacccgccttggcctcccaaagttctgggattacaagcgtgagccaccgcgcccggccgacagagatagcttaaactactggccaggtgcagtggctcatgcctgtaatcccagcactttgggaggccgagatgagtggatcacctgaggtcaggaatttgagaccagcctggccaacatagtgaaaccctgtccctactaaaaatacaaaaattagccaggcatggtggcgggcgcctgtaatcccagctactcaggaggctgaggcaggagaattgcttgaacccgggaggtggaggtgcagtgagccaagattgtgccactgcactccagcctgggtgacagagtgagactccgtcaaaaaaaaaaaaaaaaaaaaaaaaaagaaactacttaatgtcaattagcattatctgactgtaaaataaggattttcccccattagccactgttaattttatatttattggaagtgtctggaaaaatcatttatgctctcaaattttccatctgctgtaaagctcatggatcactgacacttcaaaacaattgaggggcactaaataacctttttatttgtcaaattccaacatttattaaacaattattataattcattctaaaatgcacttttaaaaaatcaagggcctggcgcagcagctctctcctgtaatcccagcactttgggaggccaaggctaaggcaggtggattgcttgaacttaggtgtttgagaccagcctgggcaacatggcgaaaacctggctctataatgaaaaaatattcaaaaattagccaggtgtgggggtacatgcctgtagtcccagtactcaggagactgaggtgggaggatcccttaagcccagaaggtcaaggctgcagtgagctgtaatcacaccactgcactccagcctgggcaacagagtaagactgtctcaaaaaaaaaaaaaaaaaaaatcaagattgtttcttacagacattggcatcttccaatcacttgctgtagacccggcaggcttaatgttttcactgcctaaataatttttagaataccttaaccaactttgtttgcttatattttcttttttatgtgtgcattagagtaatataaaataaaactctgtgtttaaataaatgtaaaagagctctttctggccaggcacagtactcacagcacttttggaggccatggcgagaggatcacttgaggccaggagttcaaggctgcagtgagccatgatccaattaacccaattgcaagtaaatgaaatctataacaacctaaataagcttagaagaggaccatgagccacagataacagtcccagctgacaccttgatttcaactagctgagactccgggcagagaatccagctaagccaacctcaggcttctgacctacagaaatcaagagataataaataggtgttgttgttaagccactaaatttgtgttcatttgttatgtagtaatagaaaacaaatacaacagcatgggaatttttgcctattttgtttgctgatatatctccaagacctagaacatgcctggcatataacagacacttagtgaatgtttattgatggaatatacatggaattaattttgtcttaggaaaatatcactacattctcattatttttcttatgttgcttcaaaccaataaaaacatcctattttctttttttttttttgagacagagtttcactcttcttgcccaggctggagtgcagtggcgcaatctcagctcactgcaacctctgcctcccaggttcaagcgattctcctgcctcagcctcccaagtagctgggattacaggtgcacaccaccatgcccggctaaacgtttttgtatttttagtagagacggggtttcaccatggccaggctggtcttgaactcctgacctcaggtgatctgcccgcctcggcctcccagggtgctgggattacaggcatgagccactgcgcccggccaaaacattctattttctatagacaaacattagagccatggttcttatgatcagagataagcgatttgagggaaaacaagcctttacctacactctctaaaagacagaggctacaaggcctctgaggcttttagataagctcagtagttcaagtcccagcaatcagccaagcaaactcaaaggcatcacaatagctctagctttcctaaacacaggggtgctctacttaaaaagagtcataagaaaatgtaaacttacagtatcaacaaacacagcagaggttatgtatactgtaaaaatgaccttagttctgcaaaagcttccagtggtaaactgtcctcaaaaatcaatctcacatggtataaggaaatactccagtctctaaaagtggtccagtccatttgctcattcagtaaataggtattgagcagccattgtgtgctacatgccaaggatcaagtggtgagcaaaacagatggagccccaaaattcattaagtttaccatgtaaagggcgacaaatatgaaacaaattcataattatataaatagacatatgtaagtacaactgctgtggaagagaaccaaagggagctgtaatttgaattgtgagttcagaaaaggcctgaggataagtaggagttagccagagagtcacaataatctcaaacaaaataaagaagagaaagatcatcttatagcattatcagtatccaatggacaggaatgcagggcactttattcagtggctttccttgaaagttattccatgcaacccaattccagaccatgtgtactgttctgctcccaggaagacctcagaagagtcccaagagctctttttaaatacccagaagccaaagaagggccatacacacagaagtaccttgaatgtagcggttttaatcagtaaggaacacagtgctctgcacagtttacatactcaagacacagtggctgtatttatttattgactgacttttacccaactgatgatgcttgaagatattgaggttaacacttctgctccatgaactaattatcagtcttaaaacagccctgcgctgggggctgggctggggaatgacccttcataaaactgtcagcacatacagccctgtcacaacttaagacacacctgacatactgtagatttgtttattgtctatctcttcccactagaatataaatttcatgaaaacagggattttcatctgctttgttcactgctatattcctgacacctagaacaatgcctggcatagagtaagcactcaataagtatcagttcagtgaatgaatgctgtctgaccaatgctccttcatttattatttattttttacctttggactacagtgatgcgtggaggcagaattgtattcagatgtatggaggaagggacttccttccctaaagttgtcagcagaattgtattcaggtgtacagaggaaggtacttccttccctaaagttctccccctctccgtggcagtgtgctaggctatggtgcgtggctgtttgctggctctctgtaagaggattacacagtcccatctgttgcctgaggatatgcaggatctcatgtaaacagagtaccccccagcacacacacacaaacacacacatcctagcagggctttgagagcgatagtgtggtgggctctgtgttttcccctcttctcttgcttatgagaacagctggttccttatctgagctgctccttcagcctgggccccagactcaagaccccagcccaccacagctagcatgtaatgtaagtgagaaatagatgtgtcttattgtaagtcacttaaatttgggggttgttactacagcaaagaagctaataagccagtcattaattttttgggagagtgagaattaaggagaggcagaaaaacaagaaaacataagaaagccgtctacaaaaacttactagagaggaaataacgaggacgtctcaagctgcaatttaagtaaatggggaaatgacccatttacaaaaattaatttatacacagtccttaggaacaaatctttttacatatgtcaacatgcctatactttataaaaatacttaacgaatattagaaaatcaaaccttgaaatgaattgaagaaggctacaatgttgggatgtttcatcttttccagaagaatcacttctttctttgaagcttctttttcttgtatgggcatctaaattacattaagagacagagtagtctataaagctaacttggtttcaagaacatgctttctgctcatttccatctaaaattctctaggatttcactggcttttaatgtcactttgaaaacgatctttcaatggcaggaaacaacatttctagaattagcagagtgccctacatctcatcaatggtttgttgacaaccatcatcaagaaaataaatatttctggtgaagttttgctatattaaaagttggactggtggtaccgtgttcattatctagccatatggagccatattttaatatctatctttcagtagcgaaggaattctttataaaaatgcaacattccaggagcaatcactgctgagaagaaacaaatgaaatctaaaaaaagaaaatgtgtcatatcccacagaaatcaggtcagtaaaattttgtattaagatgactacatttttcattttcaaataaaaattgtcttgcatgacttcattttagaagtatttgggtgtattttcttgttctactttcacctatagacaatacttgccaaggggtttggtgccagtaccagtggccacacctcatttctactttttcttcctcactcttgatgctttgctgacttgtcatttctaccctgacttccagcccctgactgccccgcttttctgatgtccacggggcctccacccattagaggtcttcaacattggccagatttctcattctcatttagacttaagaacttcttaaaaattaatattctcaattctagcttccctacatctcagctgaaggatccttcagtaagttccttaaacccctctaagcttcagtgtttcctgccccaatttaaattgtatagtcagtacataggagtttcaaaacaaaaacagctaaattactcctaccagctggatacatttagcaacttaaaaaattcctaactactatttatttaaaagaatattataaacaaaattaaaagacaaacaaaaggataagatacaatatttgtaccatatatgacaaatatatttataatataaaaattgatggcaaataatttttaaaaaggcaaacaccccaacagaaaaatagcaaagtacaagaatagtcaactcgaaaaaaaaagagaaataaaaatgrctgatagaaaaaatattcaatctcatgcagtaatcaaaggaataaaaactaaagcaaaatttggctgggtgtggtagctcatgcctgtaatcccagctctttgggaagccaaggcaggcagatcacttgaggccaggagttcaagaccagcctggccaacatagcaaaaccctgtctctactaaaaacacaaaaaattagccaggcgtggtggcacacacctgtggtctcagctactcaggaggctgaggcaggagaatcccttgaacctgggagatggaggctgcagtaagccaaaatcacaccactgcactccagcctgggtgacagagtaagactccattgcaaaaaaaaaaaaaaaggaataaaagctaaaacaaaatgtaatatagtattccatgtatgaaactggcaaagatgaaaagaatgtcaataacyactattggccagaaagcagcaaaatggacactcatttatttctggtaaaactacacaaattgataaaatatttctgggaaggcagttttacaatatataatatgaatctttaaaatgttcatttttgtggggggtctgtatcctgctgaagaaatctttttttttttttttttaagacaaggtcttgctctatcacccaggctggagtgcagtggcatgatcttggttcactgcagcctctgcccactgagctcaagtgatcctcccacctcagcctcctgagtagctgagaccacaggcaagcaccatcatacccggctaattttttgtatttttagtagagatggggtctcaccatgttgcccaggctgctctcgaactcctggcctcaagtgatctagctgcctcagcctcccaaagtgctgggattacaggcatgagggaaatgttcctatttttgactaattcttctagaaatttatccaaagaagataataaaagggtacagaagagttctcatacaaaagactttgttacagtgttttattgctagtttttaagttactctaataatgcacgcttgttttaagtcaaatagaagtgaataaggtaaaagtgaaacttccctctttctttctcatctagcccacagacgaaagcccataggtggtaaccttactcttaatggcaaaaatgcaattacttttgcgccaacctaatactatattccctagggataactgttgttaatagttagagctttttatttcatgcatatataggcaagcatatatacatagttttgtttaataaaaatgaatcatactttacatattaaatgytattgaatcgtagccaaaaaaccaaccaaacaatgtaattatctgaaaatagaaaaagagttaaataaattacaggggtgttttgctagctttttttttttttttaagacagagttctgctatgttgtctaagctggattttaactcctggggtcaagggatcctcccaactcatcctccagaatagctgggactacaggcacttgccaccatgcccagctaaattatggtatttttgacctgctaccactttaatgctatgcagtcattaaaaataaagggaggcaatgtagtatcatggaaagagcagagaaagacttagatggatctgctgattactgtgcatcctggagctaactgcttaacctctttagcctcagctctttcacttgtacagtgagagtaatgagagctaccttttaagtggttgtgaagattaaattgagttgatatacataataaaacacccaggatggtgtgacatataatggacaccctgcaggtggtccctttatcattagtgtgaacacatttaatatcattaaatgacaacattttattatataaaaatattgaatgagatgaggaaatattcacaatatattgctaatataaaaaactgttacaaaagagtatacctgggctgggcgcagtggctcacacctgtaatcccagcactttgggaggccaaggcaggcagatcacgaagtcagtagttcgagaccagcctggccaacatagtgaaagcctgtttctactaaaaatacaaaaattagccaggcatggtggcatgcgcctgtagtcccagctactcaggaggctgaggcaggagaattgtttgaacctgggaggcagagattgcagtgagcagagatcacgccactgcactccagcctgggcaacagagcgagactccgtctcaaaaaaaaaaaagagtatatctaccatgacaccaatcattctaataacttatatacttatacattaaaaatagtctagagagaaattcagcaaagtgttcatagtgattaagaaagaggttatatgctatttttattttcctctaaatggtcttattttctcctttggctcttttcaaaatttctacaacgaacatttttattttcacaattgaggaaagataaaacacttttatttgagcccagaaggaaaagaacatgcttgataatggtaggatgataagagaaatattagctttttggtacctgtaagaaaacaagcaatttagttctggggtctagtgtagggagtagggaggcattagagagaagaaatataaatttctctagataagaagtaatgaaaaactacatgagagtagataggaagaaagaagtaataaatgttaatattgtgacacagatgttataggtaaattcgataacataaacagatatgggaaaacaagaataatgaggtctaatataagattctacttatttatggcatagtgacaagagtagttcatgagtaaagtgatgaaaaattggtgctctattagaaaaatatagtcaatttttgattatactaaagaatgggagagatgctatgaaatgcagtaatgttaatgtacatttttatagagattcacctctcaaatattttctctttacatagaattaaaatggttttataattcctaagtatataccagcttcacagtagagcaagagggcctgaaagcatctgtccagtgaatcatctatccaataagaagttattgaatatctcctggcaccaagcattaggtgctgtgtggaataccagcacaaaacacacatggactcggtcctcacagaacatattacagctaaataaggaggagaaggcacaaaataaacagccaaagcatgtccagaaagaaagcagtcagtactataacagaggttccaataaaagttatgcaagtttacagagaaggataaattctttagagtgggaggattctggaggtatggtagagctcagccttgaacaagtgggatcttgatgctgggagatcagcaggcaacgaccttggaagaagtagccccagaagcaaatgcagaggctggagtggggaaaaaaagtagggtatgtgataggagctgtagttttggagcaaatcagagagggtctcaaaacttctctgaagagtgaaacaatataaaagcacaaggcagaccaggcacagtggctaacacctgtaatcccagcactttgggaggccaaagtgggaggatcacttgaggccagcctgggcaacatagcaagatcctgtctctaaaaacaatttcaaaattagctgggtgtggtggcgcatgcctgcagtcctagctactcaggaggctgaggcaggaggatggcttgttcaaggttacagtgagccatgatgatgtcactgcactcctgcctgggcaacagaatgaaatcctgtctcaaaaaaaatgcacaaggcaaaccccactttctacctcaataataacaatttgtgtctttctttgtacatatatgaacatatttgtaggtatacatatatatggagaatatatatatttttccaaagattatattattttacacttactattttctcaaacattgcaaacattgaaattttcccatgtcaatgcttcacctacaacatgattgctaatagccacttagttttttataaattacttaacaaattacctactgttggacatttgttttctaactgtttatctgtggggtttttctttgaataaactcctaatttcttagttttctactgagtttcaaatttttgtacsatgacttcatatatggattttatctttttattgatttaataaaaggctaacaccattaagtcaatacttgcaaatatttttggcaccttctcgatttctttgaatttatttatagtgtttgttttgacatacaaacgttttctatttttatgtagtcaaacctaggcaactctttctttacagcctctgtcccagtgaaggtttgggggcatggctggagcattatcaaaattgggctggagccacttgaaggatccaagtgacccagggcctcgacaaaaggactgaagcaaattcaaggaagaggaagagtcaacagtattcgccaaataattgaatgtggagaaggaataagctcacaaacgatcccaaggttttcaggctggcaaccataaggacactgatgacattaatacagcgcagcacataggaggtgaagtgggtctgcttacaacaaggaagaatcactattaatacttgtttttgggtacaattgtgataccgagcctccaaggtggtctcaatgatcgtcatcctaaattcttgatgcacaggatctctgagacaataaatgtttattctttaagccactaagtttggggtaatatgctacacagcaatagattaataacatagatgttggatgggtgtggtggctcatgcctgtaatcccagcactttgggaggccgaggcgggtggatcacgaagtcaggagattgagaccatcctagctaacacagtgaaaccccgtctctactaaaaatacaaaaaattagccaggcgtggtggcgggcgcctgtagtcccagctactcgggaggctgaggcaggagaatggcatgaacctgggaggcagagcttgcagtgagccgagatggcaccactgcactccagcctgggcgacagagcgagactccacctcaaaacaaaaccacagatattacctgaagttatctagctggcagaagaaatgcagaactagggtactgaaagatgccaggggtagagacagagatttaagagagatctacttattggtaaacactgaagtggggcartttaggtgacaatggacagaaaaagaaaatcagaaaaggacacatggttgaggacatacacagggcgaagacagagataagcctgagggagagcagtcagataaacaaaagagagtgagcagaataatgtcatgggaggaagctattgcgggccactagaataagaggacattattatgaatatgccatggattcacaaaaagagacctatattgggaaataaatcattatccctggaagccagtcatctactcttgagctttaagtttgggtaggttttcttgcaattttttgtggtaagataaaatttatatcattttaacgatttttaagtgtacagttcaatggcattaagtatattcatatggtgtaacttgggtagtccattttgcacacactttgtatggaactttttatgctactctcatttataaatcctctagaagctgaccaacaagacttgccttagaattaattctagcaaacaatggacattgttgtcccaatatattatgaaatgaacatatcactaaagagggtgacataaacactgaccaaggtggatttagcaaaaattattaatttttaattaactatatttattttccaaaatcattagaccaacaattacatatagtttttctctattcattcagtgcactcaataaatgtgtttagcacctattatgtgacaggaactgttctgcatactgaggaagacaagcaataaacaaatgaataattaagagagcaaagtaattgcagagcattatacatgctagtaagaaaataaaccaggccagaagcagtggctcaagcctgtaatcccagcactttgggaggccaaggcgggcagatcacttgagctcaggagttcaagaccagcctgggcaacatggtgaaactccatctctactaaaaatacaaaaaattatccaggcatggtggcatgcacctgtagtcccagctattcaggaggctgaagtgggagaattgcttgaatcccggaggtggagattgcagtgagccaagatcatgccactgcactccagcctaggtgacagagcgagactccgtctaaaaaaagaaaagaaaagaaaacaaaaaagaaaccaggaaccaaggtggtgtgataaggtgataaggtgtgattgtggctgggggtctactctagctaggatgtttgcagaaaacccctcgtagaggacctgaataaggagagaggaagtgcaccacagagaaaagtcagggcaacagaggaggctggcatctcacagggccttgcagggcaccctaaggagggccataggagccacagggatgtgatcttatttcttttctattttcattaaaaaaatttttttttagcagggacagggtcttgctatgttgcccaggctatctcgaactcctggcttcacacaatcctcccaccttggccatccaaagtgctgggattacaggggtgagccagtgcgtccagcctctttttaaaaatgagatcattggttgctgtttggacaatggacttaggaggttgaattaacaaaaatcaattatggcttaaaattcgaaattataaaaaataaaaatttcctttttatattggattaaaagccagctgaatatcccactgaaaattaacagaaatttgaacttaactttaccttttcaaaattgatctcttttatgacacagtgcttgctatctgatttccctttagctaagtatgctttcccgaaggcaccttgcccgatggccttaatcacatcgtacttatccatggtctccaatgggctgagtttcctggaattagagtaatgtaaatttatcacacacgtctcataaagactaacaaagtcagaaaactgatgactaaagtgtaaaagaactcacttagctaaaactttcctcccagccttgccaagacagagacaaataactttctttgtggccacagataactgaaatgagacagagtttcttggtcagacacgggtcatagctcagctttgatacacttttgccctgtattctcgggtaagtcacttaacctggcaaaacctcactttcctaatttctaaaatggaataacaatacctgttttgcaagtttgttctgagaatgaaagatactatatccggtgtttcgcacctttataaagcaggaatgtccttaggcttgtgcacttttatagttcagcctttcttagtggggacgtactgccccctagggggaattctggaaatatatgggggtggggaagctgtttccccaagattcagaggcatgaggtttacaggtggttggggcctgagatggtaggattctgcgattcgagagacagtcccgcacaataaaggattaccccgcggccctacaatcttggagagtcttcctatacattcctgtgcgtggaaaaatccgtttgtggctagaaccaaactctattttacatcgaaatgctaagtatttttgcagttttaatgaacacttcttttttttttcgaggaatgcaactacatgtaaatcaaggcttgattgcacttcggtttggaggtttaccaagaattgttcaccatttgggaaaaccacgcgcttcactggccacgctgctcctggtcccggagacccaacaatctgcatttgctgccgtcacgttcaggcgactccccaggcgcggctactggctacttctctacattttccaagggtagtagtgccaagcattttcagattgaaatatgtactttcttacttattgctttccttctatttcctctttatgctacagttagggcataatacagttttgttgttgttgttaatggggtgagcagggggcttgttttcgaataattttacgtcagggtgggaagtcggtactgggttgcagggggctgggaaccagctccgcagccaggagaggctgcagacaccggaggatcgggttctgagagagacgcatacggacttggggccgggggtgactcgccgggaactgagggcccgcgaccctcccgcccaagtggcaccaaagggtggaagcccccaaattaggaaaattccttctcccctagggccgcccctggaagcggccgcgggtgagtggcaagacgcttacccgtacccgacctccgcgtgtggagcgttgccatagagaccgacgcgccctggacgctacacccacacagcccaggacgctaggccttttctgggccgcccccgccgccccaggccgaaactccatccctttcccccaccctgccgagctcccgaagccctgtggcggctccgggcaagaactaagggcggcccctgcaagcgtacctgctccgccggctccgcggggccaacgaagcgtcccggaaggatccgggttcccggggccgctgcgcctccctgcggccggggcggagccgcgcaaggaaacgcgggcggggcgcgggtctggaatggcctggggaccagtccacctcgaggcagggtcaggcgccagggagtttggagacccggcagagtcaccccgcaaccgtcccgttgccttgggtcgggattcctttgctttgcagtctacagtagcgctccccgctcttgcttaaggtgcaccagacgcttcgcaaacgttctctcttttctttacaacccgtcaaggcagtagtctcccagttttacaaatgagctaaactgatacaggaagagtgtttcttgtacaaggtctcaaatattgccaaaaggtggacgtgagactggaacggcttcctactctttgggccacagcggcggcctgccaagggactttctaacgaaaccggcgctgcccaagcgtctgcactcacgcccagtgctcatcccaccctgccccattctggatttgcacatcaagctgctgtctaaaatgtttaagtagttgaaaaaaatgtaattttcagcaattgtaaatagtgacgcaagttaaatatatccaactgaatcgaaacactacagtaatatggtaccctccatcgtccacctcacacacacacacaaaaaaaacccacaaaaaactcttaaaaatcctaagtttacatcattactcttccttcttaaaatcatctctccgccgccccctccccgtccctgccacaaaaaatttcttcttcttgtaagcactctagtcaagttggattagggctgaactaaaggcctcattttgatctaattgcatctttaaagtctctgtctccgaatatagtctcattattagttattggtgttagatttcagtgtgtgaattgggggtggccgcggcgggggtgaatgcagcccgtagcaggagtccaaaagttgtttagcagttggaatatccaatgttagtttctttggcagtgaaattccctcaaaatattagtaggtatatgatctacttgtttttgtttaattacacgtgtcagtgaccacacccaaatttcttccctagaattcttagacatgcttcattaaatcatatcttcattctactttcctgatagaattttacccgttatctttttcatacttgaaagtcttattgatcatcctatcatactgctgaaagaagtacagaaatggaaatttatatttcctgctcatagaattttagtttttctggattaaattgttaaaattactagtactacacaattgatcacaataaaatgtatcacaatactgataattattaaatataaaaaataaaattgtattgaaaattcatctctttaagacctggatgggcttcccatgcaccgttagttcctgtatccatagatgaatgctaacttcttgctacaatgaagtttaacactgattctcttccattttcttaaggctgtaagtgctgagaaataagtacataggaatgaaaagttttgttaaaagtgtccctcaatttttgtctagttgtatctcaagaatcatatagtaatctgtcaccaaaactggtttataatcatgaactgataattccattagtcttctgaaattttattaaaagcaaaaccccataagccattctgattttgaaaaggatttattatccaatacttatccagtctctcagtaactgtacataatttcaagttttttttgtttgatggttttgaaatgtttatgcccttgggcaatgccaagattgaagatgactaagaggtatggaatacagtatatatggaagctgagtacctggaaatgtccttaaaactatccatgcctgctttaacttgaaaaatcttcaagagagtagtaagctaatttcaaagagctaacccaagtaattttgggaaatggtatttgactggaaactatgagacaataggaaagatacataaactctgtaccttagttggtaaatttgtttctcccaggggtatgggttaatgatttggaaactgctttacaaatagactaggattgaacagctaagcagatggcggatggtacaagccagttttctcattgtcagggagagaagttacagaaaagcgtgagaagaaggctagaatgaaccttgtagtactgggttagttggagacatcagtatggacccatgcttaatttaatgtatgtacagatggagagatacagaaataactgtagagatgtctggatggatatacaattatacagtgtatacaggttagtatacacatatatacttcctagctctgtctgctgagagggcctagaagcagtgacaccccaggagcaataagcacacccagcacccagatcttggtttctaaaccagtgggaaccttgttgaaatggatgattttggggctggggcagagaagataaagatgagtctggaccatcttgtagtgccagaaaggaagtgctccaaaagaaccagcgcacctcaaagggacacaggaggtgacctgaaacaattcccaacggccaaagctagaacaatttaagcaagaaaacaaacgacttattattggattatactcccacccccagaggtggagattaattcctttgcatttgactatgagctggagtgtgtgactcacttatagtgaacacagcatgaacatggaaaattatgaagttgatagtgaagagcctggcagacactgccttcatcaagtgatcaaggtgaacgacaccaggaagaagtcatgctgatgctccctgaaatgatgtgatgagaagggcacttcacctttgtgattttccccaaaatccataagcttagtccaattgtgagacaaacccaaattgagcaacagtctacaaaatacctaagcagtactcaaaaatgtcaaggtcccgaaaaacaaggaaagatttagagactgccagagaccactggagatgaaagatatctaaatgtaaatacagcgtatgtgtgaggtggagggttggttctataccacaggttttacatgttaagatttaaaaactgttaaatctttaaaagatgtatatattccagatttcagcaactgcttgttaatgaccctaaatgtattttccccctactcttcactttagcaccgttccctgtatttggctggctcacgtctctttgagaggtgttgagcgaagcctgtttctttagtgaaatattctcatctcactgaagtgcacactattagatgaggttcacacacgacaggacccagcacgtgtgcgccatgcctcctcctattcgttccacatcactctctagtttctgatatttaccattaactgctcctcacctctggcctcttccttcctcatctacaggactgccatcttctgacaagatctgcagaccaccccaagcttcccagggctgaccctccaacccaggctcttttgtgcatcctatgagggactgtatttaaggacagctggtagttggtgaagatcattggaatgatcttcaaactactcagaatcaggtcatattgaaaaactgcacacattactaaatcataattaaatatatttaattctcaaacctttaggaaatgtaaaaagagtcacataataataaacacatatcataatgtgaataatatcatacgggctgctataaaggtctgtggtcagcatccctctgaggtaggcattattatcttcattttatggttgaggaaattggggcttgaagaggttaagtaatttcccacaatcacacaagtaggtagtggcacgctagcatcccatttctgttctatgggactgcaaagcccgatgctcacactcattccactataccttctcccttgagttcaaaaacttacaggagttctagacttttcaaactcacgatactaatcaagaacgattttaagtattaagagtttcctctgcttcattctgtttccaaaggaaaatatacgtcgcatgaactcatgatcatctcagcatgaactcctgagtgaagcctctcctcagcgtgactcaggaacatttcctcaggcattatctgtcgcacaggccttgccatccagctcgcttcttcagctctgacacccagtcggggttgtcatcttcctcctcaaagtccctgtgaaaaaacaatttggaccataaacctctacattaggggcacagtatctgttgatgagttcaaagcggaataccaccataacaatacttaagcttttgaaaattgagttccataaggcaactgaagggaaaaaattgccagttcttccaaaagatcacttctttgactgtttctaaaacttttaaaaatataaatcctaatatattaaaaaataacaagtccaagctgaaaggctataggtgtagggctcaatc

SEQ ID NO: 96644 - DNA, 26063 bp, Homo sapiens
cccggtctcaggtatgtctttttttttcgagacggagtctccctcttgttgcccaggctggagtgcaagggtgcgatctcagctcactgcagcctctgcctcccaagttcaagcaattctcctgcctcagcctcccaagtagctggaattataggcacccaccaccacacccagctaatttttgtatttttagtagagacgggtttcgccatttggccaggctggtctcgaactcctggtctcagctgatccgcctgcctcagcctcccaaagtgctaggattacaggtgtaagccactgcacccggcctctggtacgtctttatagcagtgtgaaaatggactaatacaggtgggctctcagctgccagggttctgctactcacatccttggctccacgacacaacacaacatagcgacaggcccgcttccactgcatctggccgagggtggagaccagggcatttttgaggaagaagagggtccccacgtagtcaagaatgaagacgtgatccttggtgggcaagaagcggcggtagccgtgggctagcaagggggccacgctcttgctgagacatcggcggcggcctccaaatgcctggaaatacaggcccttcgtgtctggaggaaggaaggagatggaaggttcaagggatgagatgacacgagggagatgagttggagcttgggtagatttcttagacacgctggtttgtagttcctccccatccccaggacaggggaacaaacagaccccttatgaaggagatgtggaaaataagcttagattatactcgacatgtgaactttagtctccaccccacctcagcccagggtcaaacatttgcttcttagtgagcagttctttggtgcaaccttgcatcagtgatgttgaggaaaactctaagaataaagacacagaggctgcgtgcggcatccacccccctcaccctgagcccctcctcccatcctcacagctcagtgaatttttgcacgcctgtaatcccagcactttgggagcccaggagtttgagaccagcctgggcaacgtggcaaaaccccatctctactaaaaatacaaaaattatccgggtgtggtggcgggagcctgtaatcccagctactcaggaggctgaggcacgagaatacttgaacccgggaggtggaggttgcattgagccaagattgcaccactgtgctccagcctgggtgacagagcaagaccctgtctcaaaaaaaaaaaaaaaaaaaaaaaatcaaagaaaaagaaagaaaagagaagagacagaaacaggagtgaaaaggaatgattgatgaaggccggtcatcctccctcacccctagctttggatctgttttctgggtcccccttctcttttaatctcccagtgagtgtaagaagtacaccctgggggatccctggaggggaagagggtttatggcatggttctcaggctaggggtgattttgtccttcaagggcattggttgtcacaattaagggggatgctgctggccatctggtgggtggaggccagggttgctgcttaaacatcccaccatgcagaggacagctccccacatcaaggaattattttgcccagaatatcaacagtgagttcagaagccttgggttagaggagggaaaactccaggtttggggagtgagggatgcctctagggaaaaagcgggaagtgtctgtgtacagagggagacttggcagggaggccgctaacgggggctgtgggtggattccgaagacttggaggaagtactcaagggagaatgtttgaactggacccgtttcttccggagaaaggggccctggaagcactgttgggagtgtgggggtcatcaggggactttagagagcaggaaggctaaggcgggacagaggcaaggagaacgggaggttctggggaaggtgtacagttcagaatggcagctctcttccagggccggactccagaaccctgatcttggaggcgcggactgagtctgcgacagatgcgtctccacacgccttccccatcgcacacttcgtggaagtagcggcaggtctggccgagggcaacaaggtctctgactgggaggaatgagatgatatgctccacctgggagggaggagggaagaagcggggagtctttggtggcccctcggtgatctggcccccaatcctattattctcaatccccctccccaaggactcaccagctctggggggaacaactggatggaaatcggatttcctttccccctcttctcttcaaccccaagctccgagccacaagaagggcagcttctcttcacctacccaagaaggggtgcatagggtcccatgagggtcccacatccttttttcccttctctccgcctaccttggggctcatctgactctagctgggcacagttatttcctcccctctctctccagacccatccctaacttctccaaataactcctcccgatctcctgcggccaatccccctcacccggagcccctcctcccgtccacacagcctggtgaatttttgcagcttccgtctctggcttcccctgaccatcctgattgccccctccctgctcctgccctcctgtctcctaggcccttggcccccccgttcctgctggctttcccacaccatgtccccagcctaggcttgggggacctctgaggcccctctgcctcctaggcccctcccccatggagtctggggctaacaaacctctctgtgacctcactgtttggccactgtgacctgttccctttaatcttgcccaggacccatctcttagacagctcctgggttctagctcagttctagccatcacatggctcaagggatatgcattttactggagaaataaagtgtgaattactggtaggtgacatctttatttcagggagcaggaggaagttttcctatttgaggcccttttagcactaactctgtagagaaacactagtgaattcctcacatttcagcaggccaaggcctctagggattggtagctcaagagtatagactcaaaaaactataaactcagtttgacaggtgagatggagaggtgactgtgctaataatcgtttagctcacaaatgattcagcaaactctttagacttgtgaaaaaacacatccaaaaggagactgcagcctggtgccggtggctaacgcccgaaatcccagcacttttgggtggccatggtgcaaggatggcttgaggccatgggtttcaagaccagcctggtcaacatagaccctgcgtctattaaaaaaaaaaaaaaacttaaaaattacccaggcgtggtgatgcacccctgtagtcccagctacacaggaggctgaggcaggaggattgcttgagcccagtttgaggcagcagtgagctatgatcgtgccactgcactccagcccgggcgagaatgatacccagtttcaaaaaaaacaaacaaaaaagaagactgcttttgctttcctgagggacagtaacatcattgcatgtataaaggacaacctattaaggtgggagaaagggatggatttcctctgaaagcttaggatttctcccagggtctctgatattagctttgtcttatgtggggtgacatttatcaggagaaacagcaggggtcagggttgtgtctgtcccactcaggccagatctacaccaataaatccaaggagtggctggctcttgcaggggctcaaaggagtcccatcctgccagaccaccagccctcaccacacagtgtcacagatccgttcattgactgcaccagactgaccacccaaattcccttatgtatggtgcctagccatggctaggctgggatgcctgagatggaattttaattcttcagcaactactcaggaatatcaacctctgagatgtgaactaaggagaaagcaacttcagtgacttatttctgggcaacctaccacatagggaggggactgcattagggactcatgccacttagaaaggaagatctccaagtagacagaaaggtattttccattcctcttgcatttgggtcccctttatccactccatttcaccccaggaggcaaacgagaggttgtgaatagaaaaagtccactgtgggccaggctttgtggctcacgcttataatcccagcacttcgggaggccgaggtgggagcattgcttgagcccaggagtttgagatcagcctgggcaacatagtaggaccctgtctctacaaaaaatacaattagctggcatggtggtgcgtgcttgtagtcccagttactcgggaggctgaggtgggaggttgaggctgcagtgagctgcgatcaagccactgcactccagcctgggcaacagagcgactctgtctcaaaagaaagaaaaagtccactgtgggccgggtgcggtggctcacgcctgtgatcccagtactttgggaggcagaggcaggatcgcttgaggtcaaaagtttgagaccagcctgggcaacatagcaaaaccccatctctacaaaaattgaaaataaattagccaggtgcagtggtgccgcccgtggtcccagctacttgggaggctgaggcaggaggatcacttgagcccaggcattcaaggctgcagtgagccatgactgcaccactgcactccagcctgggcgacagaatcagaccttcttaaaaaaaaaaaaaaaaaggccgggcgcggtggctcacgcctgtaatgccagcactttgggaggccgaggagggcatattgcctgagctcctgagtttgcgaccagcctgggcaacacggtgaaaccccgtctctactaaaatacaaaaaattagccgggtgtggtggcgggcgcctgtagtcccagctactcgggaggctgaggcaggagaattgcttgaacccggacagtggaggttgctgtgagccgagatcgcgccactgcactccagcctgggcgactgagcgagactccatctcaaaaaataaaaaaataaaaagaggaagggaacggaagggagagggagggagggaggaagagaggaagggagtgaaaacatccactgtgaaaactgagggagcgggaaagggctgtgcgtggaggatccagagacctggtttctagagcaagccagctgtcaggaacttgctgttcgctcttgctaacgcatcaacttccctctgcctcagtttctgcattcgtagcaccaagggcgtgttctaggcggtgagatcctttctaagcctctaaaaccccgtggtctggtcccctctccattcctgtccaggggagctcctcgggtgagacggcagaccgtgcaacgctgcacctacaccctccctcctcgagctgggcatctccaggctctgggaagccccccgcccgcccccagcccgggggtcccgagacccctgccagaggcttcacagtcggaggtccccccgctgccccttcagctgcgacaaccgccagtgcactggcctcaagcagtcgcccgaatcccctcaagccctggacgccggctagccccctaacacgtccagctcgcactcgccactgcagcggcgaactgcgttcccggccggccaggggctccgcgttcattcttaacctcagtcttaaagttctagctcacccgcctcctccttagcaaagggaccgccttctcgcccatgctattggtaggtagagccgtccctcagagaagaggcaggtccagattcccttcggaggctctaattggccttcttgacagtcactcgcctgtatctggcttacgattggtctttgggggacgaggactaggcaccccctgcttgcggtccctcggcccgttttcctgctagtggagtgccggtgtcccctcctcttggttggacctgattggctccacctcccgatctgagcattgtgattgggtgcagctgcgctgggcgggacggcctggagcgtcggccgttggcgagcgctctatccttgttcccctcccttctctcgtcagactccggcgccggagctccacccccactgacgggttctgattggccgcttctgacgcgtctcggggccacgattggtccgtccggtcccggacaccgctccctcccccttgaggcaactacggcggctccaaggagggggtgggggaaggagggacggccggtcccgtcagtcaggcagcgggagccgccgggagcggatggcggcggccgtagcggctccactcgccgccgggggtgaggaggcggcagccacgacctccgtgcccgggtctccaggtctgccggggagacgcagtgcagagcgggccctagaggasgccgtggccaccgggaccctgaacctgtctaaccggcgcttgaagcacttcccccggggcgcggcccgtagctacgacctgtcagacatcacccaggctggtgagtgcagccgggccccgggcccaaccgggtccctcatttgcatagccccaccccgggccccgcccggcccgggagtcgggcccgccccttcacctggcggccagggttgctgcccctcctgattgccctaaacctgcagccatcytctcccatctttgagaaccccctagacaatgaacgtgcttctcgtttgcacagaacgccctgcgcctccgagcgttgggagagattcctcctttctctttatttgcatatctgcgcacctgtaggatggtcccgcccctcacctggttggcttatttacatgatctcttaacctcagctccaatcggtctatgaagcagtccccacgagctcctctaataactgctttctctccctcttcatctacacytcttaacccccgtcccaccgagatccgagcagccccgggcacccccttcccagtgactggcccctaagcccgaggtttctgctttctgtgccgcaaccccgccccctaaggtcctggccctctccactgtccacgcagctctccagcctatgggaaagaaacaaatctctacctcccctcactcttttctccctgagctcttccgcctattatccccaaccggcttatctgagattcctcctcctccttcctaagcctgtgaggtcactgtggagcctgtgacctcatagggatcttagaattcccatttcagtttctgctttcccccgggggagggacttgaggccgttgctggagggaaggaaatcttatctcctagctgggagtgctggccagctagagactgtccttccacrcctccacccgcaggatctgtccaaccatgcaccctccaccctggtgtctgtggatggtagggggtgggggacttaactgtgacaggtgagtcaagcctcagctactcaggaggcagcctatgaccttgggccggcagctgggggtggggatcaggatcagggaggaggactgcattcccgaagcctcaccccagcccaggcctcttcctcctctcatctgcacggtgggggaccagagctggaggatagtgcttacttctccctaagcaggtgcctgctcacctgggaacactcaggccggcactggcacacatcctcttccctcttctggggagaaccagtcgaaacctccccactgatctcgcctgctctgcaacacttgagatggggaatgagtgagctccaggagccattcctgccccttacagccctgttccctcccacccccacctaaccccacactccagattgacctcagcagctgtgtgacactcactgtctgttcccttcccctcccccttggttgttttttgacaaagaccaaatgttattctttacttccttaggctgtctctccctgtgtggactcttggggaaaactacccggagctccccggcccctcccagctcccgcccccggccccctcctcccccagcattccggctcagggtgcagccgtgctcctgtgagcttgggggggggtcggaaatcccagcttcccaagaaccctcctctgccccactctctacacagggcccaggttctaggccaagtggggtccctcttgtccagaattctctcctctgtcccctctccgcaagcagggacagaaaggggaagtgacaaaaacatacagttgcccataccctgccctccatctctcctcgccctccaagcagacgaaaagcatcagtgccttgctgcccggactgccttgagccttcccctcccgtctcccatctctttctgagtgtcttcgctgcgtgtcgcctagtcttgggtccctgatctcccttggactaggctccctggggtgatagtaggaagaatcctgaggtggcggggaggggccatcttgcaaaggagaagtgcagctcattctctcccagaccacatcctgtgcccccagtgccctgcctcctgcctgagctcccttccgctcctagcttttgtccccgccaccgcctaccccatcagaactctgagaactcggtctccacccccttcgtccacatgcacacacacaaacacatttgcagagaaagcgggcaggtggaggcgaggctgggaggggcaaatgccatccccccaccctctccagaacggtcatctctgaggccagggcttctgtctgtgcaccagggctgggcagagaggaagagaaaggggtcccggggcatcaggctgtcatccaccctggtaaacacggggcctaccagagccagaacctgacagattgtttctacttcatttcctgtcacaagactcatttccttgggggatatacccggcttctctcctctgcttgcttttgctggcctgcccttccctgagaagggcccttggagaagctcaccaggtctgtggcctgggactccgcctcgcgggccctgggcccctcccaggacaggctgggccgaggaaacagaaaggcaggcttctccaggtctaagccgttagtgggtccgtgctacagggaatcccaaggctgccagcctccgcatagcaaggcagtgctccagataagagggcgattgtagaccccaggccctcccacactctccaccctcgccgtgcctgagatgctcacacagttgctgatctcttgaagtctgtgtcagtaagagaggaagcagagccgggctgctagggctagcagagggtaggaaggatgcctgccctgggccagagaagcccagatgggagggacctgggaactccagctcccatctccaaccaggtcttcttgcccttccctcccagcccttgggaatcagtaactttatgattctttggacctggcttgctggtccttggggctggcgaaaaactcgtccggtgtcggggactttatctctagaaccaagatagagtgacctgtggtttttcccgtgttgaaaacacactggagtagggaagaagggccccgaggagggatgggcactccctgtggtttgccccaggggtttcccatcttccctccgggagccccccagcccctcgccttactgttttcccatgagcactgacccctcctctcaccttcggtcctccgcctcacctggcatctctgaacaggaaccacaggagttagagattccagctgctctccaggatagccctccattgacattccccaacccccaagtctgaggcttctctagcccagtgacgctaaggcctttgccttccctgtgccattctggtcacgcctggaatgtgctcccgttggcagaaggctttgttatctctcctgggaggccacattgatggccttgaatctttaggtgtggaggtgagggagtgggcagccggctctggggggactgaaggtcctgtccgggctgggcctttccgcaactctccccgacacctccttttccccagacctgtcccggaaccggtttccygaggtgcccgaggcggcgtgccagctggtgtccctggagggcctgagcctctaccacaattgcctgagatgcctgaacccagccttggggaatctcacagccctcacctacctcaacctcaggtagggaggccgagccagggccacgtgggagcgtgtgcttctcagtctcaagyactactgagtgacccacccagtgacccygagaggatggcagtgctgggatgccatgcctggggagccagtccgctgcctttctcccttccacagccgaaaccagctgtcgctgctgccaccctacatctgccagctgcccctgagggtcctcatcgtcagcaacaacaagctgggagccctgccccctgacatcggcaccctgggaagcctgcgacagcttgtgaggatggggacgggaccaggaaagggacccctgagccaggcagygggaccttctagggggaggttggggagggcctggagcaaagacagagatgggagggtgggttctgctgggcctggtctcatggccccttcccactgccttcctgataccaggacgtgagcagcaacgagctccaatccctgccctcggaactgtgtggcctctcttccctgcgggacctcaatgtccggaggaaccagctcagtacgctgcccgaaggtgagaagaatgaagaactggagaggaggtgtttgtatgtgcgtcccagttggctcaggctgyggtaacgaaaacactgcagaccgggtagcttatacatggcaggcattcatttttcacagttctggaagctgaagttcaggatctgggtgcttccatggtcagcttctggcagggtgcttttcctggctgcagactgccggctccttgtggtactctycgatggcggagagcagagacagccctctggggcctctttgrtaaaggagcacaaatctcactgatgagggctccaccctcatgatctcaattacttccctaaggcctcgcttcctaatcccatcactttgggggttaggatttcagcagagractttttgggtgacacatttcagtccataacagtgtatgtgctttgaagaagttacaggccaggaatcttcagaggagaattacaccttcattgtccaggcttttgcagtatrtaaaacaaactgtaaacgatctgatttgatcttgacctagcaaccctctgatgctggcagggcgcagatgagcagctgtgttagaaacgtggacacaggcacagaaggggagctggtgggtgcatcagctctaggtagactggcaaggtcagaaggggccttcaaggtcacccagcagccctgctcaccccagcaggggctctcaaacacctgagtcgggatgctccgccactcctcccggagatgccagggccagtgccagagcccaggtggcccatctaatgtgcttgttgtgatgcactgatagcctctgccccaaagcaggcatgccttttgttcagcaggcagcagcatgtgtgtgtgtctgtgtgtgttatgtcttgtgtctgcgtgcatgtgtgtgtctgtgtgtatgtatgtgtttgtgtatgtgtgtgttgtgtctgtgcatgtgtctgtgtgtctgtgcatgtgtgtctatgtgcatgtgtatgtgtgtctgtgtctgttcgtgtgttgtgtttatgtctgtgttatttatgtcgtgtgtgtgcgtgtgtatgtttgtgtgtctgtgtttgtgtgtgtgttgtgtttatgtctgtgttatgtcgtgtgtgtctgtgcatgtgtatgtgtgtttgtgtctgtgtgtgtctttgtgtgtgtgtttgtgtttatgtctgttgtgtgtgtttaggtctgtgttgtgtgtgttgtatgtgttgtgtgtgtttrggtgtgtgttgtgtgggttgtgtgtatgtgttgtgtatgtttatgtgtgtgttgtgcatgttgtttgtgtctgtgtgtatgtatgttgtttgygtgtgtgtgggttttgtgtgtgtgtgtgtgtgtgtgtgtgtgtgtgtgtgtgtgatgtgtgtatgattcctgtgttgggatcaggtagatgcgggtgatgtgactaagatctggggccatctcttagggatttaatggcttcttgaggagagacagtcatagggaagttccgtcagggggttccccagacgggggctagagggaggtggcactggactctgcgtgggggtcctggggaagacttcaccggaggcgcaggcgcagtgggagccgaacattgaaggagaattccccagccttctgcatccaggcagaggacccagcatgtgcaaagcatggggttaggaaggtgagccaggcatggcaggaaggcctgtgccatgctcaagtgtgaacttggttttgaagaacaaggagggagtgaggtggtcatccactttccctgtctccctactccctgaccctttctgcacctgccctcttccttcccagtcaaaaggggtaggaagggctctctctgggccataaaaagaaatccaagcaagatgtcctggggacagaggcaagagcaatgagttccatccaatctgggatgtctggaacgatccaccgaggaggtggtgatgcttgagctgaaccttgaaagatgcatggatggggaaaatggagttctcccagctgagcaaacagcacctgggaaggctcagaagctgagggcccggaggggtgggcagtgaggtgggaaacgcgggtggagccaggttgtggaagccttcctcatgctgggttagggagctgtgggttttattctgtgcttagggccgccatgaatccagactgtgccttttttttttttttttttgagacagagtctcgctctgtcacccasgctggagtgcagtggcgcaatctcggctcactgcaagctccgcctcccaggttcacgccattctcctgcctcagcctcccaagtagctgggaccacaggcgtccgccaccacacccggctaattttttgtatttttagtaaagacaggttttcaccatgttagccagggtggtctcaatctcttgaccttgtgatccacccgccttggcctcccaaattgctgggattacaggcgtgagccaccgtgccggtcccagactgtgcctttttaagatgagcaaaaggcacctttccctgtgggcaggcagcatttcatgcagggtgcagtgctgggcccgtgctggggaaaggggactcccgggcggccacaatccgctcaacatctgcagccctggttgcatgtcacaggaggtgtttgaacagggtttgtgccttgtgctgatcatttgaaaatggagggtgggttcgagtgtggagtgggcaggcgaggagatgaggaggacagacagggctgggcgggacctgacgtccggatgggccttcccggggaagctgagctgacgtccagatgggccctctcagggaggctcgcttagaccgtggaccagaatcatgtggagagaggagcagggaggtttctcccggggaatgacttgagccacccaggggagaggctgtgctgggcccagggtgactggccagctggagccaagggtgagggagtgagcacgaggccacagccctgagcatgttcctgacttttcccttgcccacctgttccagagctgggggacctccctctggtccgcctggatttctcctgtaaccgcgtctcccgaatcccagtctccttctgccgcctgaggcacctgcaggtcattctgctggacagcaaccctctgcagagtccacctgcccaggtgaggcgggtgcctggggggccacgaggacaggggtgtggctaggcaggagtggggttggtccccttggatagctgagcaggatccggggagctgccctccctgccaactccctggcgtgtgctgccccgcacacaggtctgcctgaaggggaaacttcacatcttcaagtatttgtccacagaggccgggcagcgtgggtcggccctgggggacctggccccttctcggcccccgagtttcagtccctggtaagtcctaggtggggaggaaggaagccctgggatactgaatgccccttcccggccccaggcaccccctgctttctggcaggaggatggggggctgttgtccagcatcaggctgaccagatccgcctggctggccccagccctgcagaggatctatttccgggacatcggtacgatggtgggctggactcaggcttccacagcgttgatagtggcagcaagaggtggtctggaaatgaggtaagggcgtcctgtccatgggtgattgagggtgtcagccctgggagagcacctctgaactggggacctccaaattgcagggtgccaggcagargctggagctgtcctcttccttccctctgcccagcatcccagggaagggctggctcagcagagaccctgagcttagtcccacacaggaccccccaggtcctgagcccccatgtacagagaggccatctcccatctctgcctctgcctttacagtcaacagatgaattttcagagctgtcattccggatctcagagctggcccgggagccccggggrcccagagaacgcaaggaggatggctcaggtgagtagcasggctggccgggagctgggctggaccagggcctgggtccccgctcacttgctgacatgctggcctccccagcggacggagaccctgtgcagattgacttcatcgacagccatgtccccggggaggatgaagagcgaggcactgtggaggtgagagcccagctatgcctctcccaagggaggggagctggaggaggggacagggcaggcgtgggcacaggcctgccctcagctgctctgctgttctctccttaggagcagcgaccacccgaattaagccctggggcaggggacagggagagggcaccaarcagcaggtaccccaagcccccaaactgacgccactgcccgatcctcccaccccccaaccgcctccttccctgaccccggggtctgcccctcttgccctgtcttggtccctcaggcgggaggagccggcaggggaggagcggcggcgcccggacaccttgcagctgtggcaggagcgggaacggcggcagcagcagcagagcggggcgtggggggccccgaggaaggataggtgggacccagggccgcccggggctgttgctggacactgagccctggaaatggggccaccgagccccgctgagccgttctgccttggggctagctgaccccacctctccttgttccagcctcttgaagccagggctcagggctgttgtgggaggggccgccgccgtgtccactcaagccatgcacaagtaggtttcctgccagcatcccctccccactcctcttcctatgaccatcatccctctaattcccttctgtctctcctcagcggctcgcctaagtccagtgcctcccaagcaggggctgcagcggggcagggagcccccgcccctgcccctgcctcccaagagccccttcccatagctggaccaggtgggacagggattttgggaggaggatggggcctgtgttggtgagggctggttgggagagagggacacagaggggatgcctgtctcacctgcccctgtcgctgtgtccctggttccggccccagcgacagcacctgctccacggccacttggctccattcagagaccaaacagcttcctcttccgttcctcctctcagagtggctcaggtgggtgtcctgccctccccagtgctgacccagtgcttgccagcaccaacggctacatcacccttctgccctgggagccctctgggtctgttgtaccttttgtacctttgcgttgaaaatcccacaagcaagccgggtgtggtggctcacacctgtaatcgcagcactttaggaggcccaggtgggaggatcgcttgagcccaggaattcaagaccagcctgggcaacatagcgagaccccatctccatgaaataaaaaaaaatcccacaagcagagaggcaggaggtgtaggtgccaggccactgggacccagctacagagtcagtggtgagcagtggaggcagccccatgcccccctttttctcctaggcccttcctcaccagactctgtcctgagacctcsgcggtacccccaggttccagatgagaaggacttaatgactcagctgcgccaggtgagcagaggcgggagctgcgtgggcaggggcctgggccgggcacctccttgtgttgctgtccttgggaccagcctccctccacatcctctgtgcccactctggcacctyccctgaggacaggaagggacaggcacaagttccctgctagccctgagccccccactctccctgcctcccagacgcctctccttccctgacccctgctctatgtggtctacactkccaggtccttgagtcccggctgcagcggcccctgcctgaggacctggccgaggctctggccagtggggtcatcctgtgccagctggccaaccagctacggccgcgctccgtgcccttcatccatgtgccctcccctgctgtggtcagttggggcyggggaagaggtgggggatgggccggggcgcctgtggcctctcccttaccacattttcttctttcacccaccccagccaaaactcagtgccctcaaggctcggaagaatgtggagagttttctagaagcctgtcgaaaaatgggggtgcctgaggtatgggggctgctttctaaagagtggtggcatgccggactcagccgagcatgtggcatggatggtgggcttccatttgcagcggatgtctgctctcagatgaaggcacaggctgcccctgccctgcccagcatgccccctgccctgcatgccccctgccctgcatgtcacctgtcctacacatcccctgccctgcaggccccatcttgtcctgcatgtcacctgtcctgcacatgccctgccctgcactcctcctgcactgcactccccctgcccagcacgtcagcatgtgggcgtggttctggccccagcacgtgagggcaggggtgggagggactgtcctgctgctgctgctgacgtctgtcccttgtccttgtccacctgctctcctctcccccaggctgacctgtgctcgccctcggatctcctccagggcactgcccgggggctgcggaccgcgctggaggccrtgaagcgggtggggggcaaggccctaccgcccctctggcccccctctggtctgggcggcttcgtcgtcttctacgtggtcctcatgctgctgctctatgtcacctacactcggctcctgggttcmtaggccccaaaatcggccctccctcacccctttcccttcctctctatttataaggtccctgctccacccgaccccacctgcggtgccttcagccccaaccaaagacactagtgcacccccttcacagacactgacctcagaggccccactctggtgcccccagaccctgggcccccagcctctggcctccctccagtagccccacgagtccccacctctcagtgctgacggtgccttcatgtccccgccggccctgcccctgccctctgtaccccgtgaggggtggcaggagctggagtctcccccttcctcctgtgccctccccttccccccccaacagctgctatgggggggctaaattatctctattttgtagagaggatctatatttgtaggggttcggggcccaggccgggtccctatctctgtgtataaactgtacagaccgtggccgccctgcctgtgtgtgtgtgtgtgcgcgcgcgcgcgcgtctgctccgcgtgttggtggctgtggccatggctctgtgcccaccagcatctccctcctgagatgccggcctctcatgctcccggagcgtccgccaaccccccgtgtcacctcccttctgttatcgctgacagctttcttgcgtctcatttgtcgccgagccccgagcgcacggtgatgctcgggtctgcccccgaccccctgccacaggccggaagccgcagggggcaccgtggggaagctaacccggccccttcccccaggagtcactgtgccagccccaccacatcctggaagaggagggggccccgggaaggggcctcccctacatcgctgctgtcgtccacgccctgctggaccggccttaggggtgaaggtgggggcacagggcccaccccgcccgggaccccgggagcagaagacgcgcctgggctccgcgctctcaragaagcacgtggtgagggtggcctgggcctgggcacccttggcctgccggcctggctgcctctggggtcgagggtctgggtggaaggaccgcgggtgtcgcaggtgtcgtgtcagccgcaataaacagaagccagaagccctctgggtggccctcaggtgtaactgtgtctgagagcacgtgcgtcgcggggttgttgggggggcctctgtttccggaattcaccgcccagtcgccagggggcgcccgcgggagcccggcgggggcacgcgccacgtggccgggagacgcacagggcgccagcgtcgccgcgaggcctctggggtgggttcgccaggagggcacgttcgcgccgcgccgcggagggaggctgagagggccgggccgggcggcggggacacggcggtaccgtcctgcgctcgggaacgcggaatgttgccctggtcgccgccgcggtggggcgcgggcccggaggaggcgcccgagggaccaggccttccggcgggcaaggaccagggcgagccctggagcgccggagcggacgcccccagggagctggggacacccccatgggacaggtgaggggctcggacggagccgtggggggacagmgactgggggcctccatgcsttcaccacgcgctctacggaggcttctccattgtccctgctggagattgggtccctcggtctcccttgcaccaggcacccttgggctccaggggagggtgcgtgggggcggtgtggctgcagcctcagtccctgcccctccagcccacagcccccatcccgtagcccttcctggatctggagagagcagctgctgctgccccaccacctgccaggcccggccactgagcagccccccggagccccaggtaggacaggccctgctgcctctactacccctaagagcctctcactgactgtgagcctgttataatccccaagcgtccccccagatccccgttccccccaggtggcctgggaggtggccccctcgaggatgactccactagcgccctgggaccccaagtatgaagccaaagcaggacctcggccggtgtgggtgagttgggggcaaacctgtgggactggctggggtgctcagggagctgtgcggtggcctgaggctccagtgctctgtcctcctcaccctagggggccaactgtagctcaggagcctcgttctcaggccggacgctgtgtcacccctcattctggccgctgtatgaagcagcctcgggcaggggtctcaggcccgtggcccctgccacagggcactggaatggacagcaggcgcccccagatgcaggtacctcccttggtcccccgggggcgcaaggctgccccaactcctctgggaaccagtgcccaggggtgggagcccgcagcccgccaccctagtggtgtttcctcctagggttcccggtggtgtgctgtgaagatgtcttcctctcggaccctctgctgccccgggggcagcgtgttcccctgtacctgtccaaggccccccagcaggtgagagctctttcccctccctgtccttaccccagcctccaggcttgcctggcaggaaacacattccattctctctcctcagatgatgggctccctgaaactgctgccgccgccccccatcatgtctgccagggtgctcccccgcccatcaccctcccggggcccctccactgcctggctcagcgggccggagctgatcgctctcactggcctgctgcagatgagccagggggagcctaggcccagctcctccgcggttggccccccagaccatacctctgacccacccagcccctgtggtagccccagcagttctcagggtgctgacctctctctcccacagaccccagacacccattgtccatagccttctcagggcagagtgggctggttgtgttgacaataaaacagtgttggtttgcaaaacaggctccgtgtggctgggagcagagtaagtcatagaggcaggaatggggtctctttctgtctcactgcagatcaccccctgctgtgttaggcggagggcgagggtatccatgacctaaggcatttctgggctgactgggcagagcccctttaatgagtgggtgggtggtctgcatggcagtgcagggctgaatgtataggaagcaggcgggggagtaagtaggggcacctcacttttaggggacactagccccacacctcttgtgctggggctccaggagttcagttctgggctgggtggggtagttgtctggctcagaggagacacaaagaatgcactgcaggtgtgtgggggagggtgccggtccatgtaaatgtcaccactggcagaaaggtggccctgccgcagcctacctgagactctagagattcttgcacgaactctgtagagaaacaggatcagggtttcagctgagaaagcccagaagtgtgtagtctcggtggtttgggcggggataggttctagaattttctcccataaaatagcccaacttcttggagaaccttctactcaagacttaggtgccacagctggaagggacacagggggcaggaccccagcttgttgccctgcaggtcacttgtccgaggtggcatctgggccttaaagcccctcacacggtggggagttaggaggcagggcgggggcgttacaatgccattccctccagtccctccctcaaccacccccccatcagtcagcaggagagagctgcctgggtctcaggtctcctcaccgcatagctatgtgggcggagcgtgtgggccctggggacgtcaccaagtgcccccagagaaaggaccaggtccagatcgacgtagctgaggcagctcgtcaggggctctggcctggcggtgccggttccgaggctctctggggccgataacttggtgcacacttcactccctagccagctctgaggggggcaggagcagcgctgagtccctacccatccccagccagcccccacatcgcgatgggcactcctgggcctgtgtccaggctcctgaacccagacttgtaggaatgggctcatagtcactccctgctcccttggttatgtagcccccacccagccccttagggtagaaggctgctgtccccagcctcgccaaggtcttaagggctgcttgctcgatcccctctcccagacaccctggacggctcaggccacttgactggtccgcagaagctggggtctcagggatggggaacagggagtctgaaggtgctcataggagggtccctgagcacctgggcctcgtcattgtgcctggagaactctttttttttttttttttttttttttttttttttttttttgagacagagtctagctctgttacctaggagtgcagtggttgatcttggctcactgcaacctccgcttccccggttcaagcgattctcctgcctcagtctcctgagtagctgggattacaggcatgtgccaccacgcccggctaatttttgtatttttagtagagatggggtttcaccatgttggccaggctggtctcgaactcctgacctcaggtgatacgcccgcgttggcctcccaaactaatgggattataggcgtgagccaccgggccgggcctgtgcccggagaactctaaacctgcccctttaatgtttgaactttcggcgacctgggggaggggcgagccacggagaaaccacagccagaagcccccgaggcccccggaagcccggggctcgggcctcaccggcatcaccgcgctcctcgagcagggtgttgtatcacgcctgctgctccgcctcgcctgccgccgccacgcgcaggctgctgtcgcgggtgtagaggacgatcaggtggtgctggcgcgcatctgcgcacttgctggtggtgcacgcacccgccaggctcaggctgcgctggagccgcgctcggcacgcgcgaaacttctgctcgctctcggaacactcgggacgcggcgggtctgcgcgcaggtggccgcagaaccgcacgtcggcagggcaggcccagggcagcggctggctgaggggcacggcggccattcccggctctccccggggccgccgcctgcgggcttcattcaggggcgaaggcaataaagtggctgcagaagaggcagagacggctgggtctcgtgtcttgagcacggggagaggccagcaggggtgggggtgaggtggcgaactcggcgggccgggagcagcggccgggcaggctgccacccgtcttgatgcccagcgtctctcccgggctcccgactggaagtttggggcaaggactctgcgcacagcgagtgtcccggtgactgttgcccctggcctgggctccccactacctccctccctccgccgaccgctccggaacccccaccccacgagactaatcctcacgtcgcccaggaactggagtttgagtagggaagtccaagagaggcggcctcgaccccaagactgagcctttataggggcagagagcgtgggggcgtctctaccgatcagctgactgcggtccggacacgtcgtcggggcaaccgagaaagcctcggtgtgaggccagtgatcggacttgtggcagcggtggtggcgctggcgattagagggctttggaacggggcctccatgcaccctgctggctcctgccacgccccgctcggcctgtaggtgtccttcctgtgtgtacccccttcccatccaggagtggttttgtgcccttccaagtaaccaaaggagccaccgccactgagcactgcgctggattatttctgagctggagattgagtttcttgaaagtttggggtgataggaggtgacttgggctaagtaagctcagggggtagtccctgtgcacagaccatacccgctggaacccagtcaagtggccactgaaggagacctcggaggaagaggccatctctcaggaagaccccttcgggctgccccattgctctgggcccctccttgccaccactgcccaaaaatactaccccgggaccacctgaaggctctgaccatggacgtgtggacttcctcatggaggtaccctttgcttcttgaaaaaattgcgattgggctggggactggacatttttgcactcagttctgatccaaggaccactgaccccctccaaggggatgggggtgaaggtgcaccagacaaaccagcaggtgacacctggtgggaccttagaggaccctgagatatcacccaaggcaagtaaggtgcctaaaggggaaagccgagggtcagggaggagaggccaacatgcagcccccataaagatggcattcagggaggagctccctcagggaaggaacaagatatgacaaagacagaacaagagaacagatgcaaggacccaaacctagcccaagggccagggcagcctgagcagggtgggcagggcttcccgccacacttcctgcttcctggggaaggggccccacgtgagtgggaatatgggaggcaagtgctgtgtgcatggagctggggtcctcacacacctattccaaggtcacattgagagggagatgcagggaaccaaccagcacccagccagcaggcaggtgggacccagggcctgctccaggtgacctctggtaagccaaagccccactggggtgcaggagaggctcgaagcacaggtggtgtggtgtggggcgggggggccgtggggcggggctcggcaactgcccagtgttgggtgttggccacagaggcaatggctccgtaagtggccaacaaaaccggactgtgttcaaggccatagccccacgtggccaagggccttgatacaggcaccatgtgcaaaggggcagggacacaaaggacatgtgcacacccctccccctcccagtcctgctgctgcctcaaagaggccaccaaagggcccctgtccctgctgcactccgggcccaggagtcttttttactccctgaggcttgaagatacctgaggaagatctctttattccttccccttcccactccccatcaaccaggtccccctgcagcacccttccttgtgaaatcacagctgctatgacagtgaccagctccaaaccaccctgtgtcactgaaccttgggtgctgggtgacacatgggcaggaaaggcaggaagagcagggatctgagggcctgggggctgggcaagcctcaggggtggggtgggtgctgatcaatgccaggtgatcaatgccaggtgattggacccactgagtaccaggacaaacctggagtcacgcaactggcctacatcagttgccttggcaacacactgcccttgaccctacccggaaaagatttatttcagccggtagccctggtaacttgagtggctccccagggacaggaagtggcagaacctcaactctgcctctcctgacctgaggggttcacttttcatccctgtcagggacggggcactgcgttctcagcccctatggaagaatgttatgggtttgggggaatccacggggaggagactaggctgttccagcgtgcccctccttcctcagcctgaggccttgctcctctgtggaaggcaacacagggacagagccacacattcagcccctaccctcagccctgctcccatcccctggcccacaggtctgacccgcaagctccgatgtggagacacttggtggctgactcctgcttcctcacacatggggatggcccacaggtgaccgactggctgaatgctggggccatgctagaggactgctgtctgcagagcatggtccctgcattggccagaagttggtgtgagcccaggtgagtcactctagccccgtggtgtgtgtggtgggtttgaatctgcagctaccaggcaatgttttctccatttcctctcaagccaggcctttctccattctttgctactctccaggagaggcggctcactggagggctggagcctgagctgctggagctgtccccggccaaggagagcagctcctagtgtcagcctgtgcccagggaaccctggggcccgaggctgacctggcgttaacttcttactgctcatccagctctcaccagccagcaggctggagtccttgtgggctggaggggagggagtctgcagggaggacccgggcctggacccagatagtgaggagatgccgggagacagcacagggtgacagaagcaggagaaagcccttcggtttagcctcagttccaaacctcggcgctcctggcattaagggaagggtgatggaagctggggggaaataacagaaaggctcctccccctaatacaccataacagattccagcttccctccctccggctctaagcagaaaggaaagaactggtaagagaattaggtagagggacacagagataatctagggtggcgaagaggggagaaagagaagagatggaacatgcaaaggccaggagcgaagcgggagaccacccaggagacagaaggagggcagaggctgggagaagaacaggaacagacaggatggggtcctgattgttggaaaagacagggaggccaatcccagccttgcaaatagcagcagctagaggttatttccagaaaaatctgcaaagtaaatacactgatcacccaactcccatatctctttgctgctctctgtggaagactcagacaaaccccaagaatgaatggccacggggccagggcaatggtggaaagggaggggcctcacctggccttgggccaaacagcaaggtggcctctgcccagccaggtgaggtgtttgccacccaccccctgaccaggtctgtcttgtcaccacacaaatagcccagacaccacagctggatgttgtcacaacatccccaggtggaaagagcctggggcagagaatgttccagacccaggaggggtctacttccagcaccacattggcaccaacctcctttgcccaccctggccccagtgggcattcccctcacatcca

SEQ ID NO: 96645 - DNA, 12721 bp, Homo sapiens
tcccagcactttgggaggccaaggcgagcgaatcacctgaggtcaagagtttgagacgagcctggccaacatggtgaaaccccgtctctactaaaaataaaaaaattaggccgggcgcggtggctcacgcctgtaatcccagcactttgggaggccgaggcgggcggatcacgaggtcaggagatcaagaccatcccggctaaaacggtgaaaccccgtctctactaaaaatacaaaaaattagccgggcgtagtggcgggcgcctgtagtcccagctacttgggaggctgaggcaggagaatggcgtgaacccgggaggcggagcttgcagtgagccgagatcccgccactgcactccagcctgggcgacagagcgagactccgtctcaaaaaaaaaaaaaaaaaaaaaaaaaaaaaaaaaaaaaaaaaaaaaaattagctgggtatggtggtgcatgcctgcaatcccagctactcaggaggctgaggcaggagaattgcttgaacccgggaggcagaggttgcagtgagccaggatcatgccactgcactccagcctgggcaacagggtgagactctgtctcaaaaaaaaaaattgaactagcagcaaccttctagcccatgaaatcttccacttcttgggcaacaaagaataattaagttatgaaaactaaaccataatcacactcgtaatgcttatgagttaataatagatttttgcacaagttgtgtttgaaaacatttattcattgcacttaagtctttctcaaaacacaaagctgtccttgaatttttaatatagttcattaaattgaaaaaattctcattttctttcccatgtttttattcttcaatctctgactcttttcatcaatagagtaaaatggttttcattatccagtgagtacatataacaaaaactttcaatatatataaagacagccatgtgatttcagctttaatctctctttttattctgaactaaagtcagatacacttcaaaatgttggtaaaatgtatatattttggtgtgacattgtgacagttaaggtatacattcagccttttctcaggcatattgaaaatggtagtagttgaggtagttgagacactgaatgaggtagatgttcacgatttagaaaaaaatattattttcaattttcaaatcatatctgatataaatgaagggaaaaggtaataccttgtcatttcagatgaaactaaaatattttggctttatcaacagacataaattttgaaggcttaccaatacaattggtatgcttttatgtaattagagaactccaaaaagcacttagaaatagctcgtaaatctaccatatgttgacagcactttaatgaatttctctagactgtgaataaaaatttggactccagtgctctttatattttattcacttagaaaaagtaagacaggattgctcagatttattgtcatatatcataaaagtaactacaaaatatctactcattatagttaaagatttacagtgaacattttatagtatgttttctcttaattatgttaattgttcacaaatgagaacactcaaaaccagtgcttctaagattaaactaagattagatccagtggcctggcatctctcaggagtttttcatagggatccaacccatagtgaaatctcaggaggtcctctcaaataatggagtttaattattactcataaatgggcagttttccacactaacagatgttctcaatctcatgcaaccccactacttggtgttgcaattcccactacttttccttatccattcaatactttcccctgtgtccagatagttgctgaatcagcatttacccactttatgaatactcagaataaaataccaacacttagactcctctcccccaacctttttttcctatcaaattaacaaagacagaaaatcatgttaatacctagtttggtaagagtggggcaaaaatttactctcaggcattgctgttgggaatgtaatatgataaaagtgttctggaaaagaaaaaaaacaagtgctgtatatatgagtagatccttttagctccagttactcttatcctgcattggggaatctatccaaaggaaataatccaaaaatgtaattatattatgccagaagcaggtcttggaaatattttatatatttagtaaataagaagaaacatctcaaatattcagcagtaagggagtgcagcagatcatggaatgctcacataacagagtaatatgcagccattaaaatttatgcttgtttattcaagggcatgggcaagtatggatatggtaaataatgcaggatactttcatgtatgatatgatttcagctatggaaaatatagagaaaaatgatgtggagctatttctaaactataaacctaatattcctaaatatttgcttccggttggtatgtgatccttccctctgcctgtttttctgtactcatctgaatttccatactgaacttgtaatattcttttgatcagaaaatattaaaggaaaatcacaacagatttggaaaacaatcattaactaaatttctgccccagtcttactcaggattcagtttttccaacctctaaagatttaaatttttttaacttttcatactagaattcagcttataaagtcttgaaagtcacctttttccctttctgacatctgtttcataaagaaaatgacttagtggtaactggatttccttctttatagtcaatttatagatttccatcttagaaggttgtttatttacaacaacatctattagctgttaatattatcctcagttcacatggaaatggaggtgacataaagcttaaatgaagattggtcataaatccttgcacagtctcagatccaactactttgtctttatattatccaaagcagttcaaaaagacaaaggctgctgatagtaacaagatttctccgttgaaaacacacacacattcataaatcaatcgaaagtgtggtacaaaatagtatgtattttgtattctttaaaaaaaattgagcatttctaatctcttcattttccttaaccatttagaagtcaaaagttgaattatttgtgataagtgtatatgctctattaatatattattgctatagataagcatataataaagtttatatttattactaacatacatggaaattttgggctactgagatacctggcacagtcagtgactttgtctattcctacaggatctaattgaaaggtgttaggaaaggcatagcaaagagcctttttcctgttgttacaagcagtaaatggcccttaagaaacttcaaaaagaatgaatgcttgcttgagaaagaagggagtaagagaaaagcttttcggtaatgagcaggagaaaaaagaaaacctggtctgagagataaaagaggtgactattaaaacggaaggacacagtctaccagaaactcgtgaggctttacaaatcaaaatctagactcactttaccatggaaactgaagacaattagaaagtatatgtttacaattttgtaatattttactttatttttaattatccaaagcaaatataagactattcatgataggaattgatagtttggttatgactacaccgatattgaagccatgtgtaaatttgaaatacttaattttttaaagctgtttcatggaatctatagatgtgacaaaaagctaataatgtattctgtcactttacttccttgtcaccctaagactgtgtttctccttccagtaataggatacgagctacttgtctgagaacatgtaactggagtagacttttatgtagtgatctgaggcccttactagatctctttctttctaagggaaatcaccaaattttgagcctataggtaaatcatttgtaaaccgggggttggctgggcgtggtggctcatgcctgtaatcccagcattttgggaggccgaggcaggcagatcacctgaggtcaggagttggaaaccaggctggcaaacatggtgagaccctgtctctactaaaaatacaaaaaaaaaatagctgggtgtagtggtgcatgcctgtaaccccagctactcgggaggctgaggcaggagaattgcttgaacccaggaggcggaggttgcagtgagctgagatcacgccactgcactccagcctgggcaacagagtgagattctgcctcaaaaaaaaaaaaagatggggctacttgaaataatcattgtattggagacatccagctaatgaacttaagaagtagctcttatagggtggaaagaacattacctttagaatctagaattctggtttctcaggctctgtttggttattaggtattacctagagcaaaccctttatcacattgtttttttttaattgatttaagtaatggaatatgaaataaatgtcttttaagcattcctttaaatccatttttctagaactatgatacactaacattcaagttcacagaatattataaattaggggaggggtatagtgggataaatttccttcctgtaactcaaaacttcttaacccatttttgtatctaaacacaatgactccttccagtgaaatgtagagttgtgtttcttgccatacaatgcttaggtagtccagatatgtatacgtgggaatgaaaaagaagtagaaaagttgggcatctttttcccctggaaaaatattgtgttctatggaagagaaagtagttggtggatagtggaaagaagatgctaagaagtagagaagtcgttcaaggaaaacagtaaactgcaatattcacagaaacagttgggaatatgtactgattctttacttaggggatgaccatagttttaactcatttcttaccccaaattcgcagattgcattctattgtattataaatagatctctcattttaatgaccaactcaagggatattctggcagccgtggtgagaatgagaaacaaagatttttatacccagcaaaactgactttcaggtgtaaatgacacaagcgggctattgtcagcatgcaagaacttgggaatattgtttccaggaccctttcctgatgaatatacctgggaacaaacttcagacaaccaaataaatactgtatgatgtccaaaataggcatattcatagagacagaaagtagatcagtggttgcctaggacaagaggggttggagggaaatggggagtgactgctgatgcacacagcacttcttttttgagatgatgataatgttctaaaattgtgaatcaactcagtgtgagtatactaaagccactaaagtgtatactttaaatgggtgaattgtatgatatgttaaaaagaaaaacactatagttctgagttttaattgaaaatattaatatgagcatatgatatattgtattttaaatatacataaatatgcatatatatgtatgtcccctgaaaagacctagaaacagtatgaaaccagtagctatgagcatctctaacacacagagtgcgggcttgaattaatattttccactaaccagggcttcttggagaagagactgaaattggaaatgtacaagatgagtctgaaatatcaaaccaggtaacaaagaagctaacaaagactgctagagtaaggtcaaaggactcaggagccaactggaagaggcttccattggccaaaaatgagaattttgagtttcagtaaaaataagaactataatagattaaaatccactaagtacgtttaaattgataagttcaagccatgggcagtgaagcatgcatgtaatcacagctacttgagaggctgaggcaggaggatagcttgaacccaggagttcaaaaccagcctggacagcatagcaagaccctatctctaattaaaaataaaaatcaataaatggataagttcatcataatgaaaagcaaaaataattggtcaccttcaaagaatgacaggaaagcagttatcttgaaaactggtattttcccaggcagctgccaaagatggaggggcrggtcctggtgctcactggccaaggccaccttctggtctgcctgacagccgtcctggataggcaggtactgctgggccagaaggtggtggtcgtgcactgcaaaggcatcaacatttttggcactttccacagaaacaggttggagtacctggccttccttcacaagtagatgaacaccaacccttcctgaggccccccatctgcatcttttggcagaccgcttgaggcatgctgcttcgcaagaccaagcgaggccaggmcgtccctgaccaccccaaggtgtttaatgggatcccactgccctatgacaagaaaaagtggatgatgcttcctgctgctcccaaggttgtgtgtctgaagcctgtgagaaaatttgcctatctggggtgcctggttcacgagtttggctggaagtaccaggcagtgacagccacccaggagaagaggaagaaggccaatatctgctattggaagaaaagcagcttatgaggctatgtaaacaggcccaaaagaatgtggaggagaaaacaattacacagaggtcctcaagacctatggactcctggtttgagcccactaaagactgtttattccttatgattggcctggcctgcccttccaccgttgctgccgtggggtgtagaggacccaagggtggcaatccaggtgccacagacagcctggtacttaggaagctgggggtaaggaaacggcattattcaactgcctttctatattgttactttaaatgactctaagaattgttcaggcgtagtttgtctatggcctactcgttcatgagagagttgttttagaaaaatgagggccgggcacattggcttacacctgtaatccgagcactttgagaagccaagagatcgcttgagtccaggaatttgagaccatcctgggcaacattatgaaaccccatctctaacaaaaatgcagaaattagctaggcatggtggcacatgcctgtactcccagctacttgggaggctgaggtgggaaggtcacctaagcccgggaggtcaaggctgcagtgagccaaaattgcaccactacacttcaacctgggtgacagagtgagaccctgtctcaaaaaaaaaagtaaaacaatagtaagaagagccagttaccttggtttcaagattagcaaaagggagctggaacatgcattggagggagccctaccttctgagtgggccatctgttttaacttcccaccttatcctatactctgcagctgtgataatgtggaaaaaaaaaacacttggggacagtatgagcttgctgttttacaaagagtatgtatagaagcatagactgggaagatgtgtgaccagggcgttacagggtagcccttgctccttccctgtattttgtggtccgaatcaaataaattgcttttaaagaagaagaagtctggtaaataaaggaaaagaatcaggcatttatcttgcccctcctgtatgaactatatcactggtaactaaatagtagataagcaatgtttctcttaaaattatacctgcttacaaatgaaagtgaaatgataaaagtagaaaatcaccatttttacaacccctgatgaattaatggatctggaccatggtcaccaacagctgcttgcttctcaaaaggagagcaaaccacatagtgcctcctgataacatatcacctatagtcttgccaaaggcatcaagtctccacatccagcttccaatttgtcataaatacagaaggaagaatgtgccaaactccaccatacatatgcagtcaggaacccatagaataagtctcccacagttcaaataacccagatttgtccacataaattataaggaaaagaaaagaaaaaatgagatgcctgtggtttaaaataagaggcttcaaagtcatccttttttgaaatgatcatgactgtctatagtgtctaatgatgtagatttggttgctaaaaccatataagatagtaaatgccaggatgtggttactttgggggagagagaaggaagtatgattgggacaaggcccacgtagggtttctagggtggctggcaaagtcctgtttcatgatctggatgctgcttactatggcatgtgtcttataatgttacactaggctatacagctgtatgtttgtgttggagagttcatatctgtgtgtgtctttttaattaaaaatattttgaaataactacacaatttttaaaaggttatttagaaagtcaagcttagtggaatctgccttacatcttgagatatattttggatctctctctgtaaataatacttaatgtactgagttatcttgatgtatgtaaattacagattatatttcaacataaaacaagcataattcaaacatgtacatgtaagtattctataatacatgtctgaaagtgctgctgtaaacatctgtgcagttttttgtatggtcataaattttcagttcgttagtttaaatactaaggagtgctattgctgtatcatatggtaagagtgtgtttagttttgtaactgccaaactgtcttccaaactatctgtactattttgcatttccacctgaaatgaatgaaagttcccgttgtttcacaccctcaccaacatttggtggtgttagtgttctggattttgaccattctaatcagtaggtactaattagtatcttgttgttttcatttgcatttacttgatgatttgcgatgtggaacatctttccatatacttatttaccatctgtttgtcttctttagtgaggtgtctattaagatctttgtcccatttttaaagttggaatctttgctttctcattattttgaagagttctttgtataattttcattaacagttctttattagatacatgttttgcaaattttctcttaggccttggcttgtcttctcattctcttgacagtgtcttttgcagagcagtttttcattttaatgaagctcagcttgtcaaattttttctttcatggatcatgcttttagtgtcatacctaaaaagtcatctccaaacccagggtcatctagattttatcctgtattatcttctaggagttttatagtattgcattttacatttaggtctatgatccattttgagttaatttttgtgaaaggtataaggtctgtgtctacattcattttttttttgtatgtgtatatggatatctagtttttccagcaccatttgttaaaaaggctatcttttcttcatttaattgtctttgttcctttgtcaaagatcaattgactgtatttatgtggatcaatttctaggctctctattctgttccattgatttattctttcaccagtaccacaaatcaagacaagattatcttcatttctgtatctctatagaaagtcttgaagttgggtagtgtcaatcattgtcagaaattggctattttgaaccttttgcttctccacataaacttcataatcagtttgtgtctacaaaataacttgctagaatttttattgggattgcagtaatctattattccaagttgggaagaactgacatcttggtattcaatcttctatctataaacatggaatatctccatctgttctttgatttttttcatcagaattttgtagttttcttcatatggatcttgtacatattttgttacgtttatatctaagtatttcattttttaggtgtgtgctcacaatggtattgtgtttttaatttcaaattccacttgtccattgctgatatataggaaaacattgattttctatattaaccttttatcctgaaatcttgcaatactcacttattagtttcagatttcttttgttgattcagattttctgcatagaaaatatgtcatctgcagacaaaattttatttttcttctttcctaatcagtataccttttatttccttttttattttttcttataggacatctagtacaatattgaaaagcagtggtaagaggggacatccctgccttgttcttgatgttagtgggaaatcttctatttctcaccgtattatgatttttcaaatgtaaaagctgaaccagcacaaaaccaatatgtttattttcccctgccttctggattctaattaatcattggtagaggaagtttaggctgtgtgaagagtttggaaagaccttaggaaatttttttaaatgtttatttatttaaaatttttattaaactttattaaaatgttcaagtttcctgaagtgtttagacatcaagaaatatttacatacatctctagtttatatttccatcctgttgatttccctattaagaattttaatgaggccaggctcagtggctcatgcctatgatcccagaacttttggaggccaaggcaggaagatcacttgggctcaggagtttgagaccagcctgggtaacaaaacaagaccatgtctcaaaaaaaattaaaaattagctgggtgtattggtgcatgcctgtagtcccagctacttgagaggctgaggtaggaggatcactggagcctaggctttcaaggctacagtgagctatgattgtgtcactgcactttagcctgggtgacagagtgagaccttgtcttaaaaaaaaaaaaaaatttaaaaaaggcacttaaaagaagtccaaaatgtatctcaggaaagttgtacaaaatgtatctcaggaaagttgtacataaaataagacaggcctcattttacagatgtttctcaattatgttattccaaatctacagtattggcatagctttcactgttgaaaggtgttttcatttcttaaaaatgtttttaacctcctatcaccagtcctatgctaaaacagggtattttacccataaactaccacaaatagataaaaatagctactttacatataaatggccctttaaaactggatactattgtatgccaatttgcaacatagtctgtatgaaaagagaaaacagtaataaatgctgtgttatggaccaataattagattctcaatgtggtgtaaagtactcacacaaggttcattcttggcctcataaatttgaccatatcttttcattctaatgctcttaaatgacttagagacatgacttaacagtaaaataagctcctaaacaacaaccgcaagcacataaaaaacaaaattatgcagtgatggcatgccatttgttcaggaattggctgtcctatttactcttaaatataacagcaaatggagagttgattgttaaactgcacattcaggacctcatggtttaatatctcatgtgctatttgccagactaaagattattaacaatttttgctttgttcactgcaggaacaatacagtacttgtattatacaaatattttgattaaagtattgtttccaatcaatttatttcccattcctttcgaattacctgagttaacctagttcagtggttctcaaatgtagtgtacatcagaatcccaaggagagcttgttaaaatacaaatgtataagccctgctctcagagcttctgattcagtaaatctgggttgggcctgttaattggcatttcttagtttctccataatgctgatgctgcctgtcttgaggaccacattttgggaaccactgacctattaccatgaaaccattctctctacaatgagcagaattcttttttaaaaagttagctaaaaacaaaaaatagaccttatgatttggctgtcaccactctttaggaaagcatgttctaatttactgggtcaagaactgaaggaaacatttcttctataggagatcatagtaaagcttcttcttgaagtcttacaaatgttgtatttatcaaatggagtgttaaactattcgaggtttcatttatatttgggaaaactcttgttaaataaaacaggtagaagagccctcttaaaatccctgaagaatgtatgacacaaatttctatcattaatatataataaagattcttttttttgtattttgtttgttgttgttttttcctgtattatattttgcttaatctccctggctgcataattgagttacctttatttttaacttttactttaggttcagagatacatgtgcaggtttggtatataggtaggtacatggcgtgtcatggaagttaggtaaacagattattttttcacccaagtaataagcatagtacccaataggtaacttttcagtcctcacccttcttacacccaccactctcaagaaggccccggtgtctgtggttcctttctttgtgtccatatgtactcaatgtttagctcccacttacaagtgagaacatgcggtgtttggttttctattcctgtgttagtttgcttaggataatggcctccagctttattcatgttgatgcaaggacattgtattagttagggcgctcttagagggacagaactatatatctgtagatctacatatatcctgtaagtattaaattaatacttaataaaatataattattaagttaatatttaataaactataagtattaacttaatacttaataaactccccttttacatataaaacttacacgatcacaaggtcccacaataggctgtctgcaagataaggagcaaggagaaccagtccaagtccccaaactgaagaacttgaagtctgatgtttgagggcaggaagcatccagcacgggaaaaagatgtaggctgggaggctaagcccatctctccttttcacgtttttctgc

SEQ ID NO: 96646 - DNA, 37997 bp, Homo sapiens
tatctatacaacagtcacatttacagtgacttaaaaaaaatgctctaacgcttctgagtcaccagagaggacagggtatcatagttcaccagaaagaggaagatcctggcaaggttaaggatagaaaggaaatattcttgtcctcatactctctcctcagcaactcctaagggctgttggctctcaggaggtggagagtgacctagttttaaggacgacatatatagtatgacatgttgctcttttggaagggaaaaatataattgtaaaagtcaaccggccgggtgtggtggctcacgcctgtaatcccagcctttgggaggccaaggtgggtggatcacgaggtcaggagttcaagaccagcctggccaagatggtgaaaccctgtctctactaaaaacacaaaaattagccaggtatggtggcgggcgcctgtaatcccagctgcaggagaatcacttgaacccgggaagcggagattgcagtgagctgagactgcaccactgcactccagccggagcgacaaagcgagcgagactccttctcaaaaaaaaaaaaaaaaaaaaaaaaagagtcaaacattcggctgggcgcagtggctcactcctgtaatcccaacactttgggaatccgaggcaggcagatcacctgagatcaggagtttgagactagcctggccaacatggtgaaactctgtctctattaaaaatacaaaaattactcaggtgtggtggtgggcacctgttatctcagttactatggatgctgaggcaggagaatcgcttgaacccaggaggtggaggttgcagtgagccgagattgtgccattgcactgcagcctgggcgacaagagcaaaactctgattcaaaataaaaaaaaagtcagccattcaaaataattgcaaatttccccttcaaggacttaagatataaccatattatctgaaattctcttttaggaggcttcacttaacctaaatccattcactcattcaaaaaacatttattgagcactcagcatgtactaggcactgttgtaggcactgggaatgtaactgaactccgttctcatgaagttcacattctattgagaagagacaggcaggaaaggggaaggaaggaaagaaggaaggaaggaaagaaggaaggaaggaaggaaagaaggatggaatgaaggaaggaaagaaggaaggaaggaaggaaggaaagaaagatgtgtctgaggaaaaatgaaacaattaagaggatgggggatagggatgctattttatggagaatcatcataatgaggatagtgaattcaggtgatacttgagcagagaccggaatgaagtgagggagtcagtcacatgacaatgtggaggaagaacagatgctaaatagatggaaaagcaagtgcaaagttcctaaagtagaaacatgcttggcttctttgaagaacatcgggaaggccagtgtgatacagtgagaaggggaagggtggtttattgagatacttgcggaagttgccaagtatccagagccttataggccagggaaaagactctgaaatacgttgggaagcaactggaggattctgagcaggagagtgacctgatgtgacttacacaaaggatcatctggttgccgtgtacacaagattctgtaagtagcaaagtggaatagctcattaaaacagtaccactgtaatctagacaagagaagatggcgacttgaatagagtcgcagcagtggaggtactgggaagtaataagacatattttgaatgcagagccagcatgacttgcttaaagaatggatttggtaggctgggcgcagtggctcacacctgtaatcccagcactttgggaggctgaagcgggcagatcacgaggtcaggagatagagaccatcctggccaacatggtgaaaccccatctctactaaaaatacaaaaattagctgggcatggaggtgcgtgtgtgtagtcccagctactaggaaggctgaggcaggagaatcgcttgaatcctggagtcggaggttgcagcgagccgagatcgggccactgcactccagcctggcgacagagcaagacttcatctcaaaaaaaaaaaaagggatttggtgggtgaaagaaagtgaggagtgaggagtagggactatcctaaggtttttggtctgagcatctagaagaaaagagctgccatttactggaatggtgaagactacaggacaagcagacgagggtgtgtgtgtgtgtgtgtgtgtgtgtgtgtgtgtgtgtgtatgagttgaaagttgtcacctggcacggtggctcatgcctgcaatcccagcactttgggaggtcgaggtgggcagatcacgaggtcaggagatcgagaccatcctagccaaatggtgaaaccctgtctgtactaaaaatacaaaaattagctgggtgggcgtggtggtgcgtgcctgtaacctcagctactcgggaggttgaggcaggagaataccttgaacctggaagttggaggttgcagtgagccaagatcgcgtcactgcactccagcctggcaacagagcgagactccgtctcaaaaaaaaaaaaaaaaaaaaaagaacacgaaagttgtcttgtacttacacggcctattaaacatccaaatatgtagattggtgcctgccacatagtagatgctcaatatttatcaaatgaaaaaggtaagatattgagtaaggcaactgaattaaaaaatccaagtatatctatctactattaactttatatatttaagtatatttactcttatgttttgcaaccacggggactcatcagaatcctttactttttggtcctggaagagatattggagatcctccaactcacatattctaaattaaggaccagagattaagagacaagtgatcagggcaagcacatttatgctacagctagaacccgacatcaggctttacgattcttaattcattgttccacactacaacaagctctccttgccccaaacgttagtgctaacttcctatgtccagtgaactactcttttcaaggagtatattggaagggttctccttacagacactgactagttggaatctatttcacaaagcattaaacgcaagtgagaacttctatacatgaagtagtcttttttttttttttttttttttgagatggagtctcgctctgtacccaggctggagtacagtggcgcaatctcggctcaccacaacctctgtctctggggttcaagagattctcctgcctcagtctcccgagtagctgagattgcaggcacgcacctgtagtcaaaggtgcatgccaccatgcccagctaatttctgtatttttagtagagacagggtttcaccatgttggccaggatggtttctatctactgacctcgtgatccgcccacctcggcctcccgaagtgctgggattacagacaggcgtgagccaccgcgcccggccagtagtcatgattttcaaccctctggcaacatgttcagactggtccgaaacagcaatgatatttagatgtgcattatacagataatatatattacttgacaattatgttcgcaaacaaatacattcttttgtatctggaattggtgggttcttggtctcactgacttcaagaatgaagccgtggaccctagcggtgagtgttacagttcttaaaggcagcgtgtccggagtttgttcctcctgacgtccggatgtgttcggagtttcttccttctggtgggttcgtggtctcactggctcaggagtgaagctgcagacctttcccgtgagtgttacagctcataaaggcagtgtggacccaaagagtgagcagcagcaagatttattgcaaagagcaaaagaacaaagcttccacgctctggaaagcaaccccagcaggttgccactgttggctggggcagcctgcttttattctcttatctggccccacccacatccttctgattggtccattttacagagagcccagtggtctgttttgacagggcgctgattggtgcgtttacaatccctgagctagacacaaaggttctccacgtccccactagattagctagatacagagtgtccacacaaaggttctccaagtccccaccagagtagctagatacagagtgtggattggtgcattcacaaaccctgagctagacacagagtgctgattggtgtgtttacaaaccttgagctagatacagagtgccgattggtgtgtttacaatcccttagctagacataaaggttctccaagcccccgccagactcaggagcccagctggcttcacccagtggatcctgcaccggggctgcaagtggagctgcctgccagtcccgcgccgtgcgcctgcactcctcagcccttgggtggtcgatgggactgggcgccgtggagcaggggtcggtgctcgtcggggaggctcagccatagccggctgcaggtcccgagccctgccccgcggggaggcacctaaggcccggcaagaaatggagcgcagcgccggtgggccggcactactgggggactcagcacaccctctgcagccgctggcctgggtgctaagcccctcattgcccggccggcagggctggccgtgcgctccgagtgcggggcccgccgagcccacacccacccggaactcgcgctggcccgcaagcactgcgcgcagccctggttcctgctcacgcctccccctccacacctccccgcaagctgagggagccggctctggccttggccagcccagaaaggggctcccacagtgcagcggtaggctgaagggctcctcaagctggccaaagtgggagcccaggcagaggaggcgcccagagcgagcgagggctgtgaggactgccagcacgctgtcacctctcactttgactaggtctgtatagttaggaaaatactcgacttacagttagccagcaaacttttaacacaatactttttttgctatgaataaacatctacctggtctttggcctgtaagaacttacattctacttaactttcaacaaaccaagtattgagcatccactgtgtcagtgtactagacatggtaaacaaaaatggtgtctttaaatcaagtaaacagacaaaaacaaacaaaataatttttagaaaataatgcaattttttaaaaagtgcaaacacctattgaaaactatggctcgggtaatgctagaatacaaagaataattagatttttgtggaattttcaggaagaggtttcctgaatgaatgagcgagtacgggttttaagaaaacgaatcagctatggcaggcaggatattctaggcaaggaaactaaggcactagaaaagctaaagggtagaagcaaatcagtcgtggcatgagtccacacccaggtgtaatagaactggatcactggccaggcgcggtggctcacccctgtaatcccagcactttgggaggccgaagcgggcggatcacgaagtcaggagatctagaccatcctggctaacacggtgaaaccccgtctctactaaatacaaaaaattagccgggcgcggtggcgggcgcctgttgtcccagctaggcaggaggctgaggcaggagaatggcgtgacctcgggaggcggagcttgcagtgagccgagatcatgccactgcactccagcctgggcgaaagagcgagactccgtctaaaaaaaaaaaaaaaaaaaaaaaaacgaactggatcactgttattaagagtggaggagggaacctccactcttaataacttccacttgtgtttagtgagtggcgttaataactccacttgtgtttgtggctgcaaacacaagccaaagcagcgcacaattgacatctgaagcccaatgaatgtgatcaaaacaaagcacttaaattttgtttggatttgctgccactagtacacatcgtaaaggcagattttcacactcatacaattttctgcattcttcagtatctgtcagcgtgttcaaatacttttaatacacaacttttaatacacaagacacactttggaaaactttttccgaagaaaatgatccaaagagcagaatgygagtcaataaacggagaaaggcaagcagcggttttccatcttctgcgccagtgtgctgtaaacttttaagtccggaaaactatgttttaaccgatgagataatgcctttcaaagtgattagcacgaccgggcgcgcggtggctgacgccagtaatcccagcacttttgrgtggctgaggtgagcggatcaccctgaggtcagggtcgagaccagcctggccaaaatggcgaaaccccgtctctactaaaatacaaaaatcagcgaggcgtggtggcgcccgcctgtaatcccagttactcgggaggctgaggcaggagaatcgctttaaaccgggaggcggaggttgcagagccaagatcgggccattgcactccagcctcggtgacaaaatataataataataaaattaaaaagggcttagcatagtatctggccagtaagaagaaattatgattattattttgaccttagacctctcttaactgtctgaaattcgggtttcttaaaggacacaggcggtctctgaggctcccgccagcggaaacaatctcccattaaaataggcawcggttaaatatttgctgaacaaagtaaactacgtctccccgaatcccattgagcgcctactcgagatccggaccggagccgggcaggacgggcccgtcggtcccacacgccgtataagtgggtggagaataccccacacgcccagaccaataggcggggtgaacgaggaccgtgttcaccaactcagcccggctcgcggaatgcctyctgttcgcctccgggcttgcagtggctttccgtcgcaggtcaggccgcgttccacttccgccggcagtccagacacgcccckccgggtccaatccccgcccctcacacacctggccccgccccgtygggagctcggcggtcctctctgmgctaggtcttmttagcgcccgacggggccacgcccatccccgacgctctgaggtcacctacagggccgaccctcggtgggcggagggacggagggaagatggctgcagagaccggatattggcgctgcctccccgaatcccggacctgcgctgaggaggckgttcatctgtggccagcggtgcttcgggacccgcgctgggggaaccctggcgacggggcctggccctgctatatgcgggggcctcggctggagtgagcggcgtggacgcctctttcctccggctcttcccttgttgctgcgagagcgagagggccgcgggcggcggaggcagcggggccgggatggaggacgttaactctaacgtgaacgcggaccaggaggtgcggaagctgcaggtgccggtgaagaagctggggaagcagcacgaacagccgaggagccgctcgcgctgtgctgggccccggctccatcgcggttcgccggctcctccactccctcctacggcgcggggtcccctcggggcttccccttgggtctcagcgcaaagtcgggcggcggggccggatggacccgaggmggacgaataacgaggagctgcgagacgccaccttcttgctggcggcgggggagggcggcttgctagacgacctggagcgtctgtcaggctaggaggagggggaggagagctggtgagcgccgggcgccgggcggggctgggcggggacgccccggtggcggaggacgtcccggaggatccctctggtcgggcgcctggctttgtgtagccagccaggtccgctctcggcgggtactcgtggtcttgctctggcagaggggaggtcagttggagttgggggttcgaggcttgcaagtrcagggcttgtagctccttctctggattgtggaccctctgggtgctgggccctattggggttggtgggttggttggatccagaagggctgttcgccgtggggaggagtcggaggtgggaaactgctttgtaggcagggattctgctttgtataggagaccagctttcggatgctggtctgggcattttggatgttggggaggggtttggcttgatgaggtatcaccaagttcggggggtgcagaccaaagtcgccgacgtctatgcagcggttggtgtttgggatcaatttctagcgtggatggggagaccatgtggatcagcactcccctttaggtagtggggtaaagcttgctctgtgtgaagaggtcagaggatggtggtgttttgtgtgaagaatcaagggtgaaacaagagccctggctctgatattttaaaacaagaattgagtctggcattttgcagagctctgaattgacatttatcacatctatccttcatttccatgtcctcctatgggcagaaaagagtcctattttaatacctaaaccaaagctgtattgtcataagccacttcttgatgaaattgtgacacacaccttaatatcactttcataaataggaaatgggaggcttttctcctcattttattataaagatgtctgtgggaaattctcttaattcatcctctttaaaattttaccttttagctaaaatgtctctgttgaaattcaaatttctaacttagtgaaatcgaaatcattcatagactgtagtattgcagggctcgaactgtgcagtgttctgaggtagttaagagctttgctggattcaggccctgggtttgcccaggcctgtatgaccttgagcaagttattctgagcttcactttcttcctctatgatggagaaaataatgatagcacttacctctatagagttatgaaaatttagtaagataatccatgtatgcatttagcactgttgagatcttggcttactgcaagctccgcctcctgggttcacaccgttctcctgcctcagcctcccgagtagttgggactacaggcactggccaccactccctgctaattttttgttttcgtatttttagaagagacgggtttcaccgtgttagccaggatggcctcgatctgacctcgtgatcctcccgcctcggccttccaaagagctgggattacaggcatgagccaccatgcccagcctattactcttaagcctagttatttaaatcaaacatttagtgagctcttacatgatgttataggagactctgaagattctcaactgttgattcctgttcataaggcagttatagtcttgttgagaactaagttttatgcagataaataaactagaaagtgtatggtgaattgccgaaagagagaacaaaagtactgtcagtgcgcagtaactgggaagaaaacagtagtccaaagtagaggggccaaactttgaggaggaggctttggagtctggaagtgaggaaagagtgggaagggcattttatgctctgacagctacaagagcagagtcagagatatttgtaactcccagttaggagatttgaataacagaagtactcttgagtatatggtgacaaacctttattttttatttactwtttttttttttttttgagacggagtctcgctctgttgccctggctggagtgcagtggcatgatctcagctcactgcaacctccgcctcccaggttcaagcaattcttctgccccagcctcccaagtagctgggactgcaggtgcccacccccatgcccagctaatttttgtgtttttagtagagatggagtttcaccatactggccaggctggtctcgaactccagacctcgtgatctgcccgccttggcctcccaaagtgctgcgtgagccaccgcacccagccgacaaacctttattaccaggtgatatcaaatattattagagctgactgtggtagtgacagtttttcatataaatgaaattgcatcctcccaaaggaatcctgagtatgtatgcactttaaaagaacccagaatcatctaaatattgtcacatggctcttgcaagtgatgataatagtgatgcttataataatgaggattagctgcactcatcagcctgtagaaagtaaaaagtttccttttcgaaatttcctttcttgttaaagaataaatcataagtgttagaaataatagtttcttttaaagactaacttccttcmagcctcctctgctctgtgctaatractcttcrttaagccctatcctatgtagctgttagatataagggaataagtatattctatgtccttgtactttaaccaagatatttgtgctggacatgctcacaggcacgttccagctygcagcctatgccccttccttatttggaaatattattacttttctaagtcyttttgcaagcaacttcytcwtttcctttgttctctrttgcctttccctatwtaggaaagttttaagttrttagccagtcgggtttaatttaaattgtgaggtccagctccagccaatggagacaggacacaagctgcataagggataaaaaytgcttccctcctttgttygggtgtgctgtcaccattgtttcatctgtgaggagcaccctttctgcagaaagtaaaattgccttgctgaaaaaactttttgtctaaatgctggtttttccttgcagtacctaggagcaagcattctgtttctaaataaacattttacttgtaacaatggcggtggcctgtacagggagccattctcctccgggggtgggggggtgggtctctggtcctctctcatgaggaaggcgccccactgccttgttgtagcggcctcagggtaaggaatcgagacccaccagttatgacaaataaactggactctcagcaatgtggaaagaaaccggctggtgacctggagtaaaagatcctcacataccacctggaccaggcaactctgcacagaccaagaaaggaaatgccaggsgagmcagtaaaatacttccttggtggtcaggactaaggaaaaagaagccacagggcagtgaagcattctttggttgggacataccaaggtaaagcattccttaggactaaggaaagaaaagccgcggggagggggggcgggggtggtgaagtattccttagtcgaggtgtcttggaggttaaaaagaggtgaaaaatccccattagggggagattgaacctcacagaaacttccggtcataggaaaaatgttcaaaacttccctttcccctmttcttgggggaagaaagaggcaagggaaagagcagcagagaagaaagagaaactaggaaaggaagtcagagaaagcaagagcagcgaacgtggctccacattgttgtggatygctggcacctggcagagcggcrgtggctgagacactctcctcactcccggccgagccagccagagccagccagagccacccaggctgctggcccccgagccccgcaccttccgtgctgctcgggtgcrtcctgccaccctcagaggctagctggccacggacacctgcaagttggagccgagtgggagacaatgagcgcaccggagccaggagcctgtgccacgcagccaggcagccaggcgcgccagagggtgggtccctctccccagcctggctctgtgtggaagagggcagggaccggtgccgggaggagagcaaaggaggcgaaggggcatgactcatgcaacttggggcaggcgtctatctgcctagccgctaggccggcggcggtggcccggactgtggccatgcagatcccacccagcccagaagactaagtgtaagagaaagaggaaacgggatgacagaaaaagagcccaaatgagagggagagaataagtgaaagactgaaagagacagagatcaaagaaagtcacagaaggtaaaacgggagagaaatagtgtaaaaggtagtcaaaaagttgaggcatgttaaagattgtgaaagtcgaaaaaaatgttataaaagggaatttatgcaagaaatattgtataatttaaaagtttttagccatcctgaatataaaactattaaacagtttatgtgcaaagtatgtaaagaaagtaaaatatacttttagtaaaagaattataaggaggcataagaatatagatttttacctacattaaaagattaaaaaataggtgctaaaaaaattcaaaaggaaaatgaatattgctaaaccaaaaagaaatattatccaaacaccttattaaaaaaaaaaaatcttgttccaactgcatcaaagaacccaggccggggccctctaagctcaggcttaatgccaacgagttttcacctccagccactcctatagaggctgcagtgcgagccggctggaggacctaaccacagacagacacttcctgtgtgggggagggggcygggcaaccattagacagacagcccagcccaaggccaggggccagatggcggggtctcagggaggagcaaggtccaggggcagccrggtgaatcacaaggcccctcatcccyaaggcctcaatgcgtgggagtggtgagggccagaaggaggccaagaccttaagaggtggtggggctgcagcgtyccctaggcagcactgagccggggtggagcgggaggcgtcaccatggggcctcaagccccaggatatgcagagttctgacaaaataaggagccccaaagggtccctcagagacagcataagtaaaaacaaggaaaaagaaatttcttagcaaaaaggcactacggactataaagtcaaaaagatacctatgggttaccttacttacattccactgctgatgyccccacatytaaaacaaaagatcagtttctcagaaattatatacttccactttcccttccctcagaactaaaagtcttttagcacaggtaccacccctagaatttccagtacactagcaccagcctggggaccacgtcctcatcaaaggatagaaagaagaaaaactggagccagcctgggaaggaccctaccttgtgctgctaaccaccgagactgcctttcgcacagcagaaaaaggatggacacatcatacccgagtcaagaaagtgtcatcaccttcacaatcatgggacattgttccaaggtcaagccctaccaaattaaggctaagaaaactttatctttttctttttcttccctttaactattccccatcttattattaatgtaactagatctaactcacctgaasttattacttttgatgcctgtttagttacaccttgtgaagatttaaataaccaaacacagcttactacttcagaaaaatatctctgtccctcttggacttccttagtttagaaagacataataarttcctataaggatactaataatccagagaatagtagctatattaattggtaggaattgkacttttgtccctctaaaacaaaatctctatattctgcttggtctaatatcctatagaacactagaagtctaaggtggactgcttccagaggtctttgtccttaaaaccatatatccatttcaccaaaagagttgytctttctagctgtcaacataaccagtgtaatcctatacagcttactattactattgcaacatctgaaaactcctccccttcattaagtcataatatgggaactgacatttcagaaaaggatcctaaaggaatttttaaaataagctttattgctccttcaacctctccatcaatcactcctcccaaacatagtgtcaaaaccaaagtctctgtagtagaagtaaaaaatctaaggcaaaccatagcaattaagacagggtatcaggatgtagatgcctagctaaaatgggttaaattttccctctgcactctaaataaaagccattattatgcttgtgcacacagtaggccagaggctcaggttgtctcctttccactcagatggtcctctaattaacaggacatggactgcatggtagctctttttcaaaatcctacagcctaggatagtaaactgtgccaaactctctctgctgtttcctaaagtgcagtaccccaagggccattcagcctccatcttccaagaccaattttatctcrtgtctccaatgacaaggggaaaatttggcattccttggagacttaacaggatgcagtaaggtcaggcacttccaaaagctgacccatcagtccacccttattcatccccaagcagatgtatggtggtattataaaggacctttgctgggcactctgccaaataattaaagcagtacttgctctctagttcgattggctatccctgttgccctcacatttcatcagccataaaaaccttttcttttaaaaactcaagcaaaacaattaagccaaaacacgtttaaacaaaaaaaaggtttaaagaaaaatacaaaatcaagaggagggaattgtagaaagtaaaaagtttcctcttaaaaatttcccttcttgttaaagaataaatcattaagtgttagaaataatagtttcttttaaagactaacttccttcmagcctcctctgctctgtgctaatractcttcattaagccctatcctatgtagctgttagatataagggaataagtatattctatgtccttgtactttaaccaagatatttgtgctggacatgctcacaggcacgttccagctkgcagcctatgccccttccttatttggaaatattattacttttctaagtccttttgcaagcaacttcctcatttcctttgttctctgttgcctttccctatttaggaaagttttaagttgttagccagtcaggtttaatttaaattgtgaggtccagctccagccaatggagacaggacacagtagcagggacaagctgcataagggataaaaattgcttcyctcctttgtttgggtgtgctgttgccattgtttcayctgtgaggagcaccctttctgcagaaagtaaaattgccttgctgaaaacactttttgtctaaatgctgatttttccttgcagtactgaggagcaagcattctgtttctaaataaacaytttacttataacaagcccactttaaattatgwattagaacacattgagtccacttggaraagccgattaagtcttgggctgctgtggttcctgagcatgagctttgttaagctttgtcaagtcttcctaaatactatgccaggagtttcttttgaccagatgattcctgcttattgctttgatcctggcttcatatctagatattatagatgtcctacactttttctgagaacatttgtgtgaattgaaagttggataaatcatatgtaaaatgcatgaggcatgtgtgtagggtmaaagttayagggggtggatgtcagtggcaggaagattcaaagttgagatgtttttcttcttagcaagctaagaatctaccttctataacttctagccattgcatcttctttttcatctagaggaatgtttcctccagagtgtatatgctgcaaagtggtagttctgaagatgtcaataaataccatgtaggaaaaaaaagtgggtgggttctggagttgaataaatgtgggaaaaaactggattcaagaaagataaacaggtttctttaatgctgggctcttggagatgctaatgtgtactgaacatagtaaatctctagggagtatggtttgttcctaaatctaatcgagctcccaaggaactagtatcttatagaacacacatagaaaatagtgctctacagtagtcactttcacatttttttcttggatccaacttcatgataagaaatacattttaactcataatctattcacatgtatatgaataactgaaacagaagtttcacaaaattatgattatgtttgccacaaatggtgtgctctaatattttccttctgtttcatcagaagaaaaatactggttactatccagctaagctgattttgtgacccattaatgagtttcagttctcactttgaaaacactgttctagaattacagaaaggtctagggatgagaactaacaccactgtgcatcacagtgtgtcagtctgtgccaggcagcttataaatattttttgcctctaatttttatacatttatgaggtaagtatcattttctaggtaaggatgctaatctgtctccaagccaaataacacacagtaaatcatggcaccaggatttgaatctgggtctttatacatcatagcccatgctgttctcactgtattttgctttttccaagtataaccccgttttcacacgaatggccccttcacatatttgaagactaccgtcrtgtccstgctgaccctttctccctgccacacatggtgagcattcccttctcttcttcagagtcaataatcccagttagtttaaccattccttagataatgtaattctctgatccttcaaccgtggttattttttcttaattaacccttaattgctcattgtcattatacattgtgcccagcattttagatgatatttgaccagacagagtgtggtgggtatgagccaaatgctggtttgttttttttttaaaccaaatatttcattaacagttttaacttctgttacttatgcttaatatgaaccagaagtgtcaacttctctctaaaatgttttatacataagatgttaaactgagtctccctaatcctgtttttgtgtagtggattttttttttttttagcttaaatataaggcttttatttttattttttatttttttaggtgtgcttaaatataaggcttttaaatttccttttgttagtttttatttagacatttaatacactttctatttggtcatctttatatttggtaggcatacctactatgtcttcattcaaattgttgataaaaatattgacagaataaattactcagaagtgtgcaagtcagctagactcactttagattaacaccagtccattaatcagcacacattatggttgttcagtaacaactagttctgtctattattgtcaggcccatatgacattttatgtggatattaggaaagattttgtcaaatgccgtactataattaagctatactgtgcctataagattctcacctacagcgaagaatactacattactaacctttgaaaataaccattgcagttgattcggttgaacttgttcacggtgaatcttctagctaggattccatgtattcacttttcctttcttaacttccaaacattmtttttaatctaattttgaattttgcaaggaatcagtttggtctggactttctagacactgcttatttttctcatgagaaattctcatatttccttttatccagacttttgatcctaccaatgttcaccataatattagtgataaaatttctgttcctttccatcattgggagtgatatgcctaaacccatgtcaagctacatcytggctcactggatacgtttatgaagatgctttaaactcatactgacttctcaagaataacctttgttgataaatgtcccaattcagagacaggtagctctgtggtttttagtcttttttgtcacttgtggctcttcactgctgagagtttatttattacatgacttctttgttcatgtatgctttttgtagagggccattggtaaaatttgcctgtaatttaatctgataagcctaagttaataaagcaatttgtgtacttatcaccayttatctgagtagtttggcagtcattcactgattaacatactaacatcttgggaagttttatgttttctagactcttctgtaccaaggagatgttactttaaagtaatgtggtttctttgtgtgtgtgtgttagactaatcagctggtttttttttttaagacagggtcttgctatgttgcccaggctggtctcaaacacctaggctcaagcagyctgctcaccttagcctcccaaagtgttaggattataggcatgakccaccatgtctggccctctattcccttgtttgcagtggttttccagtcattctaaaatggctttaatattttttctttaatggaacaaattcttggagtacctgtgtgcagcacagtgttgggaatactgagagacatgataatgcaagttctttttctttttttttcgagacagagtcttgctgtgtcacccaggctagagtgcagtggcgcgatctcggctcactgtaagctctgcctcccgggttcacaccattctcctgcctcagcctcccgagtagctggggctacaggcgcccgccaccacacscggctaattttttgtatttttagtagagatggggtttcaccatgttggccaggatgggctcgatctcttgacctcgtgatccacccgtctcggccgcccaaagtgctgggattacaggcrtgagccaccacgcctggccccaggttcttactttcttaaaaaatagaatttagccaagcaaggccccatagttggtaagtctattacagtcactattatgtgcccatgttttatatgccaagtgttgtgtaagcagcggtcttcaacctttttggcatcagggattggttttgtggaagacaatttttccacggactgggggtggcagatgggggttgatttcgggatgattcaaatgcattatatttattgtgcactttatttctgttattattacagtgtaatatataatgaaatcattatacaactcagcacaatgtagaatcagcgagggccctgaacttgttttcctgcaactagatggtcccttctggggttgatgggagattgtaacagatcatcaggcattagattccaataaggagtgcccaacctagatcccttgtgtgcacagttcacaatagggctcatgttgctatgagaatctaatgccaccgctgacctgaagaggtggaactcaggcagtaatgcaagcaatagggactcgctgtaaatacagatgaagctttgcttacttgcctagctactcaccctgctatgtggcctggttcctaacaggccgctgactggtactggtccatggcctgggggttggggacacttggtgtarggcattttatttatttttttcgagacacagtcttgctctgtcgyccaggctggagtgcagtggtgtgatctcagctcactgcagcctccacctcccaagttcaagcgattctcctgcctcagcctcctgagtagctgggattacaggcacacgccgccacgcctggctaatttttagtattttagtagagatggggtttcactgtgttgcccaggctggtgtcgaactcctgagctcagtcaacccaccaacctcagcctcccaaagtgctaggattacaggcgtgagccatcgcacccggccacacttttttttttgtttaattgaggtagagactcgctctgttacccaggctggagtgcagtggtggaatccacagctcactgcagctttgacctcccaggcttgagtgattgtgttacctcagcctcttgagtagctaggaccacaggtgtgttacaccacgcctggctaatttattttttatgttttgtagagacaaggtctcactatgttgcccaggctggtcttgaactcctgggctcaagtgattcacctgcttcaacctcccaaagtgttgggattacaggcgtgagccattatgcccagctcctttacacatgttaaatcatttaaagtgtacaattttgtcatacttactatwctttttttwttgtaaaatgtacataacaaaatttaccatgataatcatttttaagtgtacagttcagtggcattaagtacattcacattgttgtgcagtcatcaccaccatccatctctagaactttcatcttcctcgattgaaactgtatacccattaaagaacaattgcctgttcccatgacccccagcccttgacaactaccattctactttctgtgtctatgattttgaccactctaggtacctcatataaatagaatcatacaatatttgtttttttttgtgtctggcttatttagcattatgtcttcacagtacatccatgtggtagaatgtgtcatgttatccccattttagagtaaaagaagctaagcccaaagtcacatagctaataaagtgaagttgagattcacaccaaacctaaaagtcatgtctaatgaagaacgtttgaccttgttttatttagcctatttagcttgggaagagaactttttgaatatttgaaggactataataaggattattacttatataactcctcatcattacactaataggtgtaaattagaggcaggaaaattttgatttagtagaaggaaggattttctaatagagctgtttttrgatgatatggactrctggaaaaaattgttggaaataatcttcagaagactgccaaatgttcctgtggcaggggatgttacaaagaartaaaaaagttgagttatctgaattctaagtgttcttttaattctgttgtggtctgtgtgggagcataagatagcttcaagagaaagtgctaagcttaagtgtgggagagatctttagcaatggaagcatcatggattttttatttttaagtctgtggcacatttctctgaatatcctcagtaatggccarttgttttcttcttgagggtaggtttgaattttgaaaaccattagaagtccttatcatgcctggtgaataaaaatggattagcaagatacttagaagtcctcagcagtccaatgccaatttgcctttttcctagatttacttgcttttcccagaacctttatgaacatttatgtcctttggcatttgatgttcatcccttttttctcttcctcttaccaaaattttccttattcttcaagcacgatgcagattttctttcctttgtgaagttctgaacttttaacttggtttacttcctctttaatgttaacctattgagtgaagttctgaacttttaacttggtttacttcctctttaatgttaacctattgagtgaagttctgaacttttaacttggtttacttcctctttaatgttaacctattgagaggtgaagccagctggacttcctgcctcaagtggggacttggagaacttttctgtctagctagaggattgtaaatgcaccaatcaatgctctgtgtctagctaaaggattgtaaatgcaccaatcagcactctgtaaaaacgcaccaatcagcactctgtaaaatggaccaatcagcaggatgtgggcggggacaagggaataaaagctggccaccccaaccatcagagscaattggttcgggtctcctcccacagctgtggaacccttgttcttttgctcttcacaataaatcttgctgctgctaactttttgggtctgtgccacctttaagagctgtaacatttaccgcaaaggtccaaagcttcattgttggtcagcgagaccaagaacccggtggaaggaaccaactccggacacactatcactgtttatatatcctttcttagagtatatttaacacaaccaccttgtactttggtctgtgtagtctagattgtgagcaatctaagcaggaggacagtaccatattcatgtttatgtttctgaacagaaccacagtatagtaagacttcagttatactaattkaaatgaaatcaatctatcagtgatgttaggttaaaatgaggtgaaactgtaaactgagaccaaatttcttacatgaccgttatgccagttacagatgaggaatttcacacagattctgaataatggcagtattgaatctcctttcccatgatgaattaaaaaagaaaatactgtctagatctagtgtctgattttaaaagtcrgttttagaattaaccaaagtactggcatggctctgttttgtaggattacagaagcactttgttttaaagtgctttgtactttttgtgatttccaagttttctctcatgaatatgaattgcttttataatttaaaaaatcctactgataaaatttgtcagtttcattaccgcgtggtcatgtagggatcataatataacctgatacattaaaagccattgatgttttccttgttacttagtgctagtaagattatacatcacagatggagaaattttggtttcaataagtttagataatgcatttttgatagaattggaacccaagacagctgatatgatcttatgatctattatacttgtttgttttaaatttaacaatttaattggacaaaaraatttcttgaatttgatagcacccacgaccaaaagtggtttagaatgcctcttattcttgtttttaacttttcatttatttatttatttagagatggagtcttgctctgtcgctcagactggagtgcagtggcctgatctcggctcactgcaacctccatctcccaggttcaagtgattctgctgcctaagcctcccgagtagctgggattacaggcgcctgccaccacatccggctaatttttgtacttttactagagacggggtttcaccatgttggccaggctggtctgtaactcctgacctgaggtgatccatccgccttggcctcctaaagtgctgggattacaggcgtgagccactgcgcccggcctaackttacatttagaaaatgaaattgcgcaagtgtaactattaaaatgtttatcgtatctacctaaataaactatgtagtctgttttcatgaaaaacgacagcaactttgttttttaggaatatcagataaggaacccaaaacagtattgctcacatcctgtgaactttctggatcgctgatgttgctgctgctgctcagtcccatctttgaggccaccctgcattcaaatccctgtgccaaattgcccagggaacccggtcctggtgccctggtagcccaaaagggctacttgccttctccttccacttacccagacccctgcctcccttacccttctgctaggaacatgtctacaactatataaattcgtgtaattttgacatgatatttgaaaaagacaatttgggcagtaaatagcagaatyaagtagtgtcttaatgtaaatggtttgtgttaccacaatayactgttctagccaaagcacattgcatgtgactcctgttgcactagtttttagtagcaaaaatgaacctgtaaaagaatgtaggttttaaggctttggtaatataagttatttctttcttatttatttatttatttttaagagagtttcattctgtcgcccaggctggagtgcaatggcgcgatctcggctcactgcaacctctgtctcccaggttcaggtgagtctcctgcctcagagtctggagtagctgggaatacaggtggctgccaccacgcctggctaatttttttggtgcttatttttagtaaagatggggtttcaccatgttggccaggctaacataatacttctttgtaaaaaaagtttttgtaaatgttttatgtaaaatgttttatatgagcatacatatatgtacatatatgtacatgtatgtttatgtattttatatatacataaaaatcttgcatacatatatttacatgtgtatatgtaaaaacagtacatggtggtaattctgcaactttttttatccaaaggtatttaaaatagtattattaaaagtgctatgtatattctaatgtatgtaaatgctgtagagtatctggccatttgtggctgatagctgtttaggttatttcaggtttgttatcacacacagtgctttattgaatgtcatttttcctcatgcatgtgtgtagttttctagggtggatgttgggttgtagatgctgggtcatggtgtacgtacattttttcatttactaggtccttgccttccaaagwggctccaccaagttacactcccatcagcagcttgttagagtatccatgtctccctaccccagctgactaatgttagtttgtagcaatctgttatactttccttaatttgttgggctaaaaaactgcagagtttatcttgttttaattcttgtttcyttgattcccagtaaggttaaatatttttccatttgagcatcttttcatatattaactgatcatttgtaaatcttatgcagggaattgcctgtttatatcctttgcccattttcctattatttggtctgttattgatttgtaggaattctttgaatattctggatacaaattatttttatatatgtggcagttatctttagtttgctgattattaagattattattatttttttgagacggagtctcactctgtctcccaggctggagtgcagtggtgcgatctcagctcactgcaagctccgcctcctgggttcacaccattctcctgcctctgcctcccgagtagctgggactacaggtgcccgccaccacgcctggttaattttttgtatttttagtagagacggggttttaccgtgttagccaggatggtctcaatctcctgaccttgtgatccacccgccytggcctcccaaagtgctgggattacaggcgtgagccatcgcgcccggcctgctgattattctttaaagctgacaatgtcttcggtcattatagccgtttaaatatttgttgcgatcaaatttattgatcttttacttgatgcctttttcattttgtttaaggccttcctgcatgatagagcttactgaagctactcccctttcttagtcatcttctttctggaacttagttctttctaactgagcctgactgaggctgggcgaagcatgtgaaatgttttgtcatgttttcttctagttggctgtgggaggctatacttgaggactggtggaaatttcagctgcaytgtgtagatttcaggtgaagrcaaacgttgtctggcacagaggaccacagatgagcctgcagagaaatactctactagtttgccggctctatgtggttttggattgtatttccaatgcctagcttagtacttggaacacacagacagtgaataaatattacttaaaaatttaacttctccacaataaattttgtgagcttctggaactcattgttagcaaaggctgtggaatcttgtctstgagaatttctagtagtaccctcatctttcgagggtggtacactcatgtaaacatgagtgcagttgcatgaatctctcccgagtgtagatacaaatacacacattgcctgcatgtgcacacactcagcctttctaaagtttccaagctctttaaaaaaacaaaaaacaaaaaacamctgaatagttcaggttgtagacatgaaataaatactcttgaagatgtcatttcaaagcaatctatgtgctccttttccagctcagatgagacattgatcttaaggaaaggaaaggcagtgcttttttgggttagtacaaactgacatggaaaactgttaccttcttttcatagtgatgttgacaaatctgctcaaatgaatgaatttactcttgaatgattcatttcaggggaaatggcacaatcacttccttatgctagtagtcagtggcccgcaagaagaggtaagagtagaggaggcactcacaactttatcaagatgtgagcactggctttaacttgcctgaaaaaactctcaagaaatcactgatcataaaacatamaatctataattttttttttttttttttttgagacggagtctcgctctgtcgcccaggctggagtgcagtggcgtgatctcggctcactgcaagctccgcctcccaggttcctgccattcttctgcctcagcctcccgagtagctgggactacaggcgcccaccaccacgcccggctaattttttggatttttagtagagacggggtttcaccgtgttagccaggatggtctcgatctcctgacctcgtgatctgcctgcctcagcctcccaaagtgctaggattacaggtgtgagccaccgcgcctggccacaatctgtaatttaattaaattttaaaagtgcccagagactttatggaaactttgtattaagaatgcagtatgtgagtatagcatagctatttggagcaccaacttggaagcagacagacctggcttcatttctgggctcaagtgcttactacctgtgtgacttatacaagtttctttctttcttttttttttgagatggagtctcactctgttgcccaggctggagtgcagtggtgcgatctctgctcactgcaagctccgcctcctgggttcatgctgttctgcctcagccttccaagtagctgggactacaggcgcctgccaccgtgctcggctaatttttattttatttttwaattttttttwatttttagtagagatggggtttcactgtgttagccaggatggtctcaatctccagacctcggacttatacaagtttcttaacttccctaagccttggttcctcatctgtaaaaacaggaaaatattgcaacctatctcctgggacttgtataaggattaaatcagttaatgtaaacaaagcacttggaacaattcctgaaaatgagtactcrgtacaagtttagggtttttgttgttagtaatagtagtattacctagcttccattgagagaatctgactatatttagtttccataaattayatgatcaaatacagttagatactagttaccatgtaaagcagatcccctaatgggaagaaacgagactggtctatcagtaatgggacttataatctctttccttattctctttctcctttttatcagcttgtctttcctgcctacctgccttcctgccttcttttgtttgtggcttctcatctctctttttgtcctcttccacatttaccatggtttcctcctgtccgctctcctaatttgaagtgctgagaggatgtgctctcacaagatctgacaggagagctagtgccatttggctgcctccagcattcataaggaaaggatggttcttaaaaaccattagtatgatcatgagatgaaactcgtgtctcttctcttgggatcacccttccttttgaaccaggtggatcttcttacttcctcccccttcaatgaagcattctcctctgcatatgctgggggagtagaaagaatgcttggcactcagctccacatgggagaaatcatatctatttaatgcatcactgtgtacctcatgcctaggacctgttgcatagaaggtaacaaatatttgctgagggaatgatttagtgaagccacactgaaactggagatttgaactctggttttcttactcactagaggtataaccttgggtaagttactgaggtactctgagactcagattccttatataatgtatataataatatatgacatgataatttattatatataatatttaatgaaaatgatatgacatgattattttatataatatttaatgaaaatgatgacattattatatataatatttaatgaaaacaataatacctacctttaatggaaagttaaaggattataaaacttttttttaaaagtgctttgcaaactgtcaaatactgtgcaactatgagagtcatgtgggaaattccaggaagtttagataggtaattctttgcccttctgaaagtaggacgtacagtcagagttggtgctttccaagtaaccaccattttaaagcttgggtcatagagttaggccaagaggtctttcttttctttgtcatccccttaccctaaataatagtctggttaatttgaggccaaataaatgggcacacagagacatatagatgattgactaagcattcagtttggcaaaggcgtttccaaaacatataaacatctagcagtgaggtgctatgatctcaagtattcatatatatccttttattaaatacgttttggggcaaaatttttctatttcttttgaatttttacttgagattttaaagtcatttagtgaaaaataaaagaccctcaagacaggcagaaatgcatgatagtgacacaggagttagagaaaagcacctctcccgaggggcccctcagtcaagctctcttaagtgctagttctctaaccttgggagtcagcctggactcctgtctctcatagccyacatccatccatcagcaaatccccttggctgcccctttgaaatgctgtaatcacttgactctgtcagtagcctcctgccagactccatggttccatcctttatctgctataatttgttttccacatagtacccacagtgatatgttacagacttgaattagatctgatcttggcctaatcagaactctccaaaatgccccttcaccctgggaacaaaagcacaacatcctgagtatgaagttacccaaagccctttatgacctggcctctacctgcctctcaaatctcattttctacgaatcccttcctgttctcatagctccagcctccttagataaactaagcacactccatcctccagtctttgcagttgctgttgcctctgcctggaataattttccgccataagttcgcctgccttccctcttcttttcgcccaggtatcccttccaaggaattcttctcctcagagaagtcttccttgatcaacccatctaagaaagtaccactatcactctctgtctccctgcccaactttattgccttcataatagttttcatgactggacatcccattgcatatttatttgcttatctgtttattgtctgtgtctgccatgagaaygtgagcttagtgaggacacggatcctgtatgctttgttcaccactgtgtttccagtactttaactgatactggcatgtggccaatgctcagtgratatttcctgagtgaacaaaggaatagtctttagagaagtgagaaagcatgatacttgcctgtatcttttttttttttccccatacaaagtcttgcactgccacccaggctggagtacagtggtgtgatcatggcccactgcagccttgacttaccaggctcaaacaattctaccaacccagcctcccaaagtgctaggattacaggcatgagccactgtgcctggctgcctrtatctttaaaaattctgaggttctgattttctttagattactgatactgtatattattttatgctttaggttttgttgaaaccaaggtagctgaatttaasaaactatcactgttcccagaaataataaggcctgaacaattcttatttactactgcattactgataggatattgaatccttatttgtatatttatttttatataatggtcttaagatacaaatagcatcattaaagaaaatatatttgaaaataacatttttgaaaggaagaaaagtcactcccatcaccctaacatatccacatgcagacattgtatgcaattataattagggtgtacataagagttttttggtgtgacatacaaatattttcaacactgtctcacatactccatgttaacattaggcattaatttctaatgtctacagaatagttcattaatttgccatatcataatttacttaaccaattcccaattgttagacaatttggttttgattttcccccttttatttatttatttattttttgagacagagtctcactctgtcatccaggctgtagtgcagtggcttgatcttggctcactgcaaccttcacctcccaggttcaagcaattctcctgcctcagcctcctcagtagctgggattacaggcatgtaccaccacacccagctaatttttgaatttttagtagagacagagtttcaccacattggccaggctggtctcgaactcctgacctcaagtgatctccccacctcagcctcccaaagtgctgggtttatagttctgagccacttcgcccagcctggttttccccttttagatataatggttcagtagtgaagcataggtatgcttttctggtgccccctaccttccaatattttagaagactgcctcatgataaatttctaacagtggagtaactggttcataagatgtrtgtataattacgatattctagcatactggaaaacatattttcttttcgaaagtattatatcaatagaacaatatcatagcaaccttatcagtgtgggtggtactattaataattttgagggtttaataggcatcaaataaagccactttaataggtctaaaaaaaataagactttgttaaaatgtacatttctttaactgctattaatgtttttctcatatacttgtgaatgatttatatttctctgtttaatggtctctcctttttaaactattaagggcctgagaattttctctcacatttgaatgaacactttcatggtatatgtaaatattttcctagtttattgttctttttagtttttcatagttaaaaaaatttttaatcttcatctggctgaatttatcaatattttctttgttcactgtcctttctttagacgttgatgtatatgacatgttaactgatcaatgataatagacaatgattatcgttataataaaagtcatttcagagggtctcatcatrcttgcgaaatatggtgtttaggaaggggcgtaatgaagtggatacctccctagagtgtaatctatgagtatgtactggcagaagggaaagaggaagaagaggggcagtttccttcctctgtcaaggcatgacagcatgtctcagagcacgacgcacacttacgtaggcagaaaatggctttctaagtctttcaaatgaaatccccctggctggtggtattcatctgctttgccagtgatgttcataaaatgattccaaggcaccgcagagctctcgaatctctcccaactatcaaagggttatgcttggtttacgtttcaatattagttacactttgctctgagctacttgcaggcatttgtaaccccaggttctggaacctgtaagatgcagccacaaatgtttgctagatgaacattcgaaaaaattattttaacaattttcgaatattttggcacttgtttggaaatgtatggrgtggaaagaagtagggtatttgcattctaatccaggtccaggcaccaagggtttggctaatcttagataactgattttttttgtgggcctcactttcctcatttgttaagagagagcattaggctagatgatctcagagggacttttcagtgaggattctatgattatagattgtaaattaaataaaatgtccagttaattgggttatcctacatttttaaaactatgtccgatcacaaagagagtagattataaaagaaaccatcaaccttttcatagcttcaaaggtattggtttaatttggatttactgtgagttctcatgagtttcaatacaatgcagtttacagtataatagaattcatattacaaatataagtgcattgaaatcaatgttggacaattaaacaagaacaagaacaaaaakactttttatcctctagagctgtgcttgctgttcactatggtagtaaaatgtggctagtctgaattaagatacgctgtaagtactaaatactcatgagattttgaaggtttgttatgaaaaaaactatctcattagtgatttgacattgattacatacagaaatcattatcactaaatrtatcttaaaaattaatttttcctatttttgtactttttaaaatgtggctaccaaaaattaaaattacagatgtaggccacactgtgtttctgttacacaatgctcctttagagggatagaagattatttgcattatttaaatgaaaatatttttgctttttattccagcatacttaatctccaatgatttttaaaatrttaaatttattctctcataggaaaatggctttgtaaagaagcttgagcctaaatctggctggatgacttttctagaagttacaggaaagatctgtgaaatgctcttctgtcctgaagcaatactgttgaccagaaaggacactcyatattgtgaaaccggcctaatttttctgactcttacgaaaacgattgccaacacatacttctacttttaaataaacaactttgatgatgtaacttgaccttccagagttayagaaattttgtcccyatktaatgaataarttgtatgtatttttctctatatgccatttttgtcttcagttttggagtctggctggaaattcagccaaagggtaaaagctcaacacaggatccaggcaattaattatgggatgatgaccaggaaggcggtgtcttttctgccccaggcagacttttaaggtgtgccattaccccaaaagtccttttctgtgtcactaggctagactgcagactagactgagaagcggactcaggctagaagcagactcaggtcggcttccctcttccctccttccttcccatgctttctgcagtttccagtgcccctggctgcttaagagtttccattgatgcctcctccccagccttctctctctggcttgccatttggggttgatggatatggcaacctgatatgcaggatactctgggatattctgaacaaagaaaattggtaaatgattcaacgtggagctagtgttaatttttatttttattttttggtaaaaatgaacagattagaaaagtacgtagtttgttagacctcgtgttctaacttttaggtcagcaaatctaattgcactatgtatacgctgtacctgcctggccttccctttttcttacaacacagtccccctgggacttgcattagctttccctggaagctgttgatagattccataaagaagccagaactcccctctcaagccatgtgcattctcaccgggcacttaattaatgctttacctaggaggtgtgattcttaacggtggggattaagacactggggcggtcagtagggacgtatttttggcagagacagctctggttttcttaggaagtcacatctgagaggcaaccgtctatgccatctgaggcgcctgtctactgggagcagtttaagacttaacagtttcttttacctcttcctgcaagtgcctcacccaccccccaactgcttttagttttaattcatttttgtgttttaatcagagctgagtggtgggaatgaacagtcactgatggttataacaggaagtacctatgtgggcactattacctggaatacattcacactagaaacccgcaaaatttggcttttacactacagttattgctttagcagtgttcccgattatgtatcatctatacattcatcacataaggacatttccatcaaccactgtggtcccttaagattataatggagctgaaaaattcctaatacctactgatgtggtagccaaccaacacattaccttttctgtgtttagatacacaagtatcacggtgcttacaattgcctacagtattcggtacaaaatacgctgtacaggtgtgtagcataggtgtgtagtaactttgtgtaactacactctgatgtttgcacaagaaggaaatcggggcatctgtcagacctatccctgtagttaagcgactcgtgacgatttcgctacatgtcctgccttgcccttcttttctggcccctgaagtcccactactgaacagtacaagagatgccaggcaccgtgggtactgccggccatctttaccatccccgccagtggcgctgccgcctccgcggtcccggtgagggcccaggctcagggaggtcaggcggcagggcagcgacggcgcctcgccaccgctcccctaaccggggagggcgagccggaccacggggaccgcacgagggctgggtcccaagggccagaggcgaggtaagcgcgcggcgcgccgcgggcccgcgtcccggaagcggggtgggggcgcttccccgagccccgacccgcccctaggccgcggatccacctgggagcggccaggggcggagaccgaacccgagggcgcccagggcgccgagggcgggactggactcggcttgggcgtgagatggcggcggcagcggtgagcagcgccaagcggagcctgcggggagagctgaagcagcgtctgcgggcgatgagtgccgaggagcggctacgccagtcccgcgtactgagccagaaggtgcgaggccgcccgtagcggaagccgcggcggacagaccctccgaaggcctggcggccagcgattgctgatctgtgcatggtccgtgctggcgctgggctaggcgcccccccaccccccggcgcgcgcacgtttcccctcccggcgcgcgcacgccccctagtcgtggtctggacgctcttggcactatggcggggagagggcccggtagtgaaagttgtggggctaaagagcgagaggacggcaggggttgacagatttatctctgggaggggagtttgtttgcatgggtggctcttttggtgctcgaaaaccctccgtggggatgacggtgctgtggtgagagcacggtgagaacagaaagttgtggtagaggagatgggtgaacacctgagtgcccaggttccctcagtgaggcctaaagttaatgagctacgagtaagactccggttatattagtaaaatggccagagaaagatgcaggtgctttagacgagggaacaccaaaaaaggtgtggagatgccaaagggcagaactcagaggttgactggacttcactaagcatatggagggctaaggctgtgtctcagtagctccagggcctaggcttttcctgtctcagagttggtcaacattaaatgctttttcttgagtgaacgaaaggaagacttggctatcatatccaggcttcccaagaacgtaggaaacagaagagagaaatgagaggaataagtgagggtccgtgtttgttggttagcagacctctgtttcattactttcaccaactgcactgctatgtatttttagtctatgtaatgtcagttttcttatcaataaaatggcagtcatatcctgttgtgaaggcatgttctaaagagtttttggggactcatttttgttagacaccagaggaagaaaaatttaatgtcccctgaataagtacgtatttgtaattctgttgtaagtcaaactgatgatctgtcttcccagcatcatgcttcagagacaccagatatttggaaacttgatgttccttggaattagttataccatcaggctttcttaattacccttcactattctattatccgttatttactcaaattcaaggtgcctatgggttaaagcagtaaagcatatatgctcatttcacccctctcttcatctatgtaggtgtgtatgagggaatctatacagatgttaattcgttcgttcaaacagaattattttagctattatgaggaagcattgctgggtgttttagtagatgtaaaggatatagactcttgtccttactatctagttgtttaaaatttagctaattcattcacatatgttgaacacctatgtagtgcacacttggctatatactgggttgtggagatgaaaaagatatgattgttgctctaaaggagcagagagcctagaagaggaaacagacatgaataaagaattgcattgaagccagatatatgataaaggtaaacaccaatgttgtggaaacatagccttggggaggggaaattggaaagctttctattggaaaatgtttgagatgaatttcggagaacaagatgaattctttcaggtgaagggaaagatgggataggggagtgtgagtagggatatttaggcaagagatgacaggatacagtttagcatgggctttggaactgcacagatctgggctgaatctggcgccattgttttttaactgtatatccttggacaggtctcataatctctcagaacctttggttccttgtctataaaatggataatatcactcttgtaggtcgattgtgagagttaaagaagtgtgtaaagggatgtattcagagctttacctattgtttgttatgtcctttaggaagagtataatggcagcatttggataatgggttgaggaaggaagaaagaaaaaaaatatggagaccagtaaggggctgttgtgccaattcaagtgaaagatgaaaaatatgcaaaccagagcatgggcagtgaagatgaggggaaaggaggcaaatgggagactgttaagtgagaaacagcaggacttggcaactgattggaagaggttagagaatactggaaggggaggagagtcaccagtgattccaaaatttagagcttggtataatggtgtttagccttaggcataaagaaggtaggaattggaacaaattttggaggggcatggggaaaataaagatgaattcagtttctaatcttctacgttgtctttctccgtagaagattagaattcataaactatagatggaaatagtgtacatagatacagagtcactgacagcaatagaatgacgactgagagctggcattaaaggaggagagagaaaaattaaaaagcagacccatgaccctcagtaataaatacattttactctgtacaaacaaatatacacatacaaggaacattttacagctcttaagcacatacaatgaaatttaatattttctttttttttcaagacagagtcttgctctgtcgcccaggctggagtgcggtggcatgatctcggctcactgcaacctctgcctcccacgttcaagcgattctcctgcctcagcctcccaagtagctgggattacaggcacgtgccgccatgctcagctaatttttctatttttagtagagacggggtttcaccatgttggccagggtggtctcgaactcgacctcgtgatcttcccgcctctgcctcccaaagtgctgggattacaggcgtgagccaccgtgcctggctcgaactttaatattttctattctatttcatttaaaaattgtagcccactattgatttcatgactaaccaatggatcatcactggaaacatcagtgtactgtgtagtgttttgccatagtgaatgctcaataaaggtgttaaatgatgtctttcatttagaaaagcgtatttattcttattggcactgtacctttttataacttagaaatttatcagagaagtaatttaaatggtaaagaaattcaggtttatgtcatatcttgattccctaagatgaggaaattagtgcccctttactcactatgttttctactccctctgtcagtttctgacatttatattgttatatttatgttgtcaagttttgtaatttttctttttctttttccttttttttttttttttgagagggagtctcgctctgttgcccaggctgttatgcagtggcgtgatctcggcttactgcaagctctgcttcccgggttcatgccattctcctgtctcagcttcacaagtagctgggactacaggcgcccgccaccacgcccgactaattttttgtatttttagtagagatggggtttcaccgtgttagccaggatggtctcgatctcctgacctcgtgatccgcctgcctcggcctcccaaagtactgggattacaggcgtgagccaccgcgcctagccagtttttcattttttgagacaaagtatcgctttgttgcccaggctggagtgcagtggcgcaatcttggctcactgcaaccttcgcctcccgggttcaaggagttctgtgcctcagcctcccaagtagctgggattacaggcgcctgccgccacgcctgactaatttttgtattttttgtagagacagggtttcatcatcttggcccggctgatgttgaactcctgacctcatgatccacctgcctcggcctgccaaagtgctgggattacaggcatgagccaccacgcctggccaggttttgtaatatttaaactttgttctgtaactataatgagtctactgagcagtatttgtgaccgatttccaaacttgagatttcagtaaattgtatttacagtaaacagtatttacaaaaatatgtaaagcactgaatacataccttgtatttatttttttaatttttttttagatggagtctcgctctgttgccaggctggagtgcagtggcccaatctcggctcactgcaacctccgcctcccgggttcaagcgattctcctggctcagcctcccgagtagctgggacta

SEQ ID NO: 96647 - DNA, 13144 bp, Homo sapiens
  misc_feature (1)...(13144): n = A,T,C or G
gtttagataattgtacaaaacaatacatcagaacattttttataaattgacaccagttttaatattatgtttttctgattggcactttaaaaaatcttaattaaaaaaaccagagtaaccctaggaagtttttcagtgttgaccttagaattatgtcatatggtgaaaagtgaacaaaactaagagtttttagcatgcagcagtcctggaaagtggaaaagttatagtgatagaaaaaataaaaatactctgtgacccttaacatcagaaataagaccaattagtagaaatcatgataagttggctcaatataaaagtacacctaaatattaaagctgtttaacaatagaatcagttgctatacaaagtaacagacttctcaaactgaaaggaatctaaaaaaagctagctagatatctgtgtgactcagaggaaggaggaatttctgctttagatctgaagtctctgatgctgtttctgaaccctttagtttaaagaaaaccttctactagctttccaaatatctgtacactcttatttctctgttcctttttgaaactactcatcagataaatgtctttaccatactcccaaatatttttctcattcttacctttcttggaatactctctaaatttccattctttagtacatataatttccttcctcttattagatacttttccctatttaactcagctcaactgaatcatttttttgtattccatataactttttaaaaatatttaacgaacatttatattgttcttactgtgggcagatgatgttttaagttctctaaaagtgttggcatgtataatcttcctattaaccctgaggtaggtacttattcgaagtatatattttaatccctgtgcctagctcttatttttaagtggtttttttttttttcctgtgggctagggggatgtttatcatatgtctgaaaaggcttgcatactctttgtcaatggaaaatatatattttactcctttaatataacctgcattactaaaatcgcagccctatatcaggtttctaatcaattatttgttgaatatataattaatagttgtcatattaagttagaacaagattgccttctgtttcttgagaaaaggatagtttgaacaatttcaaaacttacgtttccattttgaaactgtcttggccaacggtagcttgacattactcgtgtaaaaccataaggatgagcaagcataaatccaactgccattttatacagcctgaaagttacataattatattatcacagaatatcagaatatcattaccatcattaaaagatgtgttaaaaaaaatagagaacttggttttctacctagcatcccagaaggtaagaatagaggctcctccagccccatgtcctcgttgattgtcatggttatccacaaagacaagtgctctgtcagaaggcatgaaaccccaaccttctccccagttcctatttttgaaaaataagatatatgttgatgtatcatttcacaatagtttgcgagtaacttaactgtgcatctctttctgcatggcatggcatctgaagattaaattctttctctaattaaatggttattctgtaagatatatatatatatatatatatacatacacacacacaaacacacactcaaatatatatacacacacacaccatatacacacacgtgtgtaatctacatatgtagtctatattcgtatatacaagtatggaatacttatattcatattacaaatataagatttttgttattaaaaaaggtcctttcagaggtttcagcacattatcatttagaggcactccagaaggatcaatatccatatcacattttacggaatgtcaaactaggttaaaataaggcttcaatactgtattgttataatataaatatttttatatttttaattcatataatatatgtaaattctacagtatggaaactttgtacatactttataaatgataggatcattttaataataacctggctttaaaagattatatgcaaacatcagtcaaatccagtatattcatctcgtacttagacggaaactcctaggatatgtttagcgttcctaggcatactcacttgtgatagacactctaaatacaaaagatgattgattagagtttagggcactagaatacttatcattaacaattgactccttgatagttgtctgaaaaagaatgttccagaagataactcacactggggtactatgactaataaatctatgaaatacttcaggggaaaagttgtatttatttactttaggtaagacatcttctctccattccacttgcgaataactgtgccgagttttgcaccatacttgaattctgtcacccggccatttccaaagtagtcactgcttttaattggctcaccacccagatcaattacctagtagaaaattaggaaaaagtaacattttgcataaggactttaaagcattttaaccaataagttaatattatataaaagatagctttaagctatttgttatttattaataaattaagctatttattatttctttttgtcttgttttgttttgtttgtgataaagaattagatatgctgtatgtgaagaggaggttaaagaacaccattttatataaatgactcagtccttatcctatagaaattgcatttttaattaaatctgccattattttctaatgaataagatgatattttatatgcatatatgtattgatgtacctcctggtaaatgaaaggtttacttcctgcagggaaccagttactgtttagattatgcagtttgtccaaaattgcctttatgtctccaggccacatgtgcttggaagcatcaagtctgaaccctgcaacaccaatgtcaatgagatgattcatatattcggcaatcttggaacgcacataatctttctccagtgcaagatcaagaagaccaaccagacgacaatctctgacctgttgaggtaaaaatgttatgattgattcataaaacctcatttttcacatgagaatccatttgattattcatttattccatgattcctcaagagatattctatagtgacttccttgcattgggcgctggggatgctcacattctactatagatgtatcttggaaatattttctaatagaaaatagagaatttaggaaataaagtcgacgagctttttaattggttgggagctttttaaaagtgggcaaatgtgtattgattaaaaatcttaaatctatatttaagtttttaaatatggatttgagtttcttaaagtagtcaaacctgttaacctgtgtccctaagagatctaaattcgtatttaaaatgaagttcaattagctacatgtctacaagaaaaggcatatatcaccccttattcagatgactctcataaaaaaatttacctgagtagcatcattgtagttctcgatatctccacttccagttttacatttaccatcattaaaatcccatccagaatatgggactgctggaaagtccctacttccagggttgaagtaacttccacaggtactgcttgttcctgcactcacagcattaccagacatatgattaattacagcatccacataaatacgaacctagaaagcaaagtttctacttcagtgtgacttacagagaggcagaaatttaaagcattattgattcaagtttatagtatgttaataaaactccaaaatatttcatgatatcttataactattttcctacaagatcaaaaatcaactgtgaagaagtaatgtgaactaaacacctacatgccttctagacacttggtcaaatatttatagtaatggtaaattgagagaaccagaaactaccataaataggaggaaatgcaaaaagcccatttcggggagacaaaactcagatgagactggaaaggttactgttttggaaattacagtcggtcaccaggagaaagcctgtactctctactaagcttttgaagacaaataagggagctattagtctcaaattatgctcctcattaaatagagaagctagctagtcaccacgaaaaacccaggaattatggatggagatacaagtcacctaaaaatgatagcaaatattgtaactggaattataactcttaaccagaaaactctttccaggaaatatagataggtataaaagttaaaatttgatgttttgctttagaagtaaattctgctttaaacttgtttctttggtagatagagagcacatacacaaatatttacaaaagctgaacataaggcaacggttaattttgagttttaaagtatgaagtaaaattaaaaaaataaaatatggaaaactttctgctgaaaaggagcaagaaagaagagagagaaatcattttcctatctgttatttttcaaggaaactagaattcacttaccccaacattgttacatctagtcaccatgtttctaaattcatcttcatttccagatcttgtgcataatttatagctaactggttggtatctttcccaccaaggtctgaaagggttgtgaattgcaacattttcatttggtggagagacctacaaattaaacagtcttcataactaccaaattcttactctatatcattgaatgttctagaaactaatcaataatataaaaaattcttgaatcttggtatatgcagctatctcttgaaaatattaacagcacattggagggctcttgttgaagaaagattatctcagaaacaaaatataaagttgccaagaatactacattgttttttcctcagaaaactcttacttagaatacttacctgtgaagtaaaatgttgcctaagcttcacggataagatcagaatactatttactacaagcatagtgaattctgcaattgatactatgaatcatacccacctgaacccctccaaatcccttgggagctaaatatcgctcacattcaagagcaatatcaacccatcgccattcaaacagatgaacaatagatgtccgtccttgttgtgtatttggggaatactgagcccagcagaacccaatggtgaaaagcaacagaaagaacttcattttgctttgaagttgtcagtgtcctttccagaaactatttatattcctgtaagaagcacattttacaaagtaaatattagcatgaataaatacttgagggcaaactgtttactcataatctgaaaaggattatcaataataatcctaacaggagaagaacattaaaaagtctctcatggaaatcatctaaatgaccttttagaaattaatgtttttttggttctggcagcacttttatttttccatacacaatgatatattgctggggcctaatgttctcacgtaacagtagaaaaccaaaatttgttgtcatctctttaaagatcgagaattgcatacaaaaaaactttacataaattaaaaggatgaatacatttataggtataaatgcaaaccgcttccaactcaaggcgagtaacagcccatggtgttctggcagacaacagaagctaagaaaggaaactgggtcctatggcttggactttccaaccctgacagaccgacaggacagaaacaactggttaaggagcccttaccagcctgtagacaaatcccagaacactcagtcctgacacattaataccctgcacagatcagagactgctggccatgcagactcaccaagccagacttgtcttccacaagtacgtttttagccatgaagtgaccaagccacatgtactaaagactgaaatcaaagatatgtacagataccaaggggaacagttaacttgaatacaatgtcaaaatcaggaacaagttctacaatccagtgctgatatcagatacaagctttaaagacaacttattttctaaggcttattccagtttggtgaggctagcatgaggtgtatgcatttgccaggggcaaatttttacttctgaattaacccatgaagcaattgctagccatctgctcacagtccatttagaagcatttgcggtggacgatggagggggccaagtcattgtactattgcttgctaatccacatctgctggaaggctgacagtgaggccaggatggagccgctgatccacacggagtacttgtgctctggggatgcratcatcttgatcttcatggtgctaggtgcccgggtggtgatctccttctgcatcctgtcggtgatgcctgggtacatgttgccaccagatagcaccgtgttggcctacaggtctttgcggatgtccacgtcacacttcatgatggagttgaagatggtctgggtggatgccacaagattccatgtccaggaaggaaggctggaacagcgtctcgggacactgcaacctcattgccgatggtgatgacatggccatcaggcagctcatatctcttctccagggaggaggaggatgtggcagtggccatctactgctcaaagtccagggcaacatagcacagtttctccttgacgtagtgtctgatctcccgctcggcagtggtgctgaagctatagccaaccttggtaaggatcttcatgaggtagttggtcaggtcctggccagccaggtccagatgcagaatggtgtcagggagggcgtagcccttatagatgggcaccatgtgggtgaccccatctccaaagcccatgacaatgccagtgtgcaaccacaggtgtagagggacagcctagcctggatggccacgtacatggccagggtgttgaaggtatcaaacatgatctgagtcatcttctctctgttggccttgaggttcagggggtcctcggtcagcagcaccaggtgctcctccaaggccaygtgcagtcccttgtagaaggtgtgatgccagatcttctctatgtcatcccagttggtcatgataccatgcttaatgggggtacttcagggtcaggatactgtgcttgctctcagccatgtagcccacataggagtccctctggcccatgcccaccatcatgccctggtgccgggggcaccgatgatggaaggaaacatggctgggggttgtcgtccccagcaaagccagctttgcacatgctggagccattgtcaatcaccagtacggcaatctcttcttccattgcgactggtggaggagtgggacagtggagcggcaggacaacatggtgcatgggctggcagaggtgactggttttttcttactgataaaatcttaacctttttaaacctctggcagtgtacacacacacacacacacacacacacacacacacacaaacccacataaataaggacagtaaatatatatttaaacacataaggactgtatttatatatatatatacacaaacacacacatatctacacagtccttatgtgtgtgtgtgtatgtatatatagactctgtgtgtgtgtgcgtgtgtgtatatatgtatatatgtatggtttggctgtgtccccacccaaatctcatcttgaatgtagttcccataacccccatgtgttatgagagggacctggtaggaggtaactgaaattgaatcatgggggcggtaatcccatacagatgttttcatgatagtgagtgagttctcccaagacctcatggttgcataaggggcttttcccccttttgctcagaatttctccttcctgccatcaagtgaagaaggatgggtttgcttccccttccaccatgattgtacatttcctgaggcttcctcagtcatgtggaactgtgagtggattgaatctttttcctttatatattactcagtcttggacacttctttatagcagcatgagaacaaacatatatatatacacacacatacatacaaacatatatatatacacaaacatatatatattccatatatatataatgcagtgtatatatatatagtctatatagtctttatatatgtgtgtatatatataaatcctaataacaaataaggactgtcttttgtttgtgatatccgtcactaatagaaaataacaattgaagccaactgaattctcaaaatatttaactattttcaaatttttgtcatgtttccatttcaaacagacatattatgtgatatttccatttttaaaatcagccctgtttcccatccttaattcaaagttttggttatttaaatttctccattaatgatttaagaaaacgtttaaaatctcaaagcccatgaattggagaaactaacttttttccccttgatcaactcatgtgcttaatatagtgcatatagtagtaggattggtggtggtggtggttttctccctgtaggcaaatatttcttgtacctgacaaaatgctaaataaataaatttgtgtaatttttccttcttaatgtaatgtaagtgaaatgctatgaaagggagtaatagtacaggtaggaaaaacttcatccatccattcaacaagnnnnnnnnnnnnnnnnnnnnnnnnnnnnnnnnnnnnnnnnnnnnnnnnnnnnnnnnnnnnnnnnnnnnnnnnnnnnnnnnnnnnnnnnnnnnnnnnnnnnnnnnnnnnnnnnnnnnnnnnnnnnnnnnnnnnnnnnnnnnnnnnnnnnnnnnnnnnnnnnnnnnnagtaatgtcccaagaaaggaaaaagctagtacataagacacattaaaaagaaatcagtgtggctagagcacatgtgataaagggtgggataaaatgagatgagatcagagaggtaggccagatcatgtagaaccttgtagaacatgaagaaagagagagctgttaaggctgtgacatggggaactgaaagactaataaactttaaaagaaaatcaccctgcttctgggaagaaaccagattataggaggataagagtggaaaggggtagatgttagaagacttttacagtggtccaggaaagaggtgagtggcttggactagggcatagacaaggtatatttcagaggtaaacaggcagtagatttatgaatagattagagctgaaggatgaggaaaaatattaaagatataggtatttggggatgataccattttttaacatgagacaaaatgaggaagtaccagctttgacgaagggtatcaggagagctgtggatcttaactattccactgtcgatcctgatgctgccctttggtccttcccccagccaatcctgtgaactctgttcattgcaaaactagaagttcctcatattttatatgaaatatcataccttcatgaatttcctagtggttttgtttcccatatcatccccttccacatccaacttagtgtggaagcaactacttttccttccacattaagttgaaaccacaactttatgaagcttaccctcatattctcaagcatagttagctcctctgttgtatgaaagctttttaatttatatgacattaagctatatttgacttcttttgtaagtatattataattaacaatttacttgtctgtcattctggaccaagcttcttgaagttagacttcatatctagtatttccaaatcctagtaaaatgattgacattgtcttatgtgctcaataaatggctataacatgaaaactctaggttccaggtattgtgcaaaacattggcataacatgggttatgtcctcattgattttctaaaaatcaatgaactctatattagaaattgtgcaataaacttgactctaatcctagcaaaagtgttgtacacatgttggaactaaggcccagacagactgggtaaattgtccaggctcatatggtaagtgacaaagacaggatttgataataagtctgattgcaagtcaacattctctgtactacactaatgtttctcctagaattctagagttgtgatgtctaatatggtagccactagaaacaattggctactaaccagttgaaatgtatgtggtttcaacagagatgagtagtaagtgtaaaacacactcggatagtgtgaaaataaaaagtaaaaaaatatatttttatgatgtttacaggttgaaataacatactgtgatacattaggctaaacagaatttaccattaatattaatttccctagtgtcttttggtttcttttaatgcagttagtaaaatacgttaaattacatatatgatttacattctatttgtattagacagagctgttctagaagttatgttcagttagagaagggatatgtccatacacaaaaacaaacaataaagtgaaagatatgaacatagttttaagagggttacgattaagtgcttcaggatttaattggtaggaaaagttctttctgacagatgggaataaggggagataaaattgacttgaagaatgggtttgacatcaatgaaaagagataggtaaaattgcttttaagtaagaaaaacatgtagaagagcaaggaaaatggcaagaagtcaatacagtgttttagaaacaagtcaagtgtgagggagacatgacagttaaatttggaaaggtatattggggacactcaaaatcagggagaagaaaaaagtacttacctcagaaggttttttggttgttttaaacaggaaagtaataataaaaacttttaattatatcagatggaccagaaaacaaagagataggaacattagtaagcagagcagtgacagaaatctgaattaggattacagcagtaagaatgaaaattagggaagtgtgatagttatattaaagggcatccaatgaatgacacttcccagtatccatacctatataaagtctctctctacaaagactatggaattagcttgatatttgttttatccgatgggatatcagcaaacaagacacaagcaaagtttgactggggtttgcagaagggagtttgatctcttggaactctgagatcatacattgtgttgtgagcctacctgggatgaaagatcacttgaagtctagttgtccctagtcattccaacaacgtgagttgactcgccagctaatagtagttgagtgatgtgccaggaaaaaacatggtgtatatagtcagccctccatatccatgggttccacatcgccagattcaaccaactgtggaagaacatatttttaaagaaggatagttgcatctgtactgaacatatagacttttctgtcattattccctaaacaatgtaactatctgcatagcatttatattacagtagatattacatctctagcaatatagagatgatttaaagtatacaggaggatgtgcattggttatatgcaaatactatgctattttatataaggcacttgagcatctgtagattttggtatccatgggaggtcctggaaccaatcccccacagatactggagagatgactgcaaaaggcttggtactatctgtggtttcaggcacctgctgggggtcttggaacatatacccctggaatagaggggaaatgtttatgtaaaacagagaggggagatataacagacttggtggagactgtacagaaaatggtggttaatcagatataagagaatagagaatataaagagtcaaatggggactctgtgatttaaactttgggtgaatattagaatggcaatgtctttatgactgatagtgcaatctaaaggcagatttggtttagagaaaccgatgaatatggggacatattgaattagaggtaccatttttaaaacaaatgggtatataaaaacaattaaaaaaagatatgaagaaagaagcagagaattggtagttttcaacaaagcaatgacagtctaagaaatggaacaaaaaatacttaactgatttaacacagacactgaacagaacagatgctatccctaagcaactactatacagagggcagtgtacactggctgaattatcaggcctggagagttgtacccttgagggctgacaaaataccaaaaaagatattggatgaagtcaccaagctttataaatgatggggtacagggagtaggaaggagataataaagaggtgccttcaaagtagcaaagggagttttattacccgagatgatttttaaaaacaaatagggaaggaaaatttgcagggagtacaacaaactaactggatacgggtgagtatcagaatttaaatagaagactgactagatagtgatacagggctgatggtgtaaagagttgacagagaagaggggcaccatttgaacttcatgcttgactcaaggttccaaatgtgaaaacgcaattattaggagttaagacaaactataaatcctgacttttccatttataacctgtgtgatgctggaaaataacttctctaaatgtatctattaactagaaaaagtaatgtttacctcatagagttattgtgattaaacgaataatgcaaataaagctgttatcccaatgtatggatatggtaaaagctcaatatggttgataatgttatttttgtattgatatttttacctggtcctattaaaaatcctatcaactcatactgtctttccgccttcgctctactaacacttggccattctgtcttcccattctacccttcttaacttctaatactttctacttctcagaagtattttcatttccagtaaaggaatggacagagatgaaaaagaatcaccaatattttctacctgcaattttttccttccttccctcacagtattcttcttgcttattcgcttaggatttctggcagatccatggtagttttgaaatatacttttcaacaatgccagatcaatgaactctgttcttgtaatagcaaatcagcatttttcacaatgcatttggaatgttggtaaaaaaaaagggataatttgcagatataatttagggaatttagcactgcatgaaaggtagagttagacacacatataataagcttctactaagagtcaggcattatcatatattttctcatttgatcttaattttcacctcaaacaagcaatctgaagagctatataccccataggagaagcattaaaacaattaaagtatatttatgtcttctgaaataaaaatctgcacaaacaattcttagcatcttcggcatcaaaaacacaaaaataaggatttaaaatagttgttatatctactttctgaaatagttattctaaaagagttatccttagagaagctattcagttattagtaa

SEQ ID NO: 96648 - DNA, 12530 bp, Homo sapiens
attaaaaaagtaagtggcactgagacttataggtcagacccagaaaccctcctgacaatgttattctgttaaaaagctgtgtctttaattggccaagttcttcttctttcctccctcttcacaatgcctttttctcccatgatcagaatccaaaacatgagatccacaaggtgttggaattcttggagaaaacttgtcaggtgatgttataaacaagattgtccaccatacctcatttgatgtaatgaaggataatcccatggccaaccatactgcggtacctgctcacatattcaatcactccatctcaaaatttatgaggaaaggttggtggcatttcttttccttaactgaactctaaaaaattttctaccctatatgctaaaataattttcaacctaattttcaggcagaagtgactcatttcagttaaattttgaatctctgctcccttcaccctgcctgtttgcagacagccaatgtcagtggttctgaaacttgagtcacattagaacccctgcaggccttgctaaagctctgattgctggtccccactcagagatactgattccacagatccagcagtagccctcaaatttgcttttctctcaagtactcaggtgatgctgatggtgctggtcactttgattacaatacccacctcaaccatgaacttccctttgaaggcttgtgcatcctctgagcagctttgaacactcatctttagtctatccctgtagttcaaaaccctagctaagcacttagtacttggatttgtaactactgatattcatgtctgtctccaaaataagatgataggctgtcctgaagagagtgtagtgttcagttttgttccactagaacctagtatagagactcatacctcaaaacaactcagtaatggcctgttgtgtgagtgtacagatgaatgaacattatttctgtcctcaacaagttaacattctagatacatgcaaaaatagctgcaaaaagttataaacaagaaagtaaagtggaagctatactaggaattccctaataccagttctcctggctgtatcaaaattacctttaaaaacagtgaccccattccagaacattccaattaactagttgcaagctggaatctagaatttgatattatgggcaagcatttcagattaatcctcttgtcaaagggtaggaaaccagtagaaataaagtactaggataacttagagaaacaattcattagtacagcatttgttgggctgacaaggtacaacagtttgcagaagatccctagtatccaaatgtcatttccagtggatttactatttaattttacccaacaagtaatatcttctacaatgaggttactgacatcttgtaacgtctttcactgtccctgggagaataagataggctgtcccccaggaagtccatgatggtaaccagctgtagactttgggttgggtacactagagccaggagtgtaccctggagcagaagattcagcacagtggggcacctcagtggggcctgcagcatttgaggaaggagtataaggatgctgtgtgccttgtggtaagaaagccaagtggagtggaaatgagggaccattcatagtggaaagaccagggggagtgggactgagggaccctcactcatgggaaaatcacgtgggtaggcttaggaaccattcactatagaaaggttaggtggaatgggtgcagagtctgtcatgaacttctttgatgtcctacagggatgcctggagactggaagaaccactttactgtggctwtgaatgagaactttgataagcattatgaaaagaagatggcagggtccacactgaacttctgcctggagatctgagaggaacaacaacaaactaggtgacagagactatgccaactatttcgccttttattctgttgagcaaggaactgtgactgaatgtggagcttatgagcttcagtccatctcctatagtgtggctagtttgctataatattaaaacatgatttaaaatatcaacaaaccagttactccagtaaataaaataagagaattagagagcagagtccgcctacatgagtttttttgtttgtttgttttttaagtacaggtatgttttattgtgcatgacagatagagcaaaaacaaacaattgcatcatggattcccatgtgtgatcccaagtagatttcacaagaaaattatgcataggtattacaagcsccattgttaagagagaatgtaacagcttgaagtgtacattctatacttttatgtataaataataacttccaagagaaaagagctgataagtacatttcagagtcaccatttctgtaatagaatgatataaaaataaattactactgcaaaatatcaatcaattgcaaaatgattactgctctacttttggcttgtaactaattttctcaatcgaaagagtttgagttggagaaattagtcagtgagtactcctgtaaaaaatcttcccacgatataaataaaatgcttaatgtatctaatctataaattgagatctgggacaaatgcaccatgactatgcattgccattctcttaataactatgcattgccattctcttaataaagagtctctgttgcatcactctaacaataggtatgacctcagatttaatataaatttagtgcttcaaccatgcaccagtgaagacctggttttttatatgaccaagtacaattgtcttattagaagagaaggtcctgaggggccttagggagtaggtggatgccaacagggctgatggcctcagagatgacagcatgtaacatgtaagaaaggggggaaatttggaaagacttaaactcagaaataaaattaaagaagtgtaaaaaggtattcaattaacatcttgaaagggaatcaggaacaatatacatagctcccagtacacagagcaaagtaacctccctgtggttgtgatcattgtctctaccttatcgtagtgacaaggcagtgctattgttacgccaggcaaaggggaaatgacatcctattctctagtcaactggatggaagacaaactcaaaggtaaaaaatagatgatgagattttaagaaaagagagcagctggtccctaaggcctgctgtaaggaagcagagaggatgaagatgggggcatttgaaccagcccagaggggaccctggggtgaaagttccccatcaggcattaccccactgcctacatccagccagataacccaaccacctgaattaccatcctcatatttagttggtgatccagagaagagatttcctctagtattccctaaaggtatagcaagaaaaaaagagattccttgatcactcctgcctagtcaatgcactggaagactggttcacagggctactgtgctttgtaattggagacatgagaatccacaatgattagagagctcgggccccaggtactgtcagagtccacagtctacctcagagaggaggaggcagattaaaggaaaagcaaatttcattttcctactcagaaatgattttctactaattgaaaagcaattgaatgctgtcaataaagacatttcctgtactaaccttggactcagagtattgatgaccaactatacaaagcttatttcttccatgcaatggatgatacctgcctgcctttgcaggtattaaggggtatgatgctgagagtccaggtgtagaagatgggatcacgggttttgggcaaagcattttggctatctaatgttaagaactgtaaggtttgagaatgccttgatgaaagttcgtaaaagctacaaacagagttgctggtcatttctacaaggaggctgtgaactgctcttcatcttctagaggcatattttggctatgggctactaagattcagacaggtgtaagatatagtttgccccatggcctcccctagaactttccccaatgtgactgttcctggactaaactgagggtcgggctgctatttcctgtggcccaataacaagatgcagatgaactggggaggaagagaagttttatttctgtaactggttacattcagagggcctggaaattatcaccaaaccaactcaaaatgacaaaatttttcagagcttatctaccttctaagctgtatgtctacatgtaagtgtgcatgccttctaaagacatatgtgattaatttattttaatttataactaagatctgagtcctgaagaccttcctctggtgcctaatgaagtttgcttaatttaaatgggtctccaggtactgggttgatcacccttatcttgtctcctgttaaactactgaggtttggggagttccttcagacctccaataaacgtgtttgtggaggcctggggagtttcttcagagccccaataaaacttatataatcctaactgggtactgttaagaactcctttattattttgtcatgttgtaaggcccaggaaatgcctaggcaaaactctggatgggcttttgttacatttcagcctttgcataagggcactggctttttttaatatttaacttaaccactcactgaatactgaaacagttgtgatggaggcctgcattaatgcaacctgcctgccacaatccccactgtcaatttgtgcataattcttatcatgctagtatatttatttatcatgagaattgtagggatatggggcattgtaatatttctggctacttcctgctgagtgagtgtcattgttatgggacactgaatgcagcattggtataggggaggtctatttgttcccagcagcactctttgtttcaggggcttagaggcagcacctgctgaaacatttagtcttcagttcacagggctttaagaaagcacaacttaggtttcagtgatttccagttaggaaaaatggggtagtgcatgggctttcatgcagaagagccttcagtgcaagtccatgacaatgtttgcaactcagttttatcctcaaaagctctaactactttttcggtattctaaatctgctttgctttaattcagttttcaaaatattcttcttcctcaggaaatagcacatgctttatagttgaatgaatctgttggctcctggcacttgtaagccagatatctttatctgcaaaatggtatcatatctatctcatgagatcattgtaaagatttacactatcatacttgtaaagtgtacatagttgtgttcaagaaatttagcttccttctccctcttgcacacctcaaccccacatcataaagcaaagtttaatccatataaacactggtaggattagtcccacatattgggacagtggactgatttctgaatttcaaaccatcgtgtctgagtgtctgcacaaattcactctcatgacccagtgcatcagcatcctagaattacaaaactagcatctgagatgtcctcagaaatttaatcaaaagctatagctttctctctttctgtatctctttgatcaaaaagatccaagaaataaggatctatgcttctgggtcaacttgagattccttttattcctcctcttagtgaccttctgttaagttcataggttctttttgccatctgttgtagtccaaatactagagttagttatactatgcttcaccaccaacattgttcctccttcacacagcctttcctgttctcccccaggagatatcattgctccttcccaccaaatctcctggcactctgtctgtacgtaggcagcatgtactttctcagccagccttgtgattgtttgtgtttatgcttaattcctttccttcaaggtaagcctcttgagggcagggacaaccctcatctttgtgttgctacagtatctgggacagtacagtgtctggcactaggagtcacttgagaaatatttttaaaatgtgttcaaatgatcctttaactcatttctctccaaatactgtccaaatggaacatcatccccaagggaagacccaacatgatttgtttggtgtgactgttccacatacaggacccaaagcgggaaattgagaagatactgaagttcctggaaaaagacatatcagaggaaattctgaataaaatcatctatcacacctcctttgatgtaatgaagcaaaacccaatgaccaactataccactttgcccaccagcattatggaccactccatctccccttttatgaggaaaggtagataagctttgtagtctaagatgtcaaatggaactctgtggtccccatggtctgcttagattttccagtaatgtttcattctccattatttattctttccagcagcaccactgtacaacctttgagaggcaagttgcctgtttctcctcattcttggtggggtcctaagggtgcatgcttacctctccctctactcctscagcaatcattaagattttgccttgtttcagggatgcctggagactggaagaactattttactgtggcccaaaatgaagaatttgacaaggactaccagaagaagatggcaggaagcaccctaaccttccgcacagagatctgagagcagtcagggagtctgtcctggactttcttaccagatttttgccatttgagcctcatgatcaaggacacttaaaacaaagacacccttcctccagtctggagctgttacacactacctgtagatgataatacttcatcaaaatgtaaccaaatcctgggtagagtttttaattaagatacatgatccctcatttagacaccaaccacataacgtactcccctgtcctaaggcaaaataaaggcaatttagttccatcactagtttacaatagtgaaataaataaagagataaataagagtagaatttcaatgtaagagaaagtgagcaagagaagaatgaggatgataagtgggcactaaggataatgtgtgggggaactggtttttatttttaaaggtcaggaatgagaggcagaggatagtcctactcttgaagatattagattaggaggtgcagggggtggcatgaaggatggaatgctgtgagctgggtctggctcaggtggcttcaagctgaaatggtcccaaaaccaaagagaaaggccacaggagagcgataaggaacacaagatgaacaagaaactcagcctacttctgtggccaacacaaggctggaaagcagagaaagattttatctttcagatggacttctgagagagagaggaagtcttcagtgagctcaagggaaaaataaaataaaatatttggtaactcatggacgttaagaaaagcttaaatttcacatctctgtggaaaatcgttttttatacttttttttaaagggctcttagcaaaactgtcagcattgccaagttcttcagctacactaatgattatgttcttttccttctttttgttaaaacctgtaccaagaaaatatctgccatcattttatacaagctatacaacgatccatgtatcattattcttttaatgtcaggaaggtacattttgtgggataggtgattaacttatcattaaaccatacaacacaaaaaaatatctactccacccagtaacaaagtatacccctttgcattctttcatctttccctctctagggtaagcatgcaaatcattaaccacatgacaaatatcccagtatagtatttatgcagagttccggcctgcactgaggaaagatatggtgaactgaaccagcatgattcaatagcaaataaatttttatcaggaatacccacaccaaatgtcttgggttcatgttctaagagctgcctaacaatttagatagcaagcacataatcacatagtgactccctttgtgactgtgatagaaactggatatatgggcagtattgatcagaatataggcaataggtctagagtttacgactaggcaaaacttgcttttctccctttataaactaatttttttaatttaattgtaaaaatatatcccattcttatattctctataaatttcagccacagaaaatacttctagactcctcttttacaaagctctgctatgtccttttaaacaatgctaaaagtactatgaagaagaattaatggtttaattcaatcttaaaatatctttggtccagctgcataaaataaacacgatgaagatgaccatccatgtatcctagataatcttgtgttctgatcacttattacatacttacagagagagagagagagagactcctaaatataccacagtcatagaagatcaaattgtaaatgttcaatttactttggaacttttcacttagaagaaaataaaaagcagcaatgggaagttagactcataaaattttagggtgagaattacaagagtcagaaaaatcacatcattcaacaatcttgcttttcagatgagaacactaagagccagggagagagggatggcccccacaaacaggtcacgcagacacggttcatcaggatcccccggcccctggctagctccccacacactgcaggagtcacgcagattgcgaaagtcttctctgcagacttcatcttgcactactcacttcctcttagcacttggaacagcttgggtgttctatggattctctctgattacataagaaattccaaaatttttctaatggcctatttagaaaaagaaaaacaacaaagcctgatgggaatccacttagaaaggcagctcttcccagagagggtctctgcattagagcgtcttggagatgtctgtgagcaggagggagcccacagcagaaactgcccttccccaaagctgagtaaagcccagctctgccctccagccccatcacaaggcttctgggatttctttggcctgtaggtaccaggctgacaccccctgcatcctgcccgacctcatcacatctcccacagggcctgccctaagtggagtggaccgagctccctatgcagccccaaagactgtgttccactgcccttttcctcattttacccctaataatctagtgtgggttttgctgttaagggaactccaaaacatctgaggcaagttttagtccatataaactcaagtatggggaatgccaggaaacaaatgacagagaggagggttagggactggaatgaaaatccttaaccctttctaggtgttgttaaaatgatcacctgggaggccatcagaccttagtgcctccagtgtcccagattcctatggaagcaaaccaagacccaactcagttacactgaggactcaaccagtcagaaaccaccaatcaaccctggactagggactttccaattattgctccactttgaccaattaaacatttcccctatcctgcttcccattcactctataaaagtctccccacacgctccttcaaaggagccctgaatctttctggcttggagcgccagattcatgaatcattgcctgctcaaataaactctttaaaatgttaacgtgtcagagtttacctcttaacagttcctattctatttttttcagcttggtagaattagagttcatactacaggaatctaacgatcagtcttctccaaagaggtttttcaacagtggaggaccctcccagcccttctccattatcagtgccctttctctctccacattcatgggttgttggtctaggctcaaagaggttggtctaggccacagaggtggcctgtgggccaaaaaatccagccatttagtatggctgggagctatgaataaactgtttgtatacttttaaacagttgttataaaaacaacagaaatgacaaagaagaatatgtgacccacaaagcctaaaatagttcctatctggtccttcacagaaactgttttctgatccctagtttaggagaaccccccagcagccctgttctgtaggcagaggccctggacgaccatcaacccagccctgctgtaggcaccatggccatacaggcatcactgttgcacacctgctctatggagggagggcagaggaggagagaagggaacaaaaattgagtaaagccaaatttggttttacaaatgaataaatattgacaaacaccctaagcccagctgtagctggaacagagcataccgcaagaccaccatgcatggctggcacaaacatccaggccctggagtcctctcttccctcacagcctgccccatcagcagtgctttctccagtctgtacatctgggctatctcagcaaatcgtaatgtcttgcctctcactgggtgcttcagaatccctcctcaggaagaagaggcagtgctcctcggagaccccttttcatcaaggagggctaagcattgggctgagggcagcaggagtcagggaccctccgatgggtctaagataatcaggggtcctcagctgtctgcaggccgccctggaatgctgcgtctttgttggcaatgtggactgtttccagcagagctgtctccctcagggtcattgctcctgtcagtctctgggcaccaccttccacccagggggcacattgggagagtagaggtgaagtggccatccctcctcagtggtgcccattctcttccttctcgccctccatccagctggccctgacccatgatcagtctctgcatttcagtgactcccaagcacactgtggcttccactttcctcattctgcagcctcttcataagaacaatcaaccattcatgttccatattcaccataagcaaagcaagaaagagagcccttgcctttcatgagattcttggtagtcctctgggaaatctgcctccccatgcagtctctctgcatgtgcccagggccacctcatcttcttggggacacactcatatggccaggtcctggaattgccttacattggcagctggttcttggaaaccccatggaatgtgtcacaccaacttccttcaaaccctaccaagcagaactcagggattttagtactttctgtaaatctctatctgccttggttgaccatccctgaattgactcgtctgtgccttaactgggcttaagtgaagaaagtccagtcagagcagagcatgggttgagttcatcggacacagaaaacgtgtccgagcttccttctaccccagctgacaaaggcagcccacctcagtcggctcaagctgagtttctgggtcagcttgcgctggatcttatgtagatgaatgagaaggctcctgaagatccgtatttgtgaagataggggtcctgggtgaggattgcatgggagtcccagaaatccagacatcatcagaccctcccagccttcttcccaaagagttctgaggagcactcccaacaacaggagcctgtgcatggtaaagggcctgcctccctttgaaacttgtaggggaagtatgcccagctctccaagccaagggaggtcccaggccaccacagctctcatgctcccgaggcaggagtttttcctccacccaccttcccatctggaagcacctcctgggaagtggtgtacatattgtggtcccaggaataagcaggtgggcatagaagagaccaatagtatatgtgggccatgatggcaaggaccataaagtaagtgcaggtgcagttttcagatggtgacctgaacatggcctccagccagaagataaggatcaagaagggttatgcatggctgatggacagctctccacctgttaggtcatccccagtgtgcagctggattgctgtgggcttttgggtcattgggcctccaggagcagtcattagtgatgtccactcacagagttcagccctaggtacaaagtttagcagaaaaaggtggactaactgactagggtttgttccacccctaggtttaaaactccagagtccagcatgtccctaaccagaaggccactggctgcccgcctaagctccaaactgatggagaacagccccraccaccaccagtacccaccatggaaattagggaacaatacgggtgcagggagaggcagaccaggctggcttccgacagaagactcagtgtagaatcagttgcaacagccatataaaagttaagatgccctccctagcaactcacgtggacatgagcccaagaaactagcacaaaacatctccagtcatgccccttgaggtcccagggaccttgattacaccctggttgttatcaagcaggaaactgcaatcagtcacagcactttggcctaactacacgccaggctgaatgtccaaaggttgttcgcacaggaaaaaccttaggagcatcctgctaggggctggtgtgccaggcagacatcattgtgaaatcccacagtgtgcaagcaacctgtgccatcctgtatttgggtttgggttgccagaagcagatcctggtatgagggtttctgtgcaagggatttatttaaaaagtattcctaggagagaattatcagtgtgtggtgaggcaggctggagaggaagtagccaagcaagggtatggacttagcatagtcctaggtgcagcctgatcctcagggggcaatgcagggattgtccctacttgagtcagggaactgggctttcctggggcatgacataatcactccctct

SEQ ID NO: 96649 - DNA, 67647 bp, Homo sapiens
  misc_feature (1)...(67647): n = A,T,C or G
ccattgcctctgcccagggctagcggaaagtgaagtgttcccagccccattgcctctgcccagggctagcggacagtgacgtgtccccgcaggctgaactccgactggtgacaacgggtcagcgtcctcactccctggagactcggagcctggacttgccaaatttggcacctgcccatttttttttttttttctttgagatggagtatcactctgttgcccaggctggagtgctgtggctcgatctcggctcactgcaacctccacctcccaggttcaagctatattctgcctcagcctgctgagtagctgggattacaggtgcctgccaccatgcccagctaatttttgtatttttagtagagatgggatttcaccttagccaggatggtctcaatctcctgacctcagatgatccacccacctcagcctcccaaagtgctgggattataggcgtgaaccaccgtgcctggccttttaaaaaaaaaattttagattcatgggtacatgtgtgggtttgttatgtgggtatatagcttgatgctgaggttttggcttctaacgatcccatcacccagggagtgaacgcagctcccaacaggtggttttccagccctcgtcctcgtcctcctccccctcccacctgcccctctggagtccctggcgtctgctattccctctctgcgtcatgtgcatgcagcattcagctcccatggataagtgagaacacgtggttttggttttctgttcgggttgagttctcaggctgacggcctccagctgcatgtgtggctgcaggggacgtgctctcctccattttcccggctgcatcgagttcatggtctgtctgcacacgtgaggccacctgccaggccacatcccagcacaggcgtcatccagtgatttcctcatcggccagagtctgcgtctgcagctttgtgagccacgcggccatggcctgactctgtgccgagagccccgcagcggtggccacagacaatagtaagcaactgggtgtggctgggcgccaataaaactgtatttattaaaacaggcaaggggctgggctgcggcagggcccaggtgcctgggaaagaggtgggaccgggccccaacccccagctcggctcccaggaagacacacacagtgctgctgcctaatcctctctttatttggtctctgctgaagcagtcgtgccagcctcctagacacggcctcaggtttgtcgctgtccatgtcctccagcacccctcttaccagaccacaaggagctgcattatgatgtgtgacttaggtcttggttggagggctgagcggccgcaagtgctgggggaggctgcttggagcatgggaggcctgcgggtggaagacaccagggtgcagcctggtgcatggtccggggcttggcctccctatggggcgtggggggctgtggtacatgcagaggcggcggctgtcccagcagcctggccaggagataccgtggagaaggcacgtgtttgagttggcatcactgtccccagacgccctccctcgggtagagccgcctgtcctaggagaagctgtactccagatgcagtgggtgacaccctggtcactcagccacaccccggcccctcagcctctgctgtcctggccgcacatagagccctgtcctgctgtgtctgccgggcacaccccggtcactcagccacactggctcggcccagcgccttcccgaggtctgtgggggtccgggcggaggtggggtcagtgccgtgcgtgtttgatccagtttctgatcatccacttctgccccgagcacctctgtaccaccagccggagcccaaagttggcatctttggacatctccacctccaggcagcggcccgtggcccggctcacaatggggccactctgtggggacaggcacatcaagtcagccaggtgcaggcgtccttgttccccctccccccacctcagggaggctgcttcgtgctctcagccctcgtgctcattcttggggcagcttgaatggaaagccagcatcacagcagcacccaggggggccgggaaggggctgacttcagtggagcttcgaggatttcccatctttcctgcagggctagcggcccaggttggaatcatacctcatccccttcctaaatcctccctctaccctgggcacctgaggctggaagaggcagatgcagggctatgatcagactgtccagcccgacccctctctggctgtgtgaccctgaccagtcacctgccctctctgtgagcgtcggggcccataagggagcagctgatccaaggccccgtcccctgaccaccccctgccgcactccagctcccacccaatgggctggctctagtggcagaggcacccaggggtcccagcagccctgccccgccccaaccccacggccccccttccccagaggctgacctgggtgaagtcccacagnnnnnnnnnnnnnnnnnnnnnnnnnnnnnnnnnnnnnnnnnnnnnnnnnnnnnnnnnnnnnnnnnnnnnngcaagaaggctgtggagcccagaggccccagctgcagcaggccgtcagcgctgtaccgcaccagctggggacaggaccaccgggactgtgtgtgagcagcgcccaggctctccccagtgagcactgacaggccgtgcgagctgccttgagctgcaaacggggccctgcgcggctgccttggagcctcccaccccggggacgctgttgcgggcgggagaggaccgccgggcagggcccacgtggggatgcgggctggacggcacccaaatgctccgcagggccaggctcccggcttgcacagctggctggtcttccgcctggacagacgtcatgaatgtggctcagacccagagcgcggccccactcgtttcggggaggacaggagttgggtttaatttgggcaacatgcagtgccgtgtgtgagcggaacacgcattcccgtggggttagaaacgtccagctccttatgggggtcatggtcagaatggcctggaccttcactacggccagcccctgaccactgtgattctgcggggctggggctggggctggggctggggctggggctgggcctgggcctgggctgcaggtgagtcctgcccaggtggggagtgctcggaggtcaacagcactattgccgtgttaatccaccccagagccaatgcttcccacacttccgcttcaatcacgcgacagtcctgagcggtaagtgctgttgccgtctcccttgactgaggggggagtgatgcacccccagcccatctgaccccaaaggcctggttcctttttaattttttgagatacggtctcgctctgttgcccaggatggagtgcactggtgtgatctcagctcaacctccgcatcccaggctcaggtgatcctcctgcctcagcctcccgagcagctgggaatacgggcatgccccaccatgcccggctaatttttgtattttttgtagcgacagggtttcgccacgctgcccagactggtctcaattcctgggcttaagtgatctgtctgccttggcctcccatcgtgctgagatgacaggcgtgagccactgcacccggcccaggctgttttcaattccccgtgttctgctaccttccaggtggggcgggctgggaggcctcttctagaggggccctcaggctgctccaagccctggaatgcagccctggtggcctcagaacaccccagcaggctggccccgtgcctctgccccagggtgtagggtccgggtggcctggggtcgtccccttgggaactgcatgggtggccgctgctactcctacctgggaggacatcccgtggcaggggtagaggatcgcccggtcgccgtcctccgctccctggtccagacagtaggcactggctttgctgtttctcacctgcaagcagaagccccaggagaaagtccagagtcacccgagggtgcagccccagggagcttcacgcagccagctctgcagccagcacctaaggaggtgcccgcgggaggaggagggggcgtgtgggatgctctggccgggtgggccgcctgggaaggggtggctgaccgagtttgtcactgatggagacatggaagtgtccgccatgcacagatggagacttggccatcactccataggggaacacttgagcagcagggacgacagccccaggctgtggagtggcttccctgccttgccgcctgctccctgtgcccttgcggctcccactgagtgggtagagaccgctcgccagccttgcagtctaggctggccttggcttggacccttgggagaccttccagcttccactctgtcttggaaggaaccctgacagccctctgagaacaagcccgggccagactgctgggggatgtgttgtcatcgggcagccaacctccagcctccagaacaggcccatcggagatcagcacagcctggatcaggccagcagcactgcctgggtggccccggctcgtgagcaagtgtagatgcttattgcttttgtccaccgcgtctccaggctgctgggtttgcagcagcagctgacccatccaccacggccaccacgagaggtcacacaggtttgaattgggaccgttgaggaagcccagcagagtctggatgttacggctgctctgggttgggggtgcctgcacttggctaattgaggatggagtgggcagagtagaagcacagggaggctgggggagaggggcggcgccccgatgcacactcagcactgcctgggaaacctctgtgcccaagggactggagtcagcgcagggtggaccaggagctgcaggaggggaggctcagcgaggaccatccaccccagggacccttttccgtgccccatccgagtgccagctcagggctgggacgctcgagtctcatggtgggaggcgccccatcccctgcacagactggggagagggcagaagagcagcaccttctcgctggctttacggagtgctgtgcatgtgggggccagtggagacgggggtctctgtgtagctgatgggcctgtgtgagtgtgcatatcacccattgtgtgcatctgtgggggcaccttcatgcatgcacgctggtgtatgaacgtggctccgcatatgtggatgcacagacgtgtacacacacacattattttgcttgataacaagggcctgtgtgtttatctgtgcacaggcaggcccctttggggttcatgcacttagtgaaacatacatctgtgtaggaagagctgtgtacattagcaaaactgggtgcaaatgtatactcgtgtccgcgtgctcttgtacatatgagtgtttgcatggatttacgcacctgcctgtgaatgtctctgtacacacatctaggtgagtgcatgtatccctatgtacacatacgtgagagcgtaggtacattgaatcaggcaatgtgaacacgcatggatgtgactacacacctgcctgcctctagggaggtccatgtgaaggaatgggtgtgtatggacatgtgggtctgcaggtgcgtgtgtttatgtgaacctgcaccttgtgtgtgcacgtggatgtgcctgcatcaccgtgaatgcacacgtgtgtgcaggagtcagggcggaaggcctgtcgggccgagtgggaccctctgggggaggcgctacctctctgtgtgcatgtggatgtgcctgcatcaccctgaatgcatacgtgtgcaggagtcagggcagaaagcctgtcgggccgaacggggccctcgggggaggtgctacctctccgtacgtgagggtgttgttgtagaccctcatctccgggtacacgttctccaggtaccacttgaagctgcgacacttcagcctctgacgcagggccagcctctcagacacgtccccgaagtccacccctgggttctgcaaggccagaagtaggcgagagggtacgtgggtgtcaccatgacctgggtcttccccataatgaggttgggggtctccagggaccaagtsccctcacaggagcagcctcccccccagtattcagatgctgaggccccatccggccccatccagktgggaccccccccagcctcctaatatccacagagggtctgaggcagctgctcctgatgggaaggaccctgccagaggccagccccggcctggacagacggcccctgctgcagccggctcgtccacacccacccgggcccaggaacctcctgcctgagaagacggccctgctcacctggccttactgcacggcatcagcctgacctctggagggtggagactgaggtcagccatatccacgagaccagcctggtgaggaccctggatactgaggcttgggggctcctggctggccccgcctggcacgtgttgtcacgcatgggtgccggagaatcaagtccttgggaccccccgcggggggacacctgagagcttgtacctggcctttcctggtccctgcccaggcgtctcttccctctgctgactttgacccgtgtcctctgccgtgagaacccacagccgagtgcggtgtctgtgtcttcctgggactgtggggcctgagaggctgtagggaccagcactctgacggacagccagccctgagggagcacctgcaccctgcccagggaccctccaggctcaggccttgtggggagggcagacgacttggccttcacggcctgggcttgaatcccgtcaccttctggtatgtgggcctgggacagtcccctaycttctctgtgcctcagttactcattggtaaagtggggacgatcacgccagaaactcattgttgctctgttatgaggttttaatcagccaaggggctcacaccagggcccttggacacggaggtgacaggcatttgccggcctcactgcccgggggcctggagcmcctcactcagttgcccacacacttggggaggtcatcaccctgcacgttttccttatcacttcatggaaaacaaggctgtaggagcaccgggtaccctcttctcgtctctcagacacgagtgcacgtgtctacggctcctgatctgcctggcgggagctgatatgggggctggatgctggatttgcagtgaatggtccagcccggggccacttcaggccgtgtcacccacacgctggggtgcactctagcagggggtggtaagccaatttaggggctgtggtgggaakttttaagaagtagtaatattgtaaatgagaagggtcactttggtgctacgtacacaaagcgctgtatgtggacagatgtaaatgtatgcgtgtgtgcgctgggtcatgccttaagatctggctcattagggttgatgcagacaagcccgtttctaagatgagccctcccagaactcagggacccagtgcctgcagtggccagggaaggaagggggtggttccagagacgctggggtgtggcgggatgggtcgcggccacccgtctcagtacctgcctttcttagggttgtgggggtggggcgctttgagaaaagccagaattcaggctctttatgggaaattacaaattagaaaacaaacagcaatcctcaacttgaagcgggtcagccactcataggccaaagcccaacaggaaacaaccaaaaacgtccatccacggacgagtggatccacacgaggggccctttcacactgtggacgtgactcagccatggtgggggtgacctggaaaaggtggcgctgaggacgggaagccacacagcgtatgagccgttcatgaaaccgccagacagttgaggctgcccggggctggggaggggtccgcactggctgacaggtgcygtgcagggcactaagtggggccctggctgaggcggcggcaccaggttggggagaggccgcccctccctggcttctaaccacggggcaattgctctaggctgagaggaaaaacgcccaccacaccggggtgggtgtgagctggtctcttcccagtgtgaggaaggctccttcccaggcagacagctcacccactcacacctgcacacacaactgcttgcacctgtgcacacctgtcaacacacccactcacacctgcagggggccctagggggcctccctccggcccagccctgccgtggcattgaccccgaccctggggcatggccccggctcccggcctgtgggggactcaccgacatggggatgttccaggccatgtacacgtgggacttgaagtcatccatccacacctcggcggygcgcagggcgttgcgcttggcrtagtagtcaatgtcgttgttgtagggcttcctggtgcgctcgatgtgggccacgcgggagcagggcagcacctccatgctgccgccacactgccacacctgcggggagacggcgctgggtgccggcgtccttcccaacggargcgggcagcccggccagctaggggcccgtgagaggccaaggggcccggccctctgttcctggggcacccccaccaccgacgggcctggtgggtcccggggctttgcctctcgggggctgttttcaggggaccccgcccacagagaaagttcaggtctgggttgcgtcctctctgggacttctttctcttgtgcgttacacgatggctgtggggaggggggtttattctaccgaccccaacacttaacaggtttttcaccctgtggttcccacccccagtgcttgttctgtgcagggaaccccccgccccactgcaccagccacctcccccagcacccgaacacaccaacaatctgtttacaaacagctgcttgccatgcagacaccgctccacgcatccccagaacacacacaatcaaaagcccaaccagcctccgctaataaaaccccgcagcccctggctttctgaacccccacgcgcagcagaaacgtgtttgtcactgcgtatccttttatgcttccttccgtgtcgttccacttaagcaataccagccttcctacacgtgctctttcactccggtttgtccccccgcgctgtcctgcctgtgagggttggttttgtgtcagcgtggcagggaacagggtgctgggacgtttgctctcccgattctgggtggtctgtgcatggcctctggtgggagccatgtttaaatctgtcccctacaggcctgagtaggacagaaaggccgaggcagggagtgttcacacactctgctcgattcgggctgggacgtgggtcctcccctgccttcaggcttggagctcacgccaccggctctcctgggcgcctgccagccgacggccaatctcggtaccctcagcccccgtaaccgggtgagtcaattccttagatgaactttcacagctaagcccacgtccccaccatctgctattaatctgtttccctggagagccctgagccagccccgtcccatcctatcctaccctatcctgtgctgtcccatcccatccaccccattaaaaaaaggccgatgccacccacgggctgacatcactatgaacaaatgggtctgatccacgtggcccaagctccgccgtgctcaggtcctcagccctgagcctgccatgctggacgagtgtgccaggcccagggcgggcactgtgcttgcctcatctcctgaatccccccaccacccgagaaagggtgggcagccctggcattgccccgttccctccgcggtgctgagaaggtgccgaggccgagggtggtgccaactgcaggggcgcacggggtggagcctctgcccagctgagctcggatccctcagtcatccctggactctggttcatcctcgtccaggctgctctcatctccaggccgttatcttaatcatgtctgcaaagatcccttttcccaaagagggccacactcacacgtcccctagctgcatcctccgggggtcgcctgtcagcccagcccaccccagaggcccagtcccttgtgtgggggagcagggggctcctccctcccccggactctctgccttcaggaagccgagtcccagggagagagagaaccgggaggccgtatcgccaatcacttacggctgctccgacaccacccaccgcaggacagatccagagtcyggggcaggagggagccgctccctcctygccgagatgaccacacagcacgcagctaacgccaggctccctgaccccggtccggcaacccagagcctcctcgctgctcagctcagcccagccggggacacccccgccccacagtcccacgtcacccacaggggtccggctccttccccgggatggtggagtccgcggcgccgccgtgccaggctgaagttggcctttgcatcccgagggagcgaaccgcgtttctgcatcaggttcacatcgtggcaggtggtttctgggtttctgtctgttgtctctgctgtgggacaacctgcctgagaaaagcctggggttttccagccccctgagccggggcttcctttctgccttccagactagggtcgggatttctgttcgcagcgggaaggggccccgctggtgaatcccgcccaccgccctcccactccgcggatgtctcccaccctcaacctgagaccacccaggtttcgtgagaaggaggggggaagcacctcggagccctgcccttcgctggaaggggccggaacgaaggaagctctgcaggggcgggacagagcctcgtcctccatcgtctgcccacccgtcttcagaagcgcctggcacactggcctctgggacgacctccagcagtttcagcctccttgtctacccccagtacagaggccacggtgactcggtccccccacccaccacagaatcctgtcctcgggcctcacgctggggaacacgaagccccccagggctcctgacgcctgccttgcccaccccctgggttcgaagcaccttggccttcccagcacccccacgtgcacccctcagggccttggcacaggtggtgcccacgccgggcgcccttcccaggtctctgcatgctccactgcctccagccttcaaagctctagtgccagagagattagttaaaggcacaaaaccagccgggcacaggggcctcacacttgtaattccagcactttgggaggccgaggtgggtggatcacttgaggccaggagttcgagaccagcctggccaacatgatgaaaccccatgtctactaaaaatacaaaaattagctgggcatggtggcagatgcctgtagtcccagctactcaggaggctgaaacatgagaatctcttgaaccygggaggcagaggtgacagtgagctgagatcacaccactgcactgcagcctgggcgacagagcgagactccgtctcaaaaaaaaaaaaaaaaggaccaaaaccacaggcagagaggagccagtgctggtgccgctgagggaggaccgtggacctgaccgtgacccagccggcaactgggaggaggagccgagcccccacacaaggaaatggcaaatgtggagatggcggctgacctgagtgcggcacaccataccccgtgaacggggacaatcctatttgtccattaaaaaaaccagcgagcctgggcaacatagtgagacaccacctccacagaaaaaaacaaaattagccaggtgtggtggtgcatgcctgcggtcccagctgcttgggaggctgaggcgggaggatcacctgagcccgggaggttgaggctgcagtgagccaagatcacgtaacgctctccaacctgggttaaagagtgagaccctgtctgaaaacataaaaagtaaaaataaaccccaaatgtcaccatcaagtcttcagggtgagtcctctccctccatcctgtttagagccgccgtccttgccccatagctgggcgtccggaccagaggctcacacccctcagtatggcgccgcctgctatccgtccccgtctctgcctgtccctccccatggctcagctccgcaggacagggtttctgtcgcttctgctcacagctgcctcccagtgctcagagcgaggccgggcacacagtaggtgcttgataaatagctgcggaacgaatgtgttccctttaggaaccccacagccacttacggccactctgtccccggggccttctgtggcgctggggcrattccacatgggaacctggtgggactgctgggcggtctgcgaggcctccccaagccagctccacaggtgccagccccgtcagtgtgtgctgagcttgcgggtggtgccgaggccccttcttgggtgaatgcagcctcaggtctctcggccctcgggtcccccaccgtgtctctagaaggaccgaagctacaggagaggcgaggctcccgggcggtgggagtcggccaacttccatcattagctgaggacctgtcacagccggggactgggctgcttcagtctccgggcttgggccgcagacccctgagctttcggggtgtgtgaggtgccccctaagcacaagggcccacggcttgcgtgacctggcttttcagcagggccattagctcaggagtgataaagtcggagagtgaacccccatgccctcagcaacatcccctttccaatccctgcaaaacagggaaagaacaagacagcccccaccccccaccacgactcctcgcgcaagcagcactggtgtgtggcgtccccacacccggggcaggtctcttttctgcgtcagagttaatgaccgtgtagtttttcacatattttgaagccagggaccagtatatcatctgccttgtgccgcgctccccgggagattgatgcttatgcagagggagaatttaaaggctctcccatcacagcctcaagggaaacagtttaacccctctataaatttcagatgaatattggcaataacttctccactctgtgggccagaggagaccaacacctaaggatcaggcaaaatcctcccacaggagccagaggcacttggcccccctctcaggggctctcaagaggcaggaggcccgggcccctccccttcctggccacactagaggaagatcaggtgaaggaggccggagcccggctggcactctgcactgagagcaactggggataagctggactcgccttctggcgtctgtgtgtgcagctctccccactgagagggggaygctatcaccctaggccttcgtcacgtgatttgcttggaccaacagaaagggccagaacccacccagtgccaaggccaagcttgggcctcaggagactgcactcacaccgatctctgtcttgtaacctggccgccagcatgaggatgagagaccatgtggagcagagagaagccgcccagctgagcccattcctccccaccccaaccagccaaccccgctcacctggctgctgactgccggcatcagcaaggccagctgagagcagagccgctctgctccacatagaccatgtgccaacccagagttgtgggccaaggaaatggttgtcttaggccgcaacatttcagagtggattgttacacatccaagagctgacccatccatgctgctttggcaggtacagctggcaaagaccctcactcctgtggcttccttgcatgcagcacatagtaccagttaatgctagttactagccatgcatccccactgcccaagacaatccgagytgatacccctgtcttggggtaattattaatagcacctctggtaactctcaggtgtcctggtttgggtgacgatgcctgtggtcacccccgtgctacctgaccatctggccccacagccagggcggaagtccaagcattagagccattcaaaccacatcgtgaacaggggctgggtaagatgaggctgagacccactgggctgcattcccagatggtgaaggcactctaagtcacaggatgagataggaggtcggcacaagacacaggtcacaaagaccttgctgataaaataggttgcagtaggccgggtgcggtggctcacgcctgtaatcccagcagtttgggaggctgaggtgggtggatcatgaagtcaagagatcgtgaccatcctggccaacatggtgaaatgccrtctttactaaaaaaaataaataaataaataaataaaaaataaaaaattagctgggcatggtggcgtgcacctgtagtcccagctacttgggaggctgaggcaggagaattgcttgaacttgggaagcaaaggttgcagtgagccgagatcgcaccattgcactccagcctgrgtgacagagcaagacttcatctcaaacaaacaaacaggttccagtaaaggagccgccaagtcccaccaaaaccaagatggcaacgagtgacttgtggtcatcctcacggctcattttatgctcattataatgcattagctgctaaaagacactccccccagcaccaagacagttcacagatgccatgggaacgtcaggaagttaccctgcgtggtctaaaaagggtggagccctcagttcsgggaaatcctgctgcctttcccagaaaactcaggaataatccatcccttgtttagcaaatgatcaaaaaataaccacaaaagttaattagtaaataatcaaccagcagccctgggggccactctgcctgtggagcagccattcttctctttacttcatttctttacttctctaataaacttgctttcactttactctgtggactcgccccgaattctgccttgtacaagatccaagaggcctctcttggggtctggatggggacccctttctggtcacacgaggaagacacgggtggcgtgggtgacacaccaaggctgaggggccgtcactaactgcagaggccagagatgggaaaacaggagactcctccagagatgggtgggtccctggggcccgtcgtctgcaggccccgggctggcacatcacagcgagaggagagacaggagaggggccctgctgcgcgtgggcgttgggtcaaaaactccccctgtacattcaggactgacgttgtctttggcggcgctgtgggcctggcaaagggcctgcgggcgaggccgtcccgtgaagtcggacctgttcttctggtcaaggcaagcaaagcaacagggctcgtagggttctcctggaagcgctggggacatgcggcctycatcgtgaaactgtcatctagaggggaggcaggcgaggctcagacgtcacactcatcacgtgtgggtgcagctggaggactgagyggggccatgaggcttgggcaggaggtgcgccctggctggggacagcttcctgaaccccagctctgagcggagatgggtggcgagtggggttaactggcggtgagacacaggcatgcttgaggcccgagccccgtcctcctgggctgtggggctgtgcagagctggcatgggcaggctgtgctgcggtcagggaagctgaccatcttaatggttgaattgagaagaagctccaacttgccaaaagccaaacttgcaccaaaaaagggcttggtcgccatctggaggtcgccgtctggcggttgccatctgggtggtcgccgtctggaggtcgccgtctggaggtcgccgtctggcggttgccatctggaggtcgccgtctgggtggtcgctgtctggaggtcgctgtctggtggtcggctgccggcctgactcacaacagctttctgaatsctggcaaaaccatcacacttgagaggtgcgctcagcaaatccatgagatgcaccaaaaatcgcggtgcctgccgccggcctcagtccacagaaagggcccagttcttctccaccacaacgcctggctgcacgtcacacaaccaacgcttcacaagctgaacgaattgggctgcaaagttttgcctcatccgccacattcacctgacttctcrccaaccaactaccgcttctgcaagcctctcgacaactttttgcagagaaaacgcttccacaaccagcaggatgcagaaaatgctttccaagagtttgtcaaatcctgaagcacagatatatttatgctacaggaataaacgaacttatttctcattggcaaaaatgtgttgattgtaatgcttcctattttgacgaataaaggtgtgtttgagcctagttataatgatttaaagttcatgatccgaaactgtaattacttttgcaccgacctagtacgagaaaacacctcagacgctgtcaccacagcagtgaggaggcaacctcgtgtctattcggtcaaaccacatgcagctgcctttcgcgctggccagaaacagccgtgtatccgcagtcttactgtgatccgctcactccgtccacccwctctcgtccacctggccattctgtgtccctcatcctctgtctccaccgtggttttcccgaatattctctctgtgaaaggcagcaggcccagagcttcccagagcatttccccctctccatcgaggggaccctggggcaggtccttcaagagcatttgtgggaattaggagacgggcacggaaggctgaggagtatgtccaagtcacccagccagcacctgaggcagccagactccaaacttggtccccaacagcaggccacgtgctcacacactgcacccctgccctgcaatccacgcctgtgggctgtggcccatgtgacggttttacatctgctcaggaggtgaaggtcccattattcagtggatgtgaggtgctgctgggaccatgtctgcagctgtgagtgatgcttgcgtcagtggacactccgcatggcagcggacgtgcacgcaggcaggccccacccagccaggcattgagagaaaagacgggtggggagttcccagagaaggatgccagccttcagaccgtgacacggaaaccccacccgggtctacagccttcacaccacgacacggaaaccccacccgggtctgcagccttcagacctcgacacggaaaccccacccgggtctgcagccctcagacctcgacacggaaaccccacccgggtctgcagccctcagacctcgacasggaaaccccacccgkgtctgcagccctcagacctcgacacggaaaccccacccgggtctgcagccctcagacctcgacacggaaaccccacccgggtctgcagccctcagacctcgacacggaaaccccacccgggtctgcagccctcagacckygacacggaaaccccacccgggtctgcagccctcagacckygacacggaaaccccacccgggtctgcagccctcagaccgtgacacggaaaccccacccgggtctgcagccctcagacctcgacacggaaaccccacccgggtctgcagctctcagaccgtgacatggaaaccccacccgggtctgcagccctcagaccgtgacatggaaaccccacccgggtctacagccttgagaccgtgacacggaaaccccacccgagtctacagccttsagacctcgacacggaaaccccacccgggtctgcagccctcagacctcgacacggaaaccccacccgggtctgcagccttcagacctcgacacggaaaccccacccggktctgcagccctcagacctcgacacggaaaccccacccgggtctgcagccttcagaccatgacacagaaaacccacccactgcccaccttaaggatctcagacttggcaaccccacaattgtgtgagccaattcttagaatcaatcaatttcttcacacacacacatgaaaatgcaccgcagatgcacacgtgtgcaacataatcactcagtcaagcatacacatgcactgttacccccacacacaggcacactcacacccacacccacagtcacacacacgcactccactcacacacaggcgcactcacacacacgcactcccwcccacatacaggcgcactcacacagtcacacacaggcactcccacctacacacagtcacacacacacactcacacacatgtgcactcagctgtcattcctgtcagcctctgatgtacctgcagggacagctcattctgtgagcacctaggggttctggggtcagccctcatgtccgaggaggggtgttcaggggacatgaggcccactgtggcctctgcattctccaggtggcaccggggacctgaggaggccccagcttgctgccagctctctcgagcagaatgcagacacgtcccagaagctgaaagaaagagcctcgactgcatcagttggtgcgcgtgggcrctgacagtccagaacagcccggtcacggagcagccctggagatgcaggcccaaccccaccccctatgtccgcacaccctccctgcagcatgagtccagggacacccgcgactccgagtcctcaaccacccccgctccctgccaggtcaggcrtggggatgggggtctgggcccctcrgtcctcccaggtgaaagccgggacaccaccctcacaaggattaccaggaggggcactgmccccaagggcacctggagaagagagagcygattccggggtgccgtgtgtgaggtccctgatggtggctcctttggagatggctggagaaccacgcctgtgaktccactgtccctaaccaggccagcgactccgccctccctcaccacaccggcgactccaccgtcagcaggagcccagggatgaagggggcgagcaggagcggagcccgtgtattaatcatgctttcatattttctgtatctgatgctttgacatctggaacctcactagcccgagaggcctgcccctcccgggtgagtgatttcctagagctagtgagcacccccccagcgtctttccaaatgcaaaccaggcaacgagagtccacgccccaccagccaacgcgaatccacagcccactgcctctgtccttcactctgggctaccatcctcccrcccaaccactcaggaggatggcccatgccccagagctgctgagacgatggaagccaggccccccaggcctgctcacccggccttgcccattcctggccacatccccctcataccctctgcctcctgtccagcctggtgcctcctgggtggccctgcctggtggtacccccttctctgggatccgtgcgtaacaaaccatctcaccaatggccattgtctcctggcctgctggctgcgctgtcctgaataacgataaagccacttggagaccagggcaggcggtggcaccctgttcctgctcagttctgtggcacgccattcctgctcagctcctgatcttgcagagcaggggatgcacacccgtcacagaggcccatctcactgttctacgcggatctggaagattctggctgacaggcaaagccagcgtgaggctgtgagagtggagaaacctgccggcctctgtagcaccctccgctggtgctgactggcctgtcagcgtcctcacctgccacgctgtcctgcccgtttaagggcgtttgggaggaaacgcgacacaatcgctgttggtttccagacgccgggtctccgcagctctgggtggctttgtggccgcttcggcagaacagacacaggtttcatcggggccctgcctggagccccagctctttctcgtggtttgcaggtgacacagcccaggctctcagggacaaaagtacttcctcgcacaccgagctgcaatttaccagccctcctgtcgggctgtaggccccacacacgagacacagtcagtttctaaayggaggccaggacgcggcgcccggcaccgcctggatgccagtgcagcccggggaggattgctgggtgtggccctsgctcttggtgaggctgtttrtgtgctggcctcgacggagagcacaagcagctcctccagggagggcgtgcttcctccctttcccaagagcgctgccatgccrgggcttggcgagtgcggggaccactccgagggccaggcaaggctagcgtggcccagggtccacttgatcctgcttgttggctccaagaccgaggttcaagaatgaagccagccctctttgtatcatcaggacacacatgccaaccagcacctgggtcccacgaggccgggctggcaccatcacagccaccacgtggctcacgtggcagcacagagcagccagtgggcatgggcggggggcagcctcgcatggccacatgggacccagcacgggacccaggtgccctccatcacctcctgggtgctggccctcccggactcacagcaggggatggagagggggtgagggggcggagagtagggttggggggtgcttctgggccaggcctgaggggctgcgtccccctccccaatcccctgtccaggactcagccaaaggactcctaagggacagtggctggacgtgtggagggaagggagacggtggcggggcacacacaggggcttgtcccatgccctctaatgatagacagagacatagagagacgtagacagagacacagaaacagagacagaaagatacagagannnnnnnnnnnnnnnnnnnnnnnnnnnnnnnnnnnnnnnnnnnnnnnnnnnnnnnnnnnnnnnnnnnnnatacagagacccagagatggagagacagaggcatgagatagagacataagacagagacatgagagacagacacggagagagagacaaaggaacagattatagagaagacagagatagagatgaagacacagagaaagacacacaaacagaggaagacagagagacagagagaggggcacagccccttgcttctctccccacagggtccctcacacagggagaacaatgtggaggctttcctggaagggtcatttgctgacgacgtcctggagaccagcaccaagcactctcatctgcaggmaggacggtgcgtggcacagccgcaggcccagcgaggagccaggacctgggtgctgagcgcagtctgcagcctyrgaggacggggtgttttctgtggcaggaatgggacagggagggggtccacaggcaggcggcactgagtgtcccccatgtccagctcctccctggtctccgctgggtgtcttccttcctaagatctgcgtrcccacgtggctaccttgggaggtgttccagcatctggggggatgagcagttttctctttgggccgctgactgggatgcccactcacaagactrgagagaagccrtggctgcttctgtggccaaagttcacctcttcacttggcaccgttctgagctcgaggctttggctcccaggcagcctgtgaggcggcatttctgggcttttcgcccttgtgggcagtctgcccttgtaagtgggaagaagaatttggggataacttggctctttcttgactgataggtttagctgtgtgacgaactgtgtgtttccttttgggtgttgtgatccactaaactgttataaaatctggttttcactttgaaaataatgaggatgagacttcacctctcaagttatggccaccatttgctcaagcccacctctcttccattttgccaatattccttggatacagtaactgatagaatgacccactcatccacccatttacccatctactcacttattcacgcacctagccactatctatccacccatccacgcggactcatccatccatccatccctgcatccagccagccatccattcatccatccatgcatcccacccmcccatccatccaytcactcatccatctatctatccatccagccagccagccaycaatccatccattcacccatccatccacccactcatccatccattcctttatccatccatctacctactcattcacccacctagccactatctatccattcatctacatgcactcatccatccatccactcattcatctatccatccatccctgcatccagccagccatccattcacccacccatgcatccccacccatccatccatccatccctgcatccaaccagccaaccattcatccatccactcactctatccatctatccatccagccatcccccactcatccatccatccatccatccagccatccatccatccattcacccatcccatccacccactcatccatccattcctttatccatccatctacctactcattcacccacctagccactatctatccattcatccacacgcactcatccatccatccatccactcatgcatctatccacccatccatccctgcatccacccagccatnnnnnnnnnnnnnnnnnnnnnnnnnnnnnnnnnnnnnnnnnnnnnnnnnnnnnnnnnnnnnnnnnnnnnnnnnnnnnnnnnnnnnnnnnnnnnnnnnnnnnnnnnnnnnnnnnnnnnnnnnnnnnnnnnnnnnnnnnnnnnnnnnnnnnnnnnnnnnnnnnnnnnnnnnnnnnnnnnnnnnnnnnnnnnnnnnnnnnnnnnnnnnnnnnnnnnnnnnnnnnnnnnnnnnnnnnnnnnnnnnnnnnnnnnnnnnnnnnnnnnnnnnnnnnnnnnnnnnnnnnnnnnnnnnnnnnnnnnnnnnnnnnnnnnnnnnnnnnnnnnnnnnnnnnnnnnnnnnnnnnnnnnnnnnnnnnnnnnnnnnnnnnnnnnnnnnnnnnnnnnnnnnnnnnnnnnnnnnnnnnnnnnnnnnnnnnnnnnnnnnnnnnnnnnnnnnnnnnnnnnnnnnnnnnnnnnnnnnnnnnnnnnnnnnnnnnnnnnnnnnnnnnnnnnnnnnnnnnnnnnnnnnnnnnnnnnnnnnnnnnnnnnnnnnnnnnnnnnnnnnnnnnnnnnnnnnnnnnnnnnnnnnnnnnnnnnnnnnnnnnnnnnnnnnnnnnnnnnnnnnnnnnnnnnnnnnnnnnnnnnnnnnnnnnnnnnnnnnnnnnnnnnnnnnnnnnnnnnnnnnnnnnnnnnnnnnnnnnnnnnnnnnnnnnnnnnnnnnnnnnnnnnnnnnnnnnnnnnnnnnnnnnnnnnnnnnnnnnnnnnnnnnnnnnnnnnnnnnnnnnnnnnnnnnnnnnnnnnnnnnnnnnnnnnnnnnnnnnnnnnnnnnnnnnnnnnnnnnnnnnnnnnnnnnnnnnnnnnnnnnnnnnnnnnnnnnnnnnnnnnnnnnnnnnnnnnnnnnnnnnnnnnnnnnnnnnnnnnnnnnnnnnnnnnnnnnnnnnnnnnnnnnnnnnnnnnnnnnnnnnnnnnnnnnnnnnnnnnnnnnnnnnnnnnnnnnnnnnnnnnnnnnnnnnnnnnnnnnnnnnnnnnnnnnnnnnnnnnnnnnnnnnnnnnnnnnnnnnnnnnnnnnnnnnnnnnnnnnnnnnnnnnnnnnnnnnnnnnnnnnnnnnnnnnnnnnnnnnnnnnnnnnnnnnnnnnnnnnnnnnnnnnnnnnnnnnnnnnnnnnnnnnnnnnnnnnnnnnnnnnnnnnnnnnnnnnnnnnnnnnnnnnnnnnnnnnnnnnnnnnnnnnnnnnnnnnnnnnnnnnnnnnnnnnnnnnnnnnnnnnnnnnnnnnnnnnnnnnnnnnnnnnnnnnnnnnnnnnnnnnnnnnnnnnnnnnnnnnnnnnnnnnnnnnnnnnnnnnnnnnnnnnnnnnnnnnnnnnnnnnnnnnnnnnnnnnnnnnnnnnnnnnnnnnnnnnnnnnnnnnnnnnnnnnnnnnnnnnnnnnnnnnnnnnnnnnnnnnnnnnnnnnnnnnnnnnnnnnnnnnnnnnnnnnnnnnnnnnnnnnnnnnnnnnnnnnnnnnnnnnnnnnnnnnnnnnnnnnnnnnnnnnnnnnnnnnnnnnnnnnnnnnnnnnnnnnnnnnnnnnnnnnnnnnnnnnnnnnnnnnnnnnnnnnnnnnnnnnnnnnnnnnnnnnnnnnnnnnnnnnnnnnnnnnnnnnnnnnnnnnnnnnnnnnnnnnnnnnnnnnnnnnnnnnnnnnnnnnnnnnnnnnnnnnnnnnnnnnnnnnnnnnnnnnnnnnnnnnnnnnnnnnnnnnnnnnnnnnnnnnnnnnnnnnnnnnnnnnnnnnnnnnnnnnnnnnnnnnnnnnnnnnnnnnnnnnnnnnnnnnnnnnnnnnnnnnnnnnnnnnnnnnnnnnnnnnnnnnnnnnnnnnnnnnnnnnnnnnnnnnnnnnnnnnnnnnnnnnnnnnnnnnnnnnnnnnnnnnnnnnnnnnnnnnnnnnnnnnnnnnnnnnnnnnnnnnnnnnnnnnnnnnnnnnnnnnnnnnnnnnnnnnnnnnnnnnnnnnnnnnnnnnnnnnnnnnnnnnnnnnnnnnnnnnnnnnnnnnnnnnnnnnnnnnnnnnnnnnnnnnnnnnnnnnnnnnnnnnnnnnnnnnnnnnnnnnnnnnnnnnnnnnnnnnnnnnnnnnnnnnnnnnnnnnnnnnnnnnnnnnnnnnnnnnnnnnnnnnnnnnnnnnnnnnnnnnnnnnnnnnnnnnnnnnnnnnnnnnnnnnnnnnnnnnnnnnnnnnnnnnnnnnnnnnnnnnnnnnnnnnnnnnnnnnnnnnnnnnnnnnnnnnnnnnnnnnnnnnnnnnnnnnnnnnnnnnnnnnnnnnnnnnnnnnnnnnnnnnnnnnnnnnnnnnnnnnnnnnnnnnnnnnnnnnnnnnnnnnnnnnnnnnnnnnnnnnnnnnnnnnnnnnnnnnnnnnnnnnnnnnnnnnnnnnnnnnnnnnnnnnnnnnnnnnnnnnnnnnnnnnnnnnnnnnnnnnnnnnnnnnnnnnnnnnnnnnnnnnnnnnnnnnnnnnnnnnnnnnnnnnnnnnnnnnnnnnnnnnnnnnnnnnnnnnnnnnnnnnnnnnnnnnnnnnnnnnnnnnnnnnnnnnnnnnnnnnnnnnnnnnnnnnnnnnnnnnnnnnnnnnnnnnnnnnnnnnnnnnnnnnnnnnnnnnnnnnnnnnnnnnnnnnnnnnnnnnnnnnnnnnnnnnnnnnnnnnnnnnnnnnnnnnnnnnnnnnnnnnnnnnnnnnnnnnnnnnnnnnnnnnnnnnnnnnnnnnnnnnnnnnnnnnnnnnnnnnnnnnnnnnnnnnnnnnnnnnnnnnnnnnnnnnnnnnnnnnnnnnnnnnnnnnnnnnnnnnnnnnnnnnnnnnnnnnnnnnnnnnnnnnnnnnnnnnnnnnnnnnnnnnnnnnnnnnnnnnnnnnnnnnnnnnnnnnnnnnnnnnnnnnnnnnnnnnnnnnnnnnnnnnnnnnnnnnnnnnnnnnnnnnnnnnnnnnnnnnnnnnnnnnnnnnnnnnnnnnnnnnnnnnnnnnnnnnnnnnnnnnnnnnnnnnnnnnnnnnnnnnnnnnnnnnnnnnnnnnnnnnnnnnnnnnnnnnnnnnnnnnnnnnnnnnnnnnnnnnnnnnnnnnnnnnnnnnnnnnnnnnnnnnnnnnnnnnnnnnnnnnnnnnnnnnnnnnnnnnnnnnnnnnnnnnnnnnnnnnnnnnnnnnnnnnnnnnnnnnnnnnnnnnnnnnnnnnnnnnnnnnnnnnnnnnnnnnnnnnnnnnnnnnnnnnnnnnnnnnnnnnnnnnnnnnnnnnnnnnnnnnnnnnnnnnnnnnnnnnnnnnnnnnnnnnnnnnnnnnnnnnnnnnnnnnnnnnnnnnnnnnnnnnnnnnnnnnnnnnnnnnnnnnnnnnnnnnnnnnnnnnnnnnnnnnnnnnnnnnnnnnnnnnnnnnnnnnnnnnnnnnnnnnnnnnnnnnnnnnnnnnnnnnnnnnnnnnnnnnnnnnnnnnnnnnnnnnnnnnnnnnnnnnnnnnnnnnnnnnnnnnnnnnnnnnnnnnnnnnnnnnnnnnnnnnnnnnnnnnnnnnnnnnnnnnnnnnnnnnnnnnnnnnnnnnnnnnnnnnnnnnnnnnnnnnnnnnnnnnnnnnnnnnnnnnnnnnnnnnnnnnnnnnnnnnnnnnnnnnnnnnnnnnnnnnnnnnnnnnnnnnnnnnnnnnnnnnnnnnnnnnnnnnnnnnnnnnnnnnnnnnnnnnnnnnnnnnnnnnnnnnnnnnnnnnnnnnnnnnnnnnnnnnnnnnnnnnnnnnnnnnnnnnnnnnnnnnnnnnnnnnnnnnnnnnnnnnnnnnnnnnnnnnnnnnnnnnnnnnnnnnnnnnnnnnnnnnnnnnnnnnnnnnnnnnnnnnnnnnnnnnnnnnnnnnnnnnnnnnnnnnnnnnnnnnnnnnnnnnnnnnnnnnnnnnnnnnnnnnnnnnnnnnnnnnnnnnnnnnnnnnnnnnnnnnnnnnnnnnnnnnnnnnnnnnnnnnnnnnnnnnnnnnnnnnnnnnnnnnnnnnnnnnnnnnnnnnnnnnnnnnnnnnnnnnnnnnnnnnnnnnnnnnnnnnnnnnnnnnnnnnnnnnnnnnnnnnnnnnnnnnnnnnnnnnnnnnnnnnnnnnnnnnnnnnnnnnnnnnnnnnnnnnnnnnnnnnnnnnnnnnnnnnnnnnnnnnnnnnnnnnnnnnnnnnnnnnnnnnnnnnnnnnnnnnnnnnnnnnnnnnnnnnnnnnnnnnnnnnnnnnnnnnnnnnnnnnnnnnnnnnnnnnnnnnnnnnnnnnnnnnnnnnnnnnnnnnnnnnnnnnnnnnnnnnnnnnnnnnnnnnnnnnnnnnnnnnnnnnnnnnnnnnnnnnnnnnnnnnnnnnnnnnnnnnnnnnnnnnnnnnnnnnnnnnnnnnnnnnnnnnnnnnnnnnnnnnnnnnnnnnnnnnnnnnnnnnnnnnnnnnnnnnnnnnnnnnnnnnnnnnnnnnnnnnnnnnnnnnnnnnnnnnnnnnnnnnnnnnnnnnnnnnnnnnnnnnnnnnnnnnnnnnnnnnnnnnnnnnnnnnnnnnnnnnnnnnnnnnnnnnnnnnnnnnnnnnnnnnnnnnnnnnnnnnnnnnnnnnnnnnnnnnnnnnnnnnnnnnnnnnnnnnnnnnnnnnnnnnnnnnnnnnnnnnnnnnnnnnnnnnnnnnnnnnnnnnnnnnnnnnnnnnnnnnnnnnnnnnnnnnnnnnnnnnnnnnnnnnnnnnnnnnnnnnnnnnnnnnnnnnnnnnnnnnnnnnnnnnnnnnnnnnnnnnnnnnnnnnnnnnnnnnnnnnnnnnnnnnnnnnnnnnnnnnnnnnnnnnnnnnnnnnnnnnnnnnnnnnnnnnnnnnnnnnnnnnnnnnnnnnnnnnnnnnnnnnnnnnnnnnnnnnnnnnnnnnnnnnnnnnnnnnnnnnnnnnnnnnnnnnnnnnnnnnnnnnnnnnnnnnnnnnnnnnnnnnnnnnnnnnnnnnnnnnnnnnnnnnnnnnnnnnnnnnnnnnnnnnnnnnnnnnnnnnnnnnnnnnnnnnnnnnnnnnnnnnnnnnnnnnnnnnnnnnnnnnnnnnnnnnnnnnnnnnnnnnnnnnnnnnnnnnnnnnnnnnnnnnnnnnnnnnnnnnnnnnnnnnnnnnnnnnnnnnnnnnnnnnnnnnnnnnnnnnnnnnnnnnnnnnnnnnnnnnnnnnnnnnnnnnnnnnnnnnnnnnnnnnnnnnnnnnnnnnnnnnnnnnnnnnnnnnnnnnnnnnnnnnnnnnnnnnnnnnnnnnnnnnnnnnnnnnnnnnnnnnnnnnnnnnnnnnnnnnnnnnnnnnnnnnnnnnnnnnnnnnnnnnnnnnnnnnnnnnnnnnnnnnnnnnnnnnnnnnnnnnnnnnnnnnnnnnnnnnnnnnnnnnnnnnnnnnnnnnnnnnnnnnnnnnnnnnnnnnnnnnnnnnnnnnnnnnnnnnnnnnnnnnnnnnnnnnnnnnnnnnnnnnnnnnnnnnnnnnnnnnnnnnnnnnnnnnnnnnnnnnnnnnnnnnnnnnnnnnnnnnnnnnnnnnnnnnnnnnnnnnnnnnnnnnnnnnnnnnnnnnnnnnnnnnnnnnnnnnnnnnnnnnnnnnnnnnnnnnnnnnnnnnnnnnnnnnnnnnnnnnnnnnnnnnnnnnnnnnnnnnnnnnnnnnnnnnnnnnnnnnnnnnnnnnnnnnnnnnnnnnnnnnnnnnnnnnnnnnnnnnnnnnnnnnnnnnnnnnnnnnnnnnnnnnnnnnnnnnnnnnnnnnnnnnnnnnnnnnnnnnnnnnnnnnnnnnnnnnnnnnnnnnnnnnnnnnnnnnnnnnnnnnnnnnnnnnnnnnnnnnnnnnnnnnnnnnnnnnnnnnnnnnnnnnnnnnnnnnnnnnnnnnnnnnnnnnnnnnnnnnnnnnnnnnnnnnnnnnnnnnnnnnnnnnnnnnnnnnnnnnnnnnnnnnnnnnnnnnnnnnnnnnnnnnnnnnnnnnnnnnnnnnnnnnnnnnnnnnnnnnnnnnnnnnnnnnnnnnnnnnnnnnnnnnnnnnnnnnnnnnnnnnnnnnnnnnnnnnnnnnnnnnnnnnnnnnnnnnnnnnnnnnnnnnnnnnnnnnnnnnnnnnnnnnnnnnnnnnnnnnnnnnnnnnnnnnnnnnnnnnnnnnnnnnnnnnnnnnnnnnnnnnnnnnnnnnnnnnnnnnnnnnnnnnnnnnnnnnnnnnnnnnnnnnnnnnnnnnnnnnnnnnnnnnnnnnnnnnnnnnnnnnnnnnnnnnnnnnnnnnnnnnnnnnnnnnnnnnnnnnnnnnnnnnnnnnnnnnnnnnnnnnnnnnnnnnnnnnnnnnnnnnnnnnnnnnnnnnnnnnnnnnnnnnnnnnnnnnnnnnnnnnnnnnnnnnnnnnnnnnnnnnnnnnnnnnnnnnnnnnnnnnnnnnnnnnnnnnnnnnnnnnnnnnnnnnnnnnnnnnnnnnnnnnnnnnnnnnnnnnnnnnnnnnnnnnnnnnnnnnnnnnnnnnnnnnnnnnnnnnnnnnnnnnnnnnnnnnnnnnnnnnnnnnnnnnnnnnnnnnnnnnnnnnnnnnnnnnnnnnnnnnnnnnnnnnnnnnnnnnnnnnnnnnnnnnnnnnnnnnnnnnnnnnnnnnnnnnnnnnnnnnnnnnnnnnnnnnnnnnnnnnnnnnnnnnnnnnnnnnnnnnnnnnnnnnnnnnnnnnnnnnnnnnnnnnnnnnnnnnnnnnnnnnnnnnnnnnnnnnnnnnnnnnnnnnnnnnnnnnnnnnnnnnnnnnnnnnnnnnnnnnnnnnnnnnnnnnnnnnnnnnnnnnnnnnnnnnnnnnnnnnnnnnnnnnnnnnnnnnnnnnnnnnnnnnnnnnnnnnnnnnnnnnnnnnnnnnnnnnnnnnnnnnnnnnnnnnnnnnnnnnnnnnnnnnnnnnnnnnnnnnnnnnnnnnnnnnnnnnnnnnnnnnnnnnnnnnnnnnnnnnnnnnnnnnnnnnnnnnnnnnnnnnnnnnnnnnnnnnnnnnnnnnnnnnnnnnnnnnnnnnnnnnnnnnnnnnnnnnnnnnnnnnnnnnnnnnnnnnnnnnnnnnnnnnnnnnnnnnnnnnnnnnnnnnnnnnnnnnnnnnnnnnnnnnnnnnnnnnnnnnnnnnnnnnnnnnnnnnnnnnnnnnnnnnnnnnnnnnnnnnnnnnnnnnnnnnnnnnnnnnnnnnnnnnnnnnnnnnnnnnnnnnnnnnnnnnnnnnnnnnnnnnnnnnnnnnnnnnnnnnnnnnnnnnnnnnnnnnnnnnnnnnnnnnnnnnnnnnnnnnnnnnnnnnnnnnnnnnnnnnnnnnnnnnnnnnnnnnnnnnnnnnnnnnnnnnnnnnnnnnnnnnnnnnnnnnnnnnnnnnnnnnnnnnnnnnnnnnnnnnnnnnnnnnnnnnnnnnnnnnnnnnnnnnnnnnnnnnnnnnnnnnnnnnnnnnnnnnnnnnnnnnnnnnnnnnnnnnnnnnnnnnnnnnnnnnnnnnnnnnnnnnnnnnnnnnnnnnnnnnnnnnnnnnnnnnnnnnnnnnnnnnnnnnnnnnnnnnnnnnnnnnnnnnnnnnnnnnnnnnnnnnnnnnnnnnnnnnnnnnnnnnnnnnnnnnnnnnnnnnnnnnnnnnnnnnnnnnnnnnnnnnnnnnnnnnnnnnnnnnnnnnnnnnnnnnnnnnnnnnnnnnnnnnnnnnnnnnnnnnnnnnnnnnnnnnnnnnnnnnnnnnnnnnnnnnnnnnnnnnnnnnnnnnnnnnnnnnnnnnnnnnnnnnnnnnnnnnnnnnnnnnnnnnnnnnnnnnnnnnnnnnnnnnnnnnnnnnnnnnnnnnnnnnnnnnnnnnnnnnnnnnnnnnnnnnnnnnnnnnnnnnnnnnnnnnnnnnnnnnnnnnnnnnnnnnnnnnnnnnnnnnnnnnnnnnnnnnnnnnnnnnnnnnnnnnnnnnnnnnnnnnnnnnnnnnnnnnnnnnnnnnnnnnnnnnnnnnnnnnnnnnnnnnnnnnnnnnnnnnnnnnnnnnnnnnnnnnnnnnnnnnnnnnnnnnnnnnnnnnnnnnnnnnnnnnnnnnnnnnnnnnnnnnnnnnnnnnnnnnnnnnnnnnnnnnnnnnnnnnnnnnnnnnnnnnnnnnnnnnnnnnnnnnnnnnnnnnnnnnnnnnnnnnnnnnnnnnnnnnnnnnnnnnnnnnnnnnnnnnnnnnnnnnnnnnnnnnnnnnnnnnnnnnnnnnnnnnnnnnnnnnnnnnnnnnnnnnnnnnnnnnnnnnnnnnnnnnnnnnnnnnnnnnnnnnnnnnnnnnnnnnnnnnnnnnnnnnnnnnnnnnnnnnnnnnnnnnnnnnnnnnnnnnnnnnnnnnnnnnnnnnnnnnnnnnnnnnnnnnnnnnnnnnnnnnnnnnnnnnnnnnnnnnnnnnnnnnnnnnnnnnnnnnnnnnnnnnnnnnnnnnnnnnnnnnnnnnnnnnnnnnnnnnnnnnnnnnnnnnnnnnnnnnnnnnnnnnnnnnnnnnnnnnnnnnnnnnnnnnnnnnnnnnnnnnnnnnnnnnnnnnnnnnnnnnnnnnnnnnnnnnnnnnnnnnnnnnnnnnnnnnnnnnnnnnnnnnnnnnnnnnnnnnnnnnnnnnnnnnnnnnnnnnnnnnnnnnnnnnnnnnnnnnnnnnnnnnnnnnnnnnnnnnnnnnnnnnnnnnnnnnnnnnnnnnnnnnnnnnnnnnnnnnnnnnnnnnnnnnnnnnnnnnnnnnnnnnnnnnnnnnnnnnnnnnnnnnnnnnnnnnnnnnnnnnnnnnnnnnnnnnnnnnnnnnnnnnnnnnnnnnnnnnnnnnnnnnnnnnnnnnnnnnnnnnnnnnnnnnnnnnnnnnnnnnnnnnnnnnnnnnnnnnnnnnnnnnnnntgcgtttcctgagtcagtaatttcgcttctagaaattcagcctgaggaaatggctagggcatgaggagagactcagcatacaggaagaatcgtttctgtgccagatggaacggaggcaccgaaatggctccccagctcgtcagcagaaccccggggcaccagcgtgcagctgtgcatggtgccgtccccgaacgcgtgtggggaagtgcattgcacggacaaaggcctgcgaccctctccccggcccagctccccgaccctgctggccgcagctccctccgaagcgtgtgcctgtgaaagcaacacctcaggccgcgttacacccaggcacacgcacgcaccacagacagagtctgacagacgcagacgggctccagcgaggtgcacgtctcggcccagacagaggcagaattgtgggtgatttttattttgttctagttaacttatatccagtgcttttacatctaaaacagcttttctaaagaaaagaaaactggtgtttaaggaatgtctgcacgtgatgaaaattagcatgcttgctgtatcccaggcactgagagccccactgcgtttaatcctgaaagagccccaggggtgtagtcgtattgtcatccttagtgacagatggggaaacggaggctcagggtacggaggcagccccgctggttaatgggcagaggcagggtccaaaggcaacgtggaggggtcttctgaagacccctcgtgctcagcggggcttccccacagggatgtgcaaatggacagagacctccccgtccccacaccttcttgctctgagcctcggtttccccatctgtctcctccctgcagcctggaggcctggttgacctgctgaggttgagcaggggctgtgggcaggtgagtggcccgtcttgtagctacagcctgctctgtggtctgctggggagtggcggtgccagacttggtgaggacgccatgtgccgccccagcaggggtggcgggggggcaccaaccacctgtggctggaacaagcccttggacaaagcagctctagagaacaagaacagggcttcagtctctctccagcctctccctctgccctccactcatgcagaaaggagacacccccgcgtccctccccggcgtccctctgacacctgcatccctccccggcgtccctccccagcgtccctctgaccccggcactccctttccctgagtgtgggtggcggggcggcccgtcagcacctcctcgctccctccccagaggaagggtgatacctctttgcctctggcgaggcagggcggcccgtcagcacctcctcgctccctccccagaggaagggtgatacctctttgcctctggcaagacagggcggccmgtcagcacctcctcgctccctccccagaggaagggtgacacctctttgcctctggcgagacagggcttattaacaggatcttgatgaacccacccccttggagaattgcaaaagccacccccccggccccagacgttctgatgctcacacagccccccagcggagtggggtctcgagggtccaggaggtgccttccgtgtgcaagaggaggttttcctgtaacacccgaggagcagcatgtccgagcgtttcaagacagagagcaaacgatttccaacttccgctctgcagatggctttcctggcccgactctcacacttgattccgtcctgacctttattaagcctaatagacgcgatggactcattttcctctaactggctctaggactttcctcattagaagatgagcagctggcatttctaccgtcgcagaaatgtaaattggccccaagacgggagaattactcctctaattgggctgaattgatcagagaggccgccggtgtggacgggttagacacgggtgcacaggagccaggggcagaacacatggccacgtggtcctggggcacacacctgtgccagtgcatggggcagggggccgccctcccctggacacgtaccagtctcagggcggcagagcctttgcccttgccaatccctctgctggaacactgttccctgcagctgcctctgctcctccatcctggctcacaggtggccgctccgtgcaccgttccctggtcttctccccacttaggcctctccaccgcaggtggagcccacgccccatctcgccctgggtcaccagaggcaagccccacgaggcgcacgctttgtctgctttgctctctgtggaacctgaacccagagcagcctccagcacctgagctcactcaggagtctgttcagccaatgaataactcgyttccctttgacgccccacccgtcctgccctggcacgagcactttatggagagactatccagatgacttatctgytcattcactaatgccccagacaccgaccacaccccgcggcaggccccagggccacactcgcaggcacagccccgcagtaagtcctgctctcatgagcacgcgtgacggggatggggctgggagagaggccgcctgtgcctcagcggggccgtccccacccttctcgggccacacggccggcatggttggcaagcttagctgggaagccaccagcctctccctgagtcccaggcgagaaagaaatcatggtcaccggcatctgtgaagcaccaactcagtgccagktacgggrttcagggcaccacaggtgttcactgatttaatcctaataaaggaatcctttctccgatgaggaagccggggctgtgagaagctaggagcttgcccaaggtcaccgtccgtcggtggtggagtcacaggctctcagccccaatctcagccacctcactctgctgaacaagcaaagaacagtgaaatacacaaagaatgcacattcccggacccttctgccaggccgacctgggtcccggtgccgcccccttgaacctgggcaggcgtgtggctgcatccatcaacagtcgccaccgggtcatccaaggtggggcacagagggcatcgtaattccagcctgggccaccaaaattcacataccaccaggaagcccagctgtggagaggccgcgcacagccacctgccccagctgaaccctccggagtccacgcaccccctgccatgtgtgtgcgtgccccttgctggacgtcctgcctgtgagccttgtgatgggggccgccacacaggacagcatccgccttcccgagttcctgacccacaagattgtgaacaaaatgaaacagtcactttaagccactaaattatggggtgatctgctacaaggcaaaaggagctggggtacaaaccaactgcaggggggtttggtgggtctacgggcacctggcgttcgctgccagatcgacgggcatagaaaaagccccataacccacgcgggctggggagccctttaatccgtccactgccaaggccacgctgcctggccctcgtggcgggggagtcctgttaatctgtccactgccaaggccgcgccacctggccctcgtggcggggaagtcctcacggagtggatgagaaggctgcccgggcaggaccccttccccgcagcccttaaatcagaagggtgaggcccggtcctcctgtagctgggacacggcatattttggcagggaggggctggctgacgtgtgatagccacactggaggctgaggtatgtgttaacggggtaacagtccgggttaatggatcgatttattttgttggtgtttcagcctcccttgagctcattacaggcagaccacaccgcaggccactgcagggctcccaacctccattcgggacgtcttggtgagactctgctgagcctcacactcttctgggcactggaaaagtagtgacagagactcaccctagtgccacacactcgatggagtgacagaggagacagcgtggagtccctagtgccacacactcgatggggcgacagaggagacagcgtggagtccctagtgccacacactcgatggggcgacagaggagacagcgtggagcccctactgccacacactccatggggcgacagaggagacagcgtggagcccctagtgccacacactcgatggggcgacagaggagacagcgtggagcccctagtgccacacactcgatggggcgacagaggagacagcgtggagtccctagtgccacacactcgatggggcgacagaggagacagcgtggagtccctagtgccacacactcgatggggcgacagaggagacagcgtggagcccctagtgccannnnnnnnnnnnnnnnnnnnnnnnnnnnnnnnnnnnnnnnnnnnnnnnnnnnnnnnnnnnnnnnnnnnnnnnnnnnnnnnnnnnnnnnnnnnnnnnnnnnnnnnnnnnnnnnnnnnnnnnnnnnnnnnnnnnnnnnnnnnnnnnnnnnnnnnnnnnnnnnnnnnnnnnnnnnnnnnnnnnnnnnnnnnnnnnnnnnnnnnnnnnnnnnnnnnnnnnnnnnnnnnnnnnnnnnnnnnnnnnnnnnnnnnnnnnnnnnnnnnnnnnnnnnnnnnnnnnnnnnnnnnnnnnnnnnnnnnnnnnnnnnnnnnnnnnnnnnnnnnnnnnnnnnnnnnnnnnnnnnnnnnnnnnnnnnnnnnnnnnnnnnnnnnnnnnnnnnnnnnnnnnnnnnnnnnnnnnnnnnnnnnnnnnnnnnnnnnnnnnnnnnnnnnnnnnnnnnnnnnnnnnnnnnnnnnnnnnnnnnnnnnnnnnnnnnnnnnnnnnnnnnnnnnnnnnnnnnnnnnnnnnnnnnnnnnnnnnnnnnnnnnnnnnnnnnnnnnnnnnnnnnnnnnnnnnnnnnnnnnnnnnnnnnnnnnnnnnnnnnnnnnnnnnnnnnnnnnnnnnnnnnnnnnnnnnnnnnnnnnnnnnnnnnnnnnnnnnnnnnnnnnnnnnnnnnnnnnnnnnnnnnnnnnnnnnnnnnnnnnnnnnnnnnnnnnnnnnnnnnnnnnnnnnnnnnnnnnnnnnnnnnnnnnnnnnnnnnnnnnnnnnnnnnnnnnnnnnnnnnnnnnnnnnnnnnnnnnnnnnnnnnnnnnnnnnnnnnnnnnnnnnnnnnnnnnnnnnnnnnnnnnnnnnnnnnnnnnnnnnnnnnnnnnnnnnnnnnnnnnnnnnnnnnnnnnnnnnnnnnnnnnnnnnnnnnnnnnnnnnnnnnnnnnnnnnnnnnnnnnnnnnnnnnnnnnnnnnnnnnnnnnnnnnnnnnnnnnnnnnnnnnnnnnnnnnnnnnnnnnnnnnnnnnnnnnnnnnnnnnnnnnnnnnnnnnnnnnnnnnnnnnnnnnnnnnnnnnnnnnnnnnnnnnnnnnnnnnnnnnnnnnnnnnnnnnnnnnnnnnnnnnnnnnnnnnnnnnnnnnnnnnnnnnnnnnnnnnnnnnnnnnnnnnnnnnnnnnnnnnnnnnnnnnnnnnnnnnnnnnnnnnnnnnnnnnnnnnnnnnnnnnnnnnnnnnnnnnnnnnnnnnnnnnnnnnnnnnnnnnnnnnnnnnnnnnnnnnnnnnnnnnnnnnnnnnnnnnnnnnnnnnnnnnnnnnnnnnnnnnnnnnnnnnnnnnnnnnnnnnnnnnnnnnnnnnnnnnnnnnnnnnnnnnnnnnnnnnnnnnnnnnnnnnnnnnnnnnnnnnnnnnnnnnnnnnnnnnnnnnnnnnnnnnnnnnnnnnnnnnnnnnnnnnnnnnnnnnnnnnnnnnnnnnnnnnnnnnnnnnnnnnnnnnnnnnnnnnnnnnnnnnnnnnnnnnnnnnnnnnnnnnnnnnnnnnnnnnnnnnnnnnnnnnnnnnnnnnnnnnnnnnnnnnnnnnnnnnnnnnnnnnnnnnnnnnnnnnnnnnnnnnnnnnnnnnnnnnnnnnnnnnnnnnnnnnnnnnnnnnnnnnnnnnnnnnnnnnnnnnnnnnnnnnnnnnnnnnnnnnnnnnnnnnnnnnnnnnnnnnnnnnnnnnnnnnnnnnnnnnnnnnnnnnnnnnnnnnnnnnnnnnnnnnnnnnnnnnnnnnnnnnnnnnnnnnnnnnnnnnnnnnnnnnnnnnnnnnnnnnnnnnnnnnnnnnnnnnnnnnnnnnnnnnnnnnnnnnnnnnnnnnnnnnnnnnnnnnnnnnnnnnnnnnnnnnnnnnnnnnnnnnnnnnnnnnnnnnnnnnnnnnnnnnnnnnnnnnnnnnnnnnnnnnnnnnnnnnnnnnnnnnnnnnnnnnnnnnnnnnnnnnnnnnnnnnnnnnnnnnnnnnnnnnnnnnnnnnnnnnnnnnnnnnnnnnnnnnnnnnnnnnnnnnnnnnnnnnnnnnnnnnnnnnnnnnnnnnnnnnnnnnnnnnnnnnnnnnnnnnnnnnnnnnnnnnnnnnnnnnnnnnnnnnnnnnnnnnnnnnnnnnnnnnnnnnnnnnnnnnnnnnnnnnnnnnnnnnnnnnnnnnnnnnnnnnnnnnnnnnnnnnnnnnnnnnnnnnnnnnnnnnnnnnnnnnnnnnnnnnnnnnnnnnnnnnnnnnnnnnnnnnnnnnnnnnnnnnnnnnnnnnnnnnnnnnnnnnnnnnnnnnnnnnnnnnnnnnnnnnnnnnnnnnnnnnnnnnnnnnnnnnnnnnnnnnnnnnnnnnnnnnnnnnnnnnnnnnnnnnnnnnnnnnnnnnnnnnnnnnnnnnnnnnnnnnnnnnnnnnnnnnnnnnnnnnnnnnnnnnnnnnnnnnnnnnnnnnnnnnnnnnnnnnnnnnnnnnnnnnnnnnnnnnnnnnnnnnnnnnnnnnnnnnnnnnnnnnnnnnnnnnnnnnnnnnnnnnnnnnnnnnnnnnnnnnnnnnnnnnnnnnnnnnnnnnnnnnnnnnnnnnnnnnnnnnnnnnnnnnnnnnnnnnnnnnnnnnnnnnnnnnnnnnnnnnnnnnnnnnnnnnnnnnnnnnnnnnnnnnnnnnnnnnnnnnnnnnnnnnnnnnnnnnnnnnnnnnnnnnnnnnnnnnnnnnnnnnnnnnnnnnnnnnnnnnnnnnnnnnnnnnnnnnnnnnnnnnnnnnnnnnnnnnnnnnnnnnnnnnnnnnnnnnnnnnnnnnnnnnnnnnnnnnnnnnnnnnnnnnnnnnnnnnnnnnnnnnnnnnnnnnnnnnnnnnnnnnnnnnnnnnnnnnnnnnnnnnnnnnnnnnnnnnnnnnnnnnnnnnnnnnnnnnnnnnnnnnnnnnnnnnnnnnnnnnnnnnnnnnnnnnnnnnnnnnnnnnnnnnnnnnnnnnnnnnnnnnnnnnnnnnnnnnnnnnnnnnnnnnnnnnnnnnnnnnnnnnnnnnnnnnnncaggagggtcccccgggctggtagttcaaccctcgggacagggcaggagggtcccccgggctggagttcaaccctcgggacagggcaggagggtcccccgggctggagttcaaccctcgggacagggcaggagggtcccccgggctggagttcaaccctcgggacagggcaggagggtcccccgggctggagttcaaccctcgggacagggcaggagggtcccccgggctggagttcaaccctcgggacagggcaggagggtcccccgggctggagttcaaccctcgggacagggcaggagggtcccccgggctggagttcaaccctcgggacagggcaggagggtcccccgggctggagttcaaccctcgggacagggcaggagggtcccccgggctggagttcaaccctcgggacagggcagaagatcccctgggctggagttcaaggtcagacgggcctttcaartacaagcaaatgccagcctccctcccccaggcatcgatctcgtgaataaatcagcaatgacagccccgacaggcggctggcggggagcgggtgggggccatggccctggagtgggggtcgcggtgggcctgggtcggggccaagggagccacatccagtgtgggggctgcgggctccaggcctggtgtctctggagggggcctcggaaccggaggggaagaccccacagcgtctgcggagctccctgaggccccatagcacctgtcatcacggctgccagggagtcagctctgcaaaatcatcacagacgtggggggatggcgtctctccctcccccagccctttccccttccttccttcccaccttctttcctttcttctatctttcctttcaagctccaaacttgcactttgatttccttcaagagtccacccttatctgtacctggttaaaataatcagcgaaaaccaaagccatcccgaagatcgcccagcctcgcaaggtgtaaggtttcggggcatcaagcctggcctcggccagccacgcctcctgggggtctcccgtgtctaagtcttgctgtgcccccaatttcaagtcagtggtgatccctgtggtctatcctgggcatggcggcccctcatgcccgttttcccagggttggtttggctgtggtctttgtggcatcgggatgggaaagccatgtgggtgctggtcgtgtggcctcccacagcctggcttcctcccgcaggccccacagctgttcttatcctcatccaatctggtaaccctcgtatcctggatctctccgggtgctccatggcccatgggattccgcccaggtcctcttctccactggacttctcctccatctctcagggagcccagggctgccctgaccccagtgtggagcggccaggtctctcgggactgtggctgctgaggctgtgcaggcagtgtgggacccagggctggttggctgtgtcctgacctggagtctggctgccttcacgtggagctcctgtatctgccgtgtaccctcagctgccccaggccacctgatcacacccgtccacacctgttcatacctgtmcacacctgctcacacccatccacaccagttcacagctgctcacacctgcccaaacctgctcacagctgcctgcacctgcctacaccttctgacatctgcttataccgtacacaggtgctcacacctgcccaaacacctgcctacaccttctgacacctgcttttacctgttcactgctgctcacacctgcccatacctgtttacacctgcacacagctgcccacacctgctgacacctgcatacagctgcctgtacctacctacgcctactcacaactgcatatacctgctcacacctgctaacacctgccagtaactgctcacaccacacacctgctcacaccacacacctgcccacagctgcctctgcaggagatgcccagtgtggtggttcgtgggtgggggatggggtcccctcccttctgctcaggcaaaggaaatatgtgctcagttcggggccacctgtgcagaattggtggggcctgacgcagcctcaccacgtggcatggaagcaagcccgggacagcgcttgacccgagcggacaggcatctgccaggcctgcggtggaggttggggggtggaaccctccatctgtggcatgtgacccaaaacctctgcatgagggacccccgtgccaggcctgcccctgctgccctccagcttcagggcctctacctctccccagcgtgcggcctagacccaggccctcaggaaacatctgtgaccccagcagacggggagccaggcaaggactctgcagtgggtgagccaaggtcaggtggaggtcacgtgtgtttcctgtggctgccgtccgccacgaattccacagctcggtggcttgaaggacatagtcatgaccttacagcaacgagcctggctgatgcttccaaggctaaggacgcgggcaggggctgcccaggacccaggagagaggggagagagggggcgtcatcccagagcccatgagggacacggccggctgctgggtccctcacggcggagaccgaggactcccctttgcaggtagctctggggtcactggcgagggggacagagctggatggggggcttcaggaggggccgggcagggggacgtggagacggcgcactcataaccctactacggcttcctgtaagggggagtggaggccggggcagcagccgcaggggcgacatggtgtcaaggtctcctggacattgtgccactgctggtgccagagagaccacggttttgcagatgcccaggacaggccagagggcggggccgtggcatggggaggggctgccctagggatggggactcctggcctggctgacctgcacctgggccagtggaaggcgaaggtgggcaggcctgagtgtgagtctcacatccatctgctgcgtggccctgggcaggtcactcagcctctctgggcctcagctcctccccagggctgtgggaggggccaggagaatgacagcctgattcctccgccccctcatctgcaggccacccgcccagggacgtgctaccatttacctaacacacgtctttaaatccacccaaaggataactgcatgaattttaacaggaaactctttatcactgccttaggagaggaccattatctcttgccaaaaatgagagataactgtacaaataaatacaataagatacacaccgcagttaaagtggttggataccacagtctggaaggctttgtcgtctgatggccgctcgaaaggtgagactgttcagcatcagaggtgctctagaacctggcctagattttcctcttgaaataatcagaaagcttagaagagaacgggggtacttttcaggatgagggagaattttttatcttcatgtgggggtgggggccacacagcattgacatctgtcagaacccaggagctgtgtgggggtgggggacaggcagagagagagacagagagacacagagacagagaaagagacacatacactgagagactgagagacagagagacacagagacagagacacagagagacagagagagacacacactgagagactgagagacagagagacagagtcagagacagagtcagagacagagagagagacacacagagacagagacacagagacagaaagagagacacacactgagagactgagagacagagagacagagtcagagacagagaggcagagagagacagagagacaaagagacagagatacagagagacagagagagacacacacactgagagactgagatacagagagacagagtcagagacagtcagagacagagagacacagagacagagacacagagagacagagagagacacacacactgagagactgagagacagagagacagagtcagagacagagtcagagacagagagagacagagagacaaagagacagagatacagacagactgagacaaagagacacagagagacaaaaagactgggagagacagagacagagacatggagagaatgaggcagagactgggaggcagagacagatgcagagacagagataaagagacacagaaagactgagagagacaaagagagacagacacaaggagtatagagtgacacagagagacagaccacagagagagatgcagagagaggggaatcatttcttgtgaggggcctggcctcaggcagccgcctgcctgggagctgctaggctgtctggtgtctggggagaggagtgatcagaggtgaagagtggctccccaacccaggcccgcygctctaaacacaggaagatccacagtccttgggcagtttatagaactgctccccttggggcctatcaggatgtgtggtcttaaatcattgctgtttaatattcaacagttgctccactgagaacaagcgtatttaggggacgttgcttgagaggaatctcctctctaaatggcggggttgagtggggtggtcgccctacaggtcagggatctggaatatgaccaagtcaggcgccgccatcgggctgggggtcaccgtgcccctccctgtagccccggcccggctctggcctctggccggcagactccagggctgcagggagaccccactgtacaccccatgctggccaggtggctggtgaaagggaccctttggcttccagcctccacttgttcagcgcagacatggcctcagaaccagccctcagaacggagcaagaatagccgtgcccagctcggaccccgggcggcactcactccagtcgctggcagtgctgctgtgggcctggcgtggccccagggctcagctgtgggctccgtgcgtggccccggggctcggctgtgggctccgtgcgtggccccggggctcggctgtgctctatgggcctcggacctgctcctcttcactctctgccgtgtttttcttcctcttttattctgtttataatttaccttatcttgctggaacccttctgtttcctgggaagttaccagaacctgatcaccagcagaattggaatgtgcagtatgatctatacatgtttacacacatgccacacacccttcccaaggccgtccctatacccattacacacacaccacacccccttcccagggccgtccctatacccattacacacacaccacacacccttcccggggccctccctatacccattacacacacgccacacccccttcccggggccctccctatacccattacacacacgccacgcccccttcccggggccctccctatacccatttacacacacgccacgcccccttcccggggccctccctatacccattacacacacaacacacacttcccggggccctccctatacccattaaacacacaacacacccttcccggggccctccctatccccattacacacacgccacacccccttcccggggccttccctatacccattacacacacaacacacacccttcccggggccctccctatacccattacacacacaacacacacttcccggggccctccctatacccattacacacacaacacacacccttcccagggccctccctatacccattacacacacaacacacccccttcccggggccctccctatacccattacacacacgccacacccccttcccggggccctccctatacccattacacacacaccacacacccttccaggggccctccctatacccattacacacacgccacacacccttcccggggccctccctatacccattacacacacgccacaccaccttcccggggccctccctatacccattacacacacgccacacacccttacaggggccctccctatacccattacacacacgccacacccccttcctggggacctccctatacccattacacacacgccacacccccttcccggggccctccctatacccattacacacacgccacacccccttcccagggacctccctatccccattacacacacgccacacccccttcccggggccctccctatacccattacacacacaacacacccccttcccggggccctccctatacccattaaacacacaacacacccccttcccagggccctccctatacccattacacacacaacacacaccctttccggggccctccctatacccattacacacacgccacacacccttcccggggccctccctatacccattacacacacaccacaccccctttccggggccctccctatacccattacacacacaccacacccccttcccggggccctccctatacccattacacacacaacacacaccctttccggggccctccctatacccattacacacacaccacacaccctttccgggggcctccctatacccattacacacacgccacacccccttcccggggccctccctatacccattacacacacgccacacacccttcccggggccctccctatacccattacacacacgccacacccccttcccggggccctccctatacccattacacacacaacacacacttcccggggccctccctatacccattacacacacaccacacacccttcccggggggccatcagggcccccagtggcctcagtgtccagtcctccccgtcctccggagctctctctggtgggggccccagtcctcctcgtcttccggagctctctctctctggtgggggccccacctggccgacctgaaggtcagggcatccactctttggggaaacgaagttgggttcgtaggggcagctctggtgttgttggtccttccctccagacaccacgtctcttcgtctggctcccaggagaccccagttctatttctatttctcccgcctctgtcatcccctcaaactgcttctgcatagcccccactctgcctctcaggctttaaccccaactgtgagccccacctggctgtcctggggccactgaactccacgtgtccatcgtggctctccccaacatgccaccacgcaccggctggcatnnnnnnnnnnnnnnnnnnnnnnnnnnnnnnnnnnnnnnnnnnnnnnnnnnnnnnnnnnnnnnnnnnnnnnnnnnnnnnnnnnnnnnnnnnnnnnnnnnnnnnnnnnnnnnnnnnnnnnnnnnnnnnnnnnnnnnnnnnnnnnnnnnnnnnnnnnnnnnnnnnnnnnnnnnnnnnnnnnnnnnnnnnnnnnnnnnnnnnnnnnnnnnnnnnnnnnnnnnnnnnnnnnnnnnnnnnnnnnnnnnnnnnnnnnnnnnnnnnnnnnnnnnnnnnnnnnnnnnnnnnnnnnnnnnnnnnnnnnnnnnnnnnnnnnnnnnnnnnnnnnnnnnnnnnnnnnnnnnnnnnnnnnnnnnnnnnnnnnnnnnnnnnnnnnnnnnnnnnnnnnnnnnnnnnnnnnnnnnnnnnnnnnnnnnnnnnnnnnnnnnnnnnnnnnnnnnnnnnnnnnnnnnnnnnnnnnnnnnnnnnnnnnnnnnnnnnnnnnnnnnnnnnnnnnnnnnnnnnnnnnnnnnnnnnnnnnnnnnnnnnnnnnnnnnnnnnnnnnnnnnnnnnnnnnnnnnnnnnnnnnnnnnnnnnnnnnnnnnnnnnnnnnnnnnnnnnnnnnnnnnnnnnnnnnnnnnnnnnnnnnnnnnnnnnnnnnnnnnnnnnnnnnnnnnnnnnnnnnnnnnnnnnnnnnnnnnnnnnnnnnnnnnnnnnnnnnnnnnnnnnnnnnnnnnnnnnnnnnnnnnnnnnnnnnnnnnnnnnnnnnnnnnnnnnnnnnnnnnnnnnnnnnnnnnnnnnnnnnnnnnnnnnnnnnnnnnnnnnnnnnnnnnnnnnnnnnnnnnnnnnnnnnnnnnnnnnnnnnnnnnnnnnnnnnnnnnnnnnnnnnnnnnnnnnnnnnnnnnnnnnnnnnnnnnnnnnnnnnnnnnnnnnnnnnnnnnnnnnnnnnnnnnnnnnnnnnnnnnnnnnnnnnnnnnnnnnnnnnnnnnnnnnnnnnnnnnnnnnnnnnnnnnnnnnnnnnnnnnnnnnnnnnnnnnnnnnnnnnnnnnnnnnnnnnnnnnnnnnnnnnnnnnnnnnnnnnnnnnnnnnnnnnnnnnnnnnnnnnnnnnnnnnnnnnnnnnnnnnnnnnnnnnnnnnnnnnnnnnnnnnnnnnnnnnnnnnnnnnnnnnnnnnnnnnnnnnnnnnnnnnnnnnnnnnnnnnnnnnnnnnnnnnnnnnnnnnnnnnnnnnnnnnnnnnnnnnnnnnnnnnnnnnnnnnnnnnnnnnnnnnnnnnnnnnnnnnnnnnnnnnnnnnnnnnnnnnnntacacacacaacacacccccttcccggggccttccctatacccattacacacacgccacacccccttccaggggccctccctatacccattacacacacgccacacccccttcccggggccctccctatacccattacacacacaacacacacacttcccggagccctccctatacccattacacacacgccacacacccttccaggggccctccctatacccattacacacacaacacacccccttcccggggccttccctatacccattacacacacgccacacccccttccaggggccctccctatacccattacacacacgccacacccccttcccggggccctccctatacccattacacacacaacacacacccttcccggagccccccctatacccattacacacacgccacacccccttccaggggccctccctatacccattacacacacaacacacccccttcccggggccctccctatacccattacacacacaacacacccccttccaggggccctccctatacccattacacacacgccacacccccttcccggggccctccctatacccattacacacacgccacacccccttcccggggccctccctatacccattacacacacaccacacccccttcccggggccctccctatacccattacacacacgccacacacccttcccggggccctccctatacccattacacacacaccacacccccttcccggggccctccctatacccattacacacacgccacacccccttcccggggccctccctatacccattacacacacgccacacccccttcccggggccctccctatacccattacacacacgccacacccccttcccggggccctccctatacccattacacacacaacacacacttcccggggccctccctatacccattacacacacaccacacacccttcccggggggccatcagggcccccagtggcctcagtgtccagtcctccccgtcctccggagctctctctggtgggggccccagtcctcctcgtcttccggagctctctctctctggtgggggccccacctggccgacctgaaggtcagggcatccactctttggggaaacgaagttgggttcgtaggggcagctctggtgttgttggtccttccctccagacaccacgtctcttcgtctggctcccaggagaccccagttctatttctatttctcccgcctctgtcatcccctcaaactgcttctgcatagcccccactctgcctctcaggctttaaccccaactgtgagccccacctggctgtcctggggccactgaactccacgtgtccatcgtggctctccccaacatgccaccacgcaccggctggcattctgtccctatgaaggccctgcctgcctggggactgggaatcagccgctgtcccagcccacccgtcaatcacccatcaatcaccggccaatcacccgtcaatcaccgtctcttgccagctttgcatcctaaatattttttggaagagtcccgtgtccgccacaccccacaagaaagaaagttcaccctactgggctcaacagtaaagatgttaatgaagggaagctttagggatgtgtggttaggggcatagggacagacgggggcagtgcaacctcaggggcggcaacgtgcagttctcgacaccggcagagtgaggcctcgggccggccactcggaccacggtgcagcttccaacaacctgtggtgcctccacgggccaagacagcctgcggtgcctccacgggccaagagcacaaggtgggaggagggaaggagctgggggactggaaagcggtggtcagcatctgagggcccggcagggctggggctagacgggggatgtggtgatggggctggacgggggggcgtggtgatggggctggacgggggcgtggtgatggggctggacgggggatgtggtgatggggctggacgggggggcgtggtgatggggctggacgggggcgtggtgatggggctggatgggggcgtggtgatggggctggacgggggggcgtggtgatggggctggacgggggcgtggtgatggggctggacgggggcgtggtgatggggctggatgggggcgtggtgatggggctggatgggggcgtggtgatgggggctggacgggggggcgtggtgatggggctggacgggggcgtggtgatggggctggacgggggcgtggtgatggggctggatgggggcgtggtgatggggctggacgggaggggcgtggtgatggggctggacgggggcgtggtgatggggctggacgggcagcatggtgatggagttggacgggggcgtggtgatggggacaggtgagtctcctgtccctcaccaggagaactgggttctggttctcagcctgtctcccaccgtagagcaacctctgaccgccagacaggacaccaaggtgaaaactttcaagcccccaggacgggagagaggtcagggggagaggtcgggggagaggtggcagggagggcagggaggtcagggagtggagtaaacgctgggcgcggccacagctgtgccttgtcaggggatgaaggtgaaagacagaacccgcggtgacacaggctcccctgccccgcggaggagtcaggccatcagaaaggcccctatgtcagccaggcgtggtggttcacacctggaatcccagcactgtgggaggcagaggcgggcagatcacctgagctcaggagtttgagactagcctgatcaacatggtgaaacctcgtctctactaaaagtacaaaaattagccgggcatggtggcatgtgcctgtggtgccacctacttgggaggctgaagcaggagaatcagttgaacccgggaggtggaggttgcagtgagcagagatcgtgccactgcactccagcctgggcaacagagtaagactctgtcttaaaaaaaagaaaggcccatgtgtcatggagacgggagggaagctctccaacggctgcagccagggccctctgtggtccggcacccacacccccagcccagcctgctgaccctcgcccagccagggccctccgtggtccggcacccacacccccagcccagcctgctgaccctcgcccagccagggccctccgtggtccagcacccacacccccagcccggcctgctgaccctcgcccaccacacaggttcgctgtcgtcccggctttgctctgagcctgagcctgggatgcacccacgacccagcctcctgggacctcctctcactgcagctgggtttggcccacgggagccgattttgtttggaggggaggtgggcgtgtttctcccctgggcccttcctgctgaggcgacttgtctttcactgacggtggctctgtccccaggaccacatctgctgggtgccctccaccccaggggtcccgtcctccctcgctcttcggcctcggtggtggctgcgcactgccggtccccggcaccctccccaggctgtcctcctcgtctctgcggtgcgttccatccctctgagggcctcggctttcttaggcccctgactgctggcctggtctcctgccccacagggtgagcatcaggggagacggtgagagaagccgacacccgcgtgggtgcgttcaatccacggccgacccgccaaggtctggtgtttaacaatcacagcagttaagggaagtcagaatattaaagaacctgccagattaacttccagcttccattttaaaaatgtgtaattgaggattgattctagatgtgcagtttaaaatcggacaggatgagaggattaaaggcacctgcaaacagtcctgacatccttcacagatctggtctcaattcaatttattaaactagatattttaaagcacttggtcggggggatttctggtatgatatcaggcattcaaagtgattaaaagaaaataaaacactatgtttgtaagtgccatttttaaaaggctcaagggactttaaaggcacaaaagcagtgaattctgtttcacggtattattttattttattttatcatatattttttgaaatggagtctcactctgtcacccaggctggagtgcagtgatgcgatctcagctcactgcaatttccgcctcctgggttcaagtgattctcctgcctcagcctcctgagtagctgggattataggcatgcaccaccatgcctggttaatttttgtattttttagtagaggcagggttttannnnnnnnnnnnnnnnnnnnnnnnnnnnnnnnnnnnnnnnnnnnnnnnnnnnnnnnnnnnnnnnnnnnnnnnnnnnnnnnnnnnnnnnnnnnnnnnnnnnnnnnnnnnnnnnnnnnnnnnnnnnnnnnntctgacctcatgatccacccacctctgcctcccacagtgttgggattacaggcgtgagcctcagtgcccggcctcacagtattatttaatctgcccaacctgagttaaacaatcgcggccacggggaaggaggccgttttattgattgaatttgtgtccacgatagtacgatctttaaagtgaaccgcaagcttacagcacaggttttgaaaggtgcaacttaataaactacatataaatttttaaaactagccttaactcttttctgtgaatagaagccccatgggcaaaacacaaaggaaaccaaacgaaactccaaaataaaaaacccgcaacctccaaaataaaaacctaagaagcagaagcccggccgagctcagagcctcacacggacacggtcccgggaggcagaagcccggcccagctcagagcctcacacagacacagtcccgggaggcagaagcccggccgagctcagagcctcacacccaccctctgtgccgaaggacccacctttccaaggtcccaatccattgtcacctgggggcaattcataaacagcaaaacaaagggcatgaaaaataaagtagacatgggaaatgccatcttttgtgattctacaaaatttctcagtgatgttgccactgagcttctagcaagactcagggtagccccatctcactgtccccaactccagctcagggaccctgggagccttggccgcccagcttggcttccagctgcctcagcctaggctctggagagggctcagtgcgctgagcaggagccctggacctcaccctgtccctagaccatggctgcactcgccctcaccctgtccccggacactgcagccacactcgccctcaccccatccccagacgccatggccgcactcgccctcaccccgtccccggatgccgtggccgcactcgccctcaccccgtccccagacaccgcggcctcactcgccctcaccccgtccccagatgccgtggccgcactcgccctcaccccatccccggacgctgcagccacactcgccctcaccccgtccccggacaccgcggcctcactcrccctcatcctgttcccagacgctgtggcctcactcgccctcaccctgtccctggacaccgkggccgcactcaccctcatgcccagttctacgttctcgccgccatacacctccatgccggggtccagcagcccaatgtctccgaagtactcgcggtccactacgaaggagcagccgatcatggctggggtcctgggaggcagagacagcggcgtgaggacctsgccatgcaggcctgagccctgcctgctgggccatgagccaggaaagcctggaagaccccaccacccctccctcctgtgcctcctccctgkgcactcaggtccctgtgctcaaggtgaggggccgctgctcctccagccaccaggacttgagtcccttggagcctggttaagccctcagcccagacagcgtccaaatgctgaatgccaacagatgacagaacccgcattcaattcagcttagtgtaggaggtttaaaaaaagatcaatcggccggcacagtagctcacgcctgttatcccagcacttagggaggctgaggcaggaggatcactggagcctgggaattgaggctgcagtgagctggtattgcaccactacactccagcctgggcaacagagtgagatcctgtctcccctctcccctgaaaaaagatcagtttacctaaggagctctgtggttgccttgaacatcatttcccaagttcgagtgagtcacttgcccgcctcccccatgcttcatcctaactgtgtatcaggagccaggactgcaatgggcagttgcgtaggctgtgcactgctcaactccacagaaccttgttgatgacagattctgaacgacgcagcttggagctgagtgcacagcctgtgcagctatgtgccacagactgccagctgtactatacttcctgtaataattctaaaacgtcagccgacttagcctggccccatctctgtgaaatcatgcattggtatgctagttatattttttctaatatgtattgagagtgcatcagtgctgcaaatcccctgggaagaggctgcatggacagcagtggtgaaggcaggatccgcggagcagtgaaggcaggatctgcggagcagtgaaggcaggatctgcagagtggagcgggaggataagctggtgtgccattgtgggccacgcgacgtgcgagctcattcactcatccctctcaggtttctactgggtgtctggaaggtggcggggattgaaaaagaggcaggaaaatcacatctccagcaaggagcaggcagagtctgtgtgttgtaaggaaggaggaacttctcatctttgctgaaagattttgcctcaaaacaatttccttgtccgtggagagcttcatttcttctgaggcctcaggagctgtcagaggaagcagcaaagcctcacgctatccccagatgccacggcaggccgccctgcaggccttgagcttccctgatcctcctctgcgtatcaacgcgttcttccataaaaacaacagcaaaagttggcctctgtcataatttaaaggaagcaattctgtccccagagactcagcagtcagaaataaatgcccatcgattgtccaagaatagcaggagcattaaaaagcaattgtccttttatttgtgcaaagatccaatttgttctgtcattagatttcggccacaaacctaacagtgatgaaattttaatacccccccttgatttttaatagcaacctttgattgggtaagttatagtttatcatatacaacaggtatttctcctgttttcttaacaacaaccatcatttcagggtgatctctgatgaagtgaagagccagattctctgccacatctattgtagcgggtagcgtcttttttattattgctcagagttctaaaataaagcccatgaggcaagggaggcagcaccagctggaactggattgacttgccggagagatgcctgctgtgattacagaaaaaggtgggctgagggttctcaggctcgcgtggggctgcctgtcaccgtggtgacagcctcccctcggggcggttccgccacacgcggggcacaggggtgcagggtggaggccccaggtcctgcctgctggagctgctctgcccgatgcccgcacctgccctccagttctcagcttccggggccttagtccagccggacgcctcttgttagcatcagaagcgactcagcccagcagccacggagggacaggtggatacatggagagtggcccatccaggctgtggaccgcaattctgcagtggaaggagcgaggctgacacagcctgcgacgtggaggaaccctggaaacgtggcaccgagggcagggagccaggtgcaagaggttgccccccgtgtgactccgtccgcatgcaaggaacagaagaggcaagtccacgggggcaggaagtggattcgtggatgcaggggctggggcggggggaacggggagtggcggctcgtgggtgtggggtccccacggggagggaggacaatgctttggaacgagacggaggtggcagctgcacgacactgtgatggtcgaaacaccgcagaggtgcccactttagtgtggttgatttgtgttatatgagtttcaccaatggcccattgagtgctttgatcttccacagaccctgataacaagaaaagccaacgtggccgggcacagtggctcacgcctgtaatcccagcactttgggatgccaaggcaggcagatcacctgaggtcaggagttcaagatcagactggccaatatgaagaaactccatctctactaaaaatacaaaaaattagccgggcgtggtggtgtgcacctgtaatcccagctactcgggaggctgaggcaggagaatcacttgaacctgggaggcggaggttgcagtggactgagatgacgccactgcactccagcccgggtgacagaggggattccgtctcaaacgacaacaacaacaaaggctcagctcatgccgaggtaagacggcgaggaggcggtgggcaccgcccgtgtgggtggagtcgggacccacatccccggaggcctgcggtggacctgtcgcctgcacacgtgcacagggaggcctagtgagcccggtgcccgtgaacctgggataggtacgtaaacagcagcgcgcgcgtaagacacaatccacggagaagctaagacaagggcaccggagccgcgtccttccacacggagtttggaacacgtcgagaataacgcacactgaaacctcgccgtgcaagacccaagcggtgaccggcacacggtacacgtacgtgcagatgtgcgagccacaaacgcatggaaacatcacccgagagcttgattatttacatttctttcacattcatttgattttatgaatttcgatcgatacaattttaactttggtttcagtcaacacttgccaccttcaatcagaggcactgaaacgaaaagttaaaattaaaactggagtacgttaaggatgaaaagcacaggaaggcatgtccagttcacgacgccggttacggggcaggaagctgtgaaacaggccggtgctctgcgtcttggggggctcccggcatccgctttccggggaggggagcggctgctctcgtttctgtgtggcttgtcaatggggttggggtcgctgactccttaaatccttggagctcagggctctgcaaggccagctctcagaggggactcctccgggcccacaccgccctcccaggtcctcttctgaccaggagaggtctcagggacagcaccctgttctttgttcctcgggtgaaggagaaaatcaggggtctcctccccgcaggcccagcccccggcagacagggctctgcaagctggagggccctggggaatggaggtagtgcttggggttccagagctttggagggaataatttccgagtggttctcaggtgggcaggcctggtgtcagcacagcccttgatcctggaggggctggtggcacatcagcagcctctgggcacccacagcctgggggccccacctcttcctggaggaacacatgtccccaggtgtcctccgaagtcacacttgaaccagcagccccgatgagagccagctcccccaggcctgccccccgcctgccaggctgcctgtccttcctgccgttctcccaccttgctcacgtgatgggggtgccggatcttaactgggatcccaggaatcctccgtgatgaggatggtccccagcgtctgtctgggagaaaggagcaggggagcaggaagaggactagaacagggtggaggccaacagggcagccacctccacaggcccaggcagtgaggccacactcctgcctaggactgtcccattgaagctcaggtgcttcaactctgcagggagcaaagaggcctccaaagatgagccacaggcggctgtgaacgcaggaagggcagagagtcccaggcacatgggcacctcctgcagccgcatccccgccacgactgaagccttcgtgtcttgcggacgccgacactgacatttaatgttatttaaaaactgtttctgagaaggcagagaagcacgtgccacgttttagaaagagtttgcatccacaatggaaagagtgaaatgtagggtccagccctacagggcttagcgggtgttctccccgtgtgcagagacaagagattgtcagaaataaagacacaagacaaagagataaagagaaaacagctgggcctggggggaaccactgccatcaagacacggagacctggctgggcgcactggctcatgcctgtaatcccagcactttgggaggccgaggcaggcggatcacctgaggtcgggagttcgagaccagcctgaccaacatggagaaaccccgtctctactaaaaataccaaaaaaaattagccaggcgtgctggcacatgcctgtaatcccagctactagggaggctgaggcaggagaatcgcttgaacctgggaggcggaggttgtggtgagccgagatcgcaccactgcactccagcctgggcaacaacagcgaaactgcctcaaaaaaaaaaaaagacacggagaccagtagtggccccgaacggctgggtgcgctgatatttattgcatacaggacgagggggcagggtaaggagggtgaatcttctaagtgattgacaaggtgaagcaagtcacatgatcacaggacagggggcccttcccttttaggtagctgaagcagagagggaaggcagcaaatgtcagcgttttcttctatgcacttataagaaagatcaaagactttaagacttccactatttcttcttctgctatctactacgaactccaaagaggaaccaggagtgcgggaggagcatgaaagtggacaaggagtgtgaccattgaagcaccacagggaggggtttaggcctccggatgactgcgggcaggcctggagaatatccagcctcccacaggaagctggtggagcagagtgttccctgactcctccaaggaaaggagactcccttccacagtctgctaagtaacaggtgccttcccagacactggcgttaccgcttgaccaaggagccctcaagcggcccttatgcgggcatgacagagggctcacctcttgccttctaggtcacttctcacaatgtyccttcagcacctgaccctataccckcaggttattcctagrttatattagtaatgcaacaaagagtaatattaaaagctaatgattaataatgtttataataatgattgataattgtccatgatcatctctatatctgacttgtattatgattattcttattctaactattttctttattatactgaaagtttgtgccttcagtctcttgcctcggcacctaggtaatcctttgcccacagtgaaaattgttaggacttaaaaagtgaggtggttatccctgcacctaaagttccattccccaaagagatcacggaaatgccgtcctggagcagggcccacactttctctgcccggggcaagtgtgtaaatgtcttggctctgtgccagaagcctgggtggcagctgctcccctctgccctgatatgcaaatgaggaaacatggccgtgtgtcaataaagctttatttacaaatacaggactgtgggccatgattccctgacccctgctgtacatccttgaaaatgcccttcactgttttttcttttttttttttttagactgaatttcgctctcrttgcccaggctggagtgcaatggcaccatctcagctcactataacctctgcctcctctgttcaagcaattctcctgcctcrgcctcccaagtagttgggattacaggcacctgacaccacgccctgcgaatttttgtatttttagtagagacagggttttgccaggctaggaactcctgacctcaggtgatccacccgcctcggcctcccaaaagtgctggaaatacmggcgtaagccacygcacccggcccctccgctgcttttaatatgcatatttacttttatggaaattttcaagtgtatgcaaaaggagaaagatgagcagaatgtgttctcagtttcagcgatgatcagcatcgtgtccttcttatttttttctctcgcctattactcctgatcctccagcatgaggggagtgattctgacagggctcatgtctctgactctgatcctctatgcgagaggagtgattctgacagggctccagcacgtgactctgtgatcctccagtgagtggggagctgatttctgatggggctctcgcccagactttgatcctccagggtgagttttgacagacaaacttacacgaaggtcaggcaggtaaagtacaagagagaagagggctagtgtcacttgttgaacatggtgaaatcaaagccttcatcttctttttcttgaaatagtcagtcctcttggtctgtccctattctccctctcccgtaaggacccagctctagagaattatttccccaagtggagcagcagcatcagcaaatgataaacaatacaggacagatgggcttgccgggagcggctgttgggacaggtggtgactgtggctctgctctgtccgagggagcagccacagctcagcttcagttcatcatgactgagtaagaattggggcctagaatcttccaattttcaaaaagagtagaaatcattttcacataaaataagatttcaagtgaaaatgattaagtattggttctgtcaaccaagaataaaattctaagacccccaaccaattgaatggagccgcttctcaaccaagggcaccccaaagtaacccaggaaaacgagctcaggtcctgatgggaagagggtttggacaagccccttagactctcctccctttggaattctggaacactaaaacacagatgttaagtctgaccaaacagactcttttgtagagataaaatgcatccaaaatgacagttagcaggtccctaaagaagttaagtattttaccccaaaatgtatttcattgatgtattttgaaatggcttgcaatgctgtgtcttgtgggggaactcaacattctgtagagacttccctttcttttggaggtcttttctgatccagacaagattaaccagaagtctggcccctttttaagtctgataagaaacatttacaatctcctccttctgaagctccttctgaagcccgctacctggaggcttcatctgcatcataaaacctyggtctccacaaccctttatcttaaccagatgctcctttctattcataccaggtctttagataataacttaactctttcaaccaattaccaatcagaaaatctttgaatccgcccatggcctggaagtccccacttccggtcctcccgccttttggactgaaccagtgcacacctgacatgtgtgcattgattccttctccctaaaacatacacatccagcaggctgcacgcctgcacgctaagcatggaacgcaggggcacyggccgcgatgacaacaccrcgtggacccacatgcgcctttgcgatcgtcacgctgggtgtccaccatggaagccgtcctggaacttctaacatggccccatctcgttgcggctgtctgctgtttctgtccccatgagggagggcgaactcctgagtttacgcaatccacccacctgggcctcccaagtgttgggattacaggcatgaaccaccgcacctgccttaatatttcatttattctttaaaatcaactttgaggggtgaaatttatataaaatgaaatgcatccatgtgatctttgcattttggcccattttgactgatggagacccctgggtgaccccatccttttccagcagagaacactgctgccctggaactgtcccaggcaggccccttccctgtgagccccgaccctcagcctccacccaggatgaattttgccttccgtggaattctgtgtgcaggaatcacgcagacactctcttccatgtgtggctccgaggctcagcatgagcctctacatctcaccacgttgttaggtgtggaagggtccactcctccctgtttctaagtattccgtgatgtgggtggagtctgccctgctcatccattcacctgctgacgcatatgaggctactgtgagtaacgccgctgtgaacgtttgtgtggaagcctttgcatgtacgcatgtctcatttattttgagaaaaacacctgggagtggaataggggggacactggaggggggacacgggggacactggaggggacagtggagggggacagtggagggggaacactggagggggaacactggggggacgctggagggggacactggaggggggacgctggaggggggacactggaaggggggacactggagtgggtttcgggccttcagaaggagctgcgggttttccaaagtggctgcaccgattcacagtcctgccagccatgtccgagagttgcatctgtgccatgtccttgtcaacatttggtattgtcagcctgcacctttcagccaccccagtgggcacagagccccatctcactgtgggttgaatttgcatctccctggactgtggggagcacatttcatgagcttgctggcgcaggccagtcttctcctgggtagtgtctgttcatgtcacgccctgtcctttagctgagagctggaacggggggtttcagcagctgtccaggtggtggctatgaggagcaggggggcagccatgccttgaagacttgatggggccagtgagcctgctcctgccacagctcagggcatccagagcctgccaaaaactgtgggaggtgcctcccattgggttctctgaatttcactgatttttaaaatgtcaaacacaaggcgatccttttcctgctaattggggattatcaagtgcattttgaatgaagaaaaataaccttcaagccgttagtactggctcctgtgaaccctgagggctgcgtctgcatctctgtgatacagacaagctctgtgtgccaagtttttatggcaaagcccaggggccccagcacccggcccgacactcaccgtggtctctgctcagcccctgcaccaggttgtgcttgctgggggacgtccccagccctcgtccccacgccctcgtccccagccctcgtccccacgccctcgtccccggccctcgtccccacgccctcgtccccggccctcgtcctcatgccctcatccccacgccctcgtccccacgccctcgtccccagccctcgtccccggccctcatccctggccctcgtccccacgcccgcctcgctctgctccgctccttgccgggcagggccgccctcgacccctgagggcgcagctcacctgatgggtgctgactcgtcgccgcggtccagccagtcctgcggggggatgatgtacatgcaccagaggccccagttgtagccatgggcggcgttcgcatactgctgcacctcaaacgtgctgtacttgatgttgtcgatggctggcagcacgatgcgacgccggtcctctcggatccgcgacagtgcgggctcggccctgcggaggcacagctgtgaggaggggcggccccagcccaccgcattccctgaggagggtccactcgcccacagggaggggaggccagtccccacctggtctgcatctagccctgccaccccctgctgagctagacccacatcctcccttggaagcccaagggcccctctcagcagcagacccaccctgaccaaggcctcacccctgctggggtagcccctcgaatgccactggcccctgggggacgctgacaccggccacgttggcccaactgcagtatctctgaagggctgcccaggggtccataagaggtcagctatgtccaccacggggctccccagctcggtctccctctctgcccagccccgagtccctcctctcctttcctgctcctgtgggagctgcattcatttgcaagaattaattgaggatctactatgtgccacgccctgttcccacaaattggaatacaatcatgaactaaggaataaaaacaatccgtgccacggggagctcgcacggtgtgggatgaaaagccaccaggcaccgttgtgcagtgtggaacctgcgtgagtgtgcagcggccccgctcaaggacgggacggaggatgaggtataagcagtcgtggatgttgtagagggggctcacagttttaagtagggctgccctgggtagtgactggaaggaggcatagagggagtctcagagggtgcggcagctgcaccgaagccccggcgtgtgcctaatgggcctgcagggctggccaggaggccggacagagcgatggggcaatggggggcgaggagggcagagaggaaggtgagtagaagcagcctcgatgggcatcagctcagtcttcgattccccgtcccaagcaggggtcctgggaagcaggtgcagccctcgcccttggagacgccatggtctaccgcaaggtgagatggccgcggaggcccgccgtccacgctggagacccacagggccaaagccacccagccactggctgacacagagcccagaggctgcagtgagaggctggatggcctgagggcagattcgggtcggctcaggcagagccggcatggggagaggcaaggccctgaccctgcctgtgagaccacacggctgtcttcaccccttcttcccgtccttctgagcatgaggcctggtatttacctgcctttcagctttgtgaggaggattaattaattactgttagcgaagtgcttcagagatgaaaagctccctggaaatgccaggtcttctaataaggcagaatcctttgtggagacagttacgggagggggtgctatttgcagatggataactgggttttcagttgtgaaaattaaatttggaccggtttaaaattgcattttgacgtgacagacccaaggctcccccagacgccctcaggcctcggggagcttacccggcatcagagggactaaaaggctgccggtgtagttgtgcagtgcacaacgtgtgcgactgcatggggtgacactgtggggggcagacagtggaacacaattcatgcacaacacgtcagaagctgataaacatcgagggaaaggaaagcgccctgcggaggagcgaggaaggggaagggagggcacagggcagaggaggcagcgtcttgtcagaacagcgccggctggggactgagatgccccaggaaagccgagtgtgaggggagaagcctgagaggtgccaagtccccacttgaacccactgatgctgttatggaaaccacggactttaagaagccccaaaacgccaggttccccggggacccagcaggaggcccaaggtcacatgcagtggggtgtcccagccaatcatgacagtcccagcctccgtgtaacactgagatcaaacatcagctggcccttcccaccaaggccccctgcagtgacaacagcccatatttccctgagttgaaaaatgagtcaggagagttgatattaaatcttcagtttttgtttctccaggaagtggggaaaatgtcctcccgggtcttccttgtggttgggtggacaggggtgggtcctggccctggtgcggggaacaccctgtgcattgtgggcgcggggcctgcctgggtgcggggaacacacccagtgcactatggaccccgtaggtgccctctgtggggctggctttggggtttgcctgggggcatcctggactgccccaactctaatgacaagggtccttgcataaggcagggatggagaaacagacacagggagggcgtgggggtcggaggtgggggctgcagccctcaggagctgagagaggtgggagggatccttaagggcctggagcctctgggggaaactcggccctgcccacaccttggagtcgggccctgcccacaccttggagtcgggctctgggcctccagaacggtgaggaggtgaagtcttgctgctccgagccgcccagaaggggttgctttgtgctggtggccccaggaccccatacacaaggtgaccccctcagcccagaagctcacttcccacgccccttgcactaggctaaggcctcgggggcactcgtggccatctccagtgactgagcagggcctgagaggccggacttctgcaccttagccccaccccacctgatctgaggttcccaccccgcgggggacacacggtacccgagcctgctggagtcaggacagggtcacattctcctggggcaaggtgggcacagaccaagcctcatacacatgcctgggagcttctaagcgccatgtccttgggtgcgtgctgggcctgccctcccgtggttttgcattcaggagctggacacagagaggccgcagaggtaaccgcacaggtggactcagtggtggctctcagtcccagatcctgaaggctacggcgagtctcccagccccggggccaacccagcggccaggctgcagccgcacggcggcttaggagggggatggtggagggggacccgctgagactggctgtccagcctgttccggcccttaccagcccgtgttgaactcgacgtgggcatcaaagaagccgacgactggggcggtggccgccttccagccctgcagccgcgcgcggatcagtccttcccgccggctgttgcggacaatcttcacgaggcctgggtaccgcttgttgacgtactggtccagattgaacttgagttccactgaggagagacaagactttagcacgctggcaggtgctggcaggcgcggggccaccaagacccaaggctggaaatgctgcgtgccgcgtgtgggatgggtgtattgtaaacattctcttaggacccactgaaccacatgtggttcagcgtggaggtcacagagagatgagaccccagcctcatgatgctgacattccagtgggagacacagcaaataaggaaacacaccagacagacagacagacagagagacagacagcagcccatgctgtggagacacaggactgcagtcagctgtaaaaaaccaagtccatgcatggatggggggacacacaaacgtggccttccatgctgggggcagggtgtcctgatggagctccctgtggccaagggcaagacacaggtagccgagctggactggatggtcctccccacacaccaccttctccagcgagacagggctcaggagggcagccacgccattcagtcctctgcacacagaccccagtgtagacggtgctgctgggctagggcactgctgcaggccagagcttgccccacagccccatggcacagcctcctgcctccacgaggggtcaggaaggggctccccatgttttcctccatttccagagggagtgtcacggctgcaggctctctgctctgcgcctgggaagggcagatgggggacaggcctggggcagtgcaagatccttgtttggggtttcaagcctgtgtgctacagggtgtgagtagcactgccctcaggggacctgaagctgaggagggtggcgctgaggaaccatggggcttgggctccagctgcgagctctgtccagccaagctctggtgtgagcctctgtgggcaagagaggtgggaggcgtgactggcactctggagagctcagctctactggcctctgtggaagggggtggctgaccccaacttcatctccacccggagcctgagaggagaggaagcagggactttgtagatgtatccggttgagtatcttgagatgaaatcctcctggatttggggtgagctctgtgtctagtctgggtcctcatgagaagaagagaggatgcagacacatgggagaggccgcataatggaggcagagagaggcactggcagccacacactggggacagcacgtacgcagccatgacagaggctggaaggcaggagggacccccataggtttagagcccctgcggacagatggggtgcagtcctctgtcgctctgcccccggaggctccacccaaccccaactcaacccagccacaggcagccgcccggcgagcaccgtgccgaggccccgcccactcaccgttgtcactgttgtcgtccaccaggatgacctccttgaggagctgggagggcgtgtggttgaccacgctgtgcacggagcgcaggatgaccgacagcgcctcattgacgaagatgaagaccacggagacctggggcaggtcctgggcgtagctcatctgtctgcacctgcaggaaacacggtttggggtgcggtcagggcgcagcatgagggaccccgggagccatagctcatctgtctgcacctgcaggagacacggtttggggtgcggtcagggcgcagcatgagggaccccaggagccatagctcatctgtctgcacctgcaggagacacggtttggggtgtggtcagggcgcagcatgagggaccccgggagccaggtgcacccttcgagggtcactggacaaggcctggaccctacaaccagacgccaagggtgtacgggggccagagctgttccagagagaaactagtaacagtaacacagcactcagcacacacatggcccctgtgcccaccccgtgctcacagcgaccccgagaggagatgaacgtccccgttccacagacaggagcctcccctgtgggccatgagtgcaggtgcttggattccaaccccagccatcagcttcaggagcacgttggggacggcgctgctgggcacagccgaggagctgggcacagccaaggagccagccacccgcacaggcagccacttcccgccctggctcatagctggttccaagcctctggtgagaatttcaaagggacaagggctgtgcgccaccatcatatttatctgggctgtggtgctcagccagggagatttcatcactcagaaaaatgctttctgacaagaaaacgtcactccactcatctgtagaggaaaaagcttggattgcacagttttcatgaacttgcaaaatgtgtaaaacagaaagtcctgagaaaggaagtacgtcctaggacggactgcaggagcggctgcaggttggaaaggagaggttttggagttggggtggtgggcagaggcactcccagagcccagggggaggggggcagggctgctcagaaagcctgtggcaagtcctgtcccatggggtggcccccctcaccgtcctcaagcgcacaccctgtacctgtttgttcctgcaggtctgtctccccccgtgaccggaacgtgagcgccctgacagcaagctccttttctgtcccattgacagctctataccaagaacccaggctgtgcccggc

SEQ ID NO: 96650 - DNA, 78011 bp, Homo sapiens
gctcactgcaacctccgccctcccgggttcacgccattctcctgcctcagcctcctgagtagctgggactacaggcgcccgccaccatgcccagctaattttttttttttgtatttttagtagagatggggtctcactgtgttagccaggatggtctcgatcccctgacctcatgatccgcccacctcggcctcccaaagtgctgggattacaggcgtgagccactgcgcccggcccaacagtgtacaattttaatgaggcagttgagacccagattgggaggctggtaaggtcattttggaataatccaggtgagagatgaagactataggctgtgcagtgttgggcagcctcaggttctggcaccatagtccttggggagcttctaggagccagcttcctctccatggtatcttgccatttacacagacactttccttccttctgttaaggtgctccccacttgcctgcttctcacttctctggtgctttaaacaggagtcagcaaactttttttttttttgtaaaaggccaaataataactattttaggttttgtgggccataccgtctatgttgcaactactcagctctgctattgtgcaaaagcagccgtagccaggcactgtggctcacgcctgtagtcttaggactttgtgaggccgaggtaggtggattgctttagccaagaagtttgagaccagcctaggcaacatggtgaaaccccatctctacaaaaattacaaaaaattagctggacatggtggtggacgcctgtggtcccaactactcaggaggctgaggtgggaggatctcttgagtccaggatgttgaggctacagcgagccgtgatcatgctgctgcattccagcctgggcaaaagagcgagaccttgtctcaaaaacaaaacaaaaagcagccatagacagtaagtaaatgaatgaatgcagctgtgttccagcaaaacctgatttacaaaaacaggcagtgggctagtttggcctgtgggccatagcttgccaacccctggtttagaacataacaagagtctttctatgctgtggtgtagcatatcggtaagagtgtaaatctgaagctacaatactaggttcaaatcccagctttactacatatcagctctttctctgtggcttcattttcttatttgtaaaatggggatattagtagtatacattgtaagactgtcataagaaataagttcatgtgtgtaatgcacttagcacagtgcctgacacatggtaaacagtaagcgttaatgatgatgaagataatttgttgtctttgccttttcatcagacatgtttgaaggagtcagatggcagtgatactgaggattttggctctgatcacagtgaagactgcctttcagaagcaagctgggaacctgttgataagaaagagactgaggtatgtttaggcacatatgtggtgggtacttacgtgagccagtgagtcatcatattttccagagatgaatgacatgctgtagactgagctgtcccccagaggagtgtcagcctggtaggcaaatggtagccagttatgaagataagccttgtctctttctgctggggtgctttcctcattgcaatgttgctcttccagtctgtcaacaaggaccaggaatttttctttgtgccttctattaggtgactcgctgggttccagaccatatggcatcacactgctataactgtgactgtgaattctggttggccaaacgaagacaccattgcaggtaagatgttttgtatgatttagtatgactcaaaaaacagggcaggccaggcgcagtggctcacacctgtaatgccaacaccttgggaggccgaggcaggcggatcatgaggtgaggagattgagaccatcctggccaacatggtaaaacctgtctccactaaaaatacaaaaattagctgggcgtggtggcgcatgcctgtaatcccagctactctggaggctgaggcaggagaatagctcgaaccagggagctggaggttgcagtgagccgagattacgccactgcactccatcctggcaacagagcaagactctgtctcaaaaaggacaaaaaacaaaaacaaaaatagtgtaatacatatgtatagaactaagtggaattagtttggaagtggacacctctttatagaaactatttttgtttgtccccaacttttcatttagtatcactcattctcagtatattggcatttcttaatattaattaattaattatttttttattagcgatgggctcttgctatgttgctcaggcaagtctcaaactcctggcctcaagcgattctactgcctcagcctaccaaagtgcagggattactggtgtgagtcaccctgcctggccagtatattggcatttctgatgaactcttccctctttctgctttgacagaaattgtgggaatgtattttgtgctggatgctgccacctgaagctgcccattcctgatcagcaactctatgacccagttctcgtctgtaactcatgttacgaacacattcaagtctctcgtgccagggaactcatgagccaacagctgaagaaacccattgctacagcttccagttgaatgccggggagaaacctgtccaattttagcaggtttgaagggaggatcttcttcagttgtagtttggaaggttccttggtgtggctcatgaaatcacagagctcagagataccatcttgagaaatcctccttggtatcatgaaactggagcagaggaattgcaatttagcaggaggtcctctactggtgataccctcaccttggggtaatggtcctaacccagacccagggtctggaagcttaatgttgagttggtgactccagcctctttctcctggaggtcacaagatgatgattgcgtagatgttgcctggtgcaaagtgccccaaacagcaatagaaaggcatatgtataaccaaactccaagtgataaccagacccatctctcctccaccttgacaaaagcagattatagtatacaaggtaggaattcctgtcctatttgagatgaactatatcctgtacctctgtgctctgtgtctgcatgaaggctcagcctttagaggcactccttctagttgcattagtactgtctttctgtggagtttggtttgaagactggctcagcaagtggaggtttcaatgtatttttcagttggctcatcagccagcattggtgaatattcagtttaggggaacagttctagggagtgagacatttttgggagcagaggaaaactctgctgatgttcggtcctggcaaacattgagttattttgagctgtgaaggcagtcgtctctgttacacagtggcagctcttgagttatgcactgtgaagaatgagaagggaaaagcaaaaattatccttgtgaaatatctgctgattgtgccctactctttgcacctgacttttcctagttgtcctggtgctaacacaggagctacaccttgatcctctcctggcatgaaaataaaacaaaggttttcgttgttgttgttccattgcccatttcccccatgttgtctttcccttggctgatgcctcctctgggtcacattgcttcttatcctgaacacttgacaccttgagggtagaatttagcgtttggtttttacctcctagcatatgctgtttggtatgtgagggtttcagtacaaatgctgctgtctatttctgtgcacttaacaatggaacccaaacagaagagaataaagccttgataccaaaattgggaaagaacatgtgtccatttggaccaaacgttgttggtttttaaaaaattttattttgtttttttgtttttgtttttgttttttttcatcttaatatgtaccagtggcacttaaccaaaagatacagtgatatagccatgtactgtgggtgggacagatacagtctccttggcctataatgaaaccactaggactttatacagttttccttaatttgttgacatataaatggtaaattatatttaggcttatcctgttttgaaatgatggtagtcatctttcttactgctactttcatgttgctttctagaaaacagcatttcattccaaaataactaggatctgcatttagaacaagaatcattatttgtcctgaccttttcagtcctacagagacgcatctgtggttcttttgtacttgccatagatgtaacctaaaaagttttggcatatttaggtcagcctagcggaactttttttttcatttaaatggagctgaataatggagattttgtgtctgcaaaattcctgagatcattgaaaaagtaacaagctgttccttgtttctgatacataaaattattttaagcattttatcaatcattaaaatttactgccagttgtgagtggctttttaattaacttgtctttcattgcacttcactctgcctgttttcaaggggagtaagattggtaacatttggggagactgtatctgtctacttagcgtggctgttttgagggactgtcccatcagtgaacaaactgcatggccttggagagagactctgggctcttggctcagatgtgttcatcaaatactcctttcagagctgttgtgggtgtaagtgacatgatgtggccaaaaatccaaactgtgcagttgcgttgtgacaaacatgcaatgtgctgtaaaaattcaatacagtttaaataaaatctctatattagtgctgctttgttgggtcgttttattttcatttctaaaaaaacttaatattcacttattctttgaccatgagaagagtagaacattgtacccctttctcccagcaatttccaatttatttattttgagatggagtctccctctgttccccaggctggagtgcagtggtgcgatctcggctcactgcaacctccgccttctgggttcaagcgattctcctgcctcagcctcctgaacagttgggactacaggtatgctaccacgctggctaatttttgtatttttagtagagacagggtttgaccatgttggccaggctggtctcgaactcctgggttcaagcagtccacccagctcggcctcccgaagtgttaggattacagacatgagccactgcgcccggccaatttccgttttcaaatgaacctctctttttgaatcagcacagctcttgttacattcttatttattgattggctagggatcgattcttatggataccgtagaattctgtcccatctttatttctctttaatgtctaaaatgccaccagctagttgggcaggcacacaagatagtacttagattcttgtgattccctcctcctagggacctcagttttcatctaaccttgagtaaattgtcttgaacaaatactgacttaaaagagtgtatcttaaaagatacaaagggctactatctaaaaggtgagttcgtttactcaagatattatacctccagtagcatcatttttgtttgagaggtaagcagttccactgttagcaaagattacagaccagaccctttggtccccagaacgaccaactctgctgcctaacgcacactttctctgcattccaagtctccactagttggctgggccgaaacacacgcctcttggtattccacggtggataactgggcttctctcttgtcaggacttagaacaccccggcagacagccttcccggcctgaagtctgggaacgcctggggaaggggctcctgcccgggtcccgcaggcgtccggcgggccgagctggggcacgcggccgccgagggggaggtgcccacgccgcgtggcgggaactcgaggccccattggccgcgctgggaggcgccgcggggcctcgtgcgccaacggtccctggtacgcggcggatgggcgccggcaggagcgggcagggcgaggcgaaggccggggagggatcgagaacggtgtgggagagctaggctcggggggcgaggccccggcccggcggggcgatggaggcgctgctctccacccccatcaaccccaacaacttccccgccaagctgtggcgcctggtgaacagcccgcgctaccgctccatccgctgggacggccgcggcgaggggctgcttatcgatcagccgctcttcgaggccgagctgctcagcccgcccgggccggggggcggtggcgggactgcgggggccggggccgagcccgagctcttcaaaaccaccagcttcaccagcttcatccgccagctcaacctctacggcttccgcaaggtggtgctgggcgggccggggggcggcaaaccggcaggcaatgggccgctccatcacttccacaacccgcacttccgccgcgaccagccacagctgctcgtgcacctcaagcgcctcaccagcgccaacaaggccaagctggcggccggcctggaggtgccctgccgcccgcccaaccgcttccagcggctgctcatcacctcggcctccgccgccaccgcgccactgcagcaccagcagccgccgccgcccgcggggccccggcccgagccgcacggtgagtccggactgcccgtgccctcgcccacagtgggcacatgggcggcggggagcaaccgccgctggagggcgcattttcgcacgtcctcacgctatgggcgtcggaaaggcgccggggacccattggccgctgtgcttcccgagactggcggtcccgccaccgccgccgttctcagcggcaccagcacggtggccaccggccctcccctggagggtccgtaagcattcggccccttctgagcccactggcagcaaaagggacctccgcctcttaggctcccttctactcgtccccggtttgaaccccaggagtttacctggttgtaagcctccgtttaccttcctgagacccacactgtccactgtaaacatgtggactcagtagtccttcgttgaaacattgggtctggaagaaacaaaaggggctcctttgctcccgtgggaagcagagtggagtcaccctacgggttaaggcgggatggaacaaaatcgtagtcaagagaatttagaacattacggttgggcgtggtggctcacgcctgtaatcccagcactttgggaggccgaggcgggtgcatcacgaggttaggagtttgagaccggcctaaccaacagggtgaaacctcgtctctactaaaaatacaaaaattagccaggcatggtggtgcacgcctgtaatcccagctacttaggagactgaggcaggagaatcgcttgaacccaggaggcagaggttgcagtaagccgagatagtgccactgcactccagtctgagcaacagagcgagactcggtctcaaaaaaaaaaaaaaaaaaaaaagagagaacttagaacattacaatagcaggcaagggaaagttttggaaaaggtgcctgcagtggaaatttgtccttgaagagggctgccaccttccacctattggcacatctaagaaatcttagaagtgctacgacaatcatcagatttaaggttctggttaatgtgtagaatggtagacgttgtttatataccttaagagcaaaaatacaacgatacatcgtggcttacaagatatagttcctatgtagaatgaattggctacacatttctttcattgaagcaaattagagcttgatgcttccttaaaggggtatgattagacaaacataaggcaaagatggttttctttacagctgtcaagttttagttaaaaaagaattttagaaagctcacatttacagcctttggagttttcactattggctacaatctttcagtattgaaaaaactttttggtatacatctgtatttagtaaaagttaagaaaccctctgtgatagtggattatttattttttattatttgtttatttttttgagacggagtttcgctcttgtcacccaggctggagtgcaatggcgcgatctcggctcaccacaacctccgcctctcgggttcaagcaattctcattccttagcctcctgagtagctgggaatacaggcgcgtgccaccatgcccggctaatttttatattttttagtagagacgrggtttcaccaggttggccaggctggtctcgaactcctgacctcaggtgatccgccagccttggcctcccaaagtgctgggattacaggcctgagccactgcgccctgcctattttactttttgagattaagtctcactgtgttgcccaggctggcgtgcaatggcaagatctccgctcactgcaacctctgcctcccgggttcaagtgattcttctgcctcagcctccagagtagctaggattttacaggtgcctgccaccacacctcgctaatttttgtattgttagtagagatggggtttcaccatgttggccaggctggttttgaacttctgacctcaggtgatccgcccatcttggcctcccaatgtgctgggattacaggtgtgagccacttcacatggccaaattattttatagacttgatttttttttttttttttttgagatagggtttcactctgtcccccaggctggagtgcagtggcaagatcttggctcactgcaacctccacctcccgggctcaagggatcctcccacctcagcctcccgagtagctgggactacaggcgtggccaccacacccagctaattttttgtatttttggtggatacagggtttcactctgttgcccaggctggtctggaactcctgggctcaagtgatctgcccaccttggcctctggaagtgctgggattacaggcgtgagccaccactgcgccaggcctgtagacttgatttttgatgctcttccccctcttccaggaaggcaagggtggcaatattccatttctctgtttaaagagtccatgatatgaagcagtataccaagaaaccaacagggtgtaatcattcattcattcttcaccttcagctaggagagtaaataaaaacattttcagcatgttaacatggatttactataaagaaatctggggccgggcgtggtggctcacgcctgtaatcccagcactttgggaggcccaggcaggcggatcacaaggtcaagagatcgagaccatcctggccaacatggtgaaaccctgtctctattaaaaatataaaaattagctgggcgtggtggcgggtgcctgtagtcccagctactcgggaggctgaggcaggagcatcacttgaacctgggaggtggaggttgcagtgagccgagatcacaccattgcactccagcctgggcgacagagtgagacgctgtctcaaaaaaaaaaaaaaaaaaaaaaaatctgggttatttttgagttaatggaaaagtttaaatgtacaaataaaataacactatgttcaacttaaccttcgcccagggttatgaatgacaacagtacttggttcatttggaatttagaagataaggaactaggttatgtgaccactgtggagtttagaagataagggattaggttaaagttccaacagtaagttgaaaaagcagcagtggcataagaatgtcctaaaggaatattaggccatttccatgtgatggccattgattttggtagggaatgatagggggcaaggcaatggagacaataccatggcatacatttggcagaatctctgacatggattttttttttttcaggttgcatrtctggtgggtataaggagaaaagactagaaaatatgtttttgggagaaatgggataaccacttcaaacaaagaaacatccatgcatacacacacacataaaaaccaacacttgctcttttctcttctctgaccttttaccctcaactatcttaaactcagttgtattttaaggatagagtccattttaattgaagaaattcagggccatctggcatctgattttattcacttatacttcagttggtcagcatttaaagattactgtttgttgaaaaacataaattcatggtttttcagtatagattatatgtcaatccatatataactaagttattgttttcatgcctttcctgtttggtgttttttttttttttccttaccattctacctgttggtatgtgcagaaggtatgtcaggtgtggactgtctataccataggtttggttcactagggaattgtgttactggttcaggtggaatgtaattctgctttaagttcaagaatattagaacttgaataatttagcaaagttattcaagaatacaactttgttttgttctcattccatgttctaagtccttggctcttctacttttcctcatctcatttttcttcttctcgaatcttgccttggttatgtgcctgactacactgctactgcttagtctccattttttctatgttctatttcagtgtatgggttgaatacttctctctctataatagaatcctctgttttaggacctagttcttttatttagagccactgaaccaattgcactgttcaccttccaagagtatacttgataagaaacagattgcatgtttttcctttgtgcgcttttgttattttgtttttaggagcagtttattttatacgatatttgttaaaatatcctaaactaagtaacagatctgagaagtggataatcttttacctggggataccatgctctcaagaggcaagtttttggattctttcctgggaattgattaattcagacgcacttccataaaagaaatagaatttttgagaacacaatttcatcctgccctctatttccagaattctggattcaaactttgccaaatatatcttaaagatattttgaagacatataggtgatgctctgtaatgttgatctgaattgagccctatgaagtaacccttaacagaagaataaataagggctaaacatgtcttggttctttattttaaaaaaacagacttaaaagaatgttcttttaatcttgactgtgttctaattttaactgcatctaaaatagttaattggccatcactccaagtttatcatgatagaagtagacagatataaaacaatttaaggtagggaattctttaattagctgcttaagttattgacagcctgaaaattcaccaacagtttatccccgaagagggcagagctgttgtactctgtaggctgtatgtagtgttgacatgcgagcatcccaggagaaatcagggaatgggtaattttggacatgcagaaacacctcttgtgaagagagagaaaaaaaggagggggtgtcagtggtgggttcaaggtgtatgtacctgcggaattgctagtcaagcagcgtaaaaactgttttatgctttttttttttttttttwaaagacagagtctccctctgtcacccaggctggagttcagtggcatgaacatggctcactggtgccttgacctcccaagatcaagtcatcctcccatctcagtctcctagctgggactattggtgcatgccaccatacctggctgattgttttattttttgtaaagacaagatctcaccttttttttcttttttctttctttcctttttttttttttttttttttttttttgagatggagtcttgctgtgttgcccgggctggagtgcagtggcgtgatctcagcccactgcaacctccacctcccaggttcaagctattctccttcctcagcctcctgagtagctaggactacaaggtgtgtgccaccaagcccagctaatttttgtatttttagtagagacggggtttctccatgttagtcaggctggtcttgaactcctaagctcaagtgatctgccctcctcagcctcccaaaatgctagtgttacaagtgtgagccaccgtacctggccaggatctcaccattttgcccatgctggtctgaaattcctgagctcaagcaatcctcccgccttggcctcgcaaagtgctgggattagaaggatgagacactgcgcagggtctattttattttttgtactttaaaggaataaaggaaaaatagtttttaagagatctatcatttgaatacattcaatcttctgaagtaggattttttccccctattagataaagcctcttgatttccagggcttcagaatttgtgttgttcatatgtgcgtatttgtttctttttggcattaatgctttatttatttgtttatttatttatttttaagagataggatctcactctgtcatccaggctggagtgcagtggcacgatcatagttcactgtaaccttgaactcctggactcaataatactttattatttcttttcgaaacagggtctcactgtgtcacccaggctggagtacagtggctcaatctcagcttactgcaacctccacctcctgggttcaagcgattctcctgcctcagcctcctgagtagctgggattacaggcatgcaccatcgtgcccagctgatttttgtatattttgtagagatggggtttcaccatgttgctgaggctgatcttgaactcttggactcaagtgatctgcctgccttggcctcccaaagtgctgggattacaggcatgagccaccgtggctggcgtgctttattctttaaaggaaattaaactacagaaatagaatgacagatatgtaacttgttgaatgggtttacaatctaattatttggaaaagcagatatttgagtgttaactttcaacgtgtagtttaatacttgagtagcacataataagttttccctctgttttacagattagcttagtaaattgaaaggaacttgtgaatcagtcacatgatttaatgcaaaactctccttaggaataaattaggctagctttgtttatgttcaagaatcataatccatagttctgtatcatttatattctcccttccctcattacatactattgccctttctctctcttccttatctccactttttattcctttttacattgctaataaagagaagacaagtatcagaatctctgggcctggatttgtggatttttaacagactcttcaggtgattcagatgtaaaccaatgtttgagagccactgatatctgggaaaggatactactggaaagactctgaagaaagaaaaatcatggaaaatgattgattgatttaagggatgaaggaggaaactaagtcaaacttttcaagcctgacttttttataaagattatcatttttaaaaatttgaaagggagggcaagacatggtggctcatgcctgtaatcccagcactttgggaggcaaaggcaggaggatcgcttgagcccaggagttccagaccagcctgggaatgtggcaagaccttgtttctacaaaaagtaaaataaacagtgcttggtgatgtgcacctatagttccagctagtcaggaggctgaggtgggaggattgcttgagcctggaagtttgaggctagagtgagccaagatcacatcactgcactgcaacctgggcaacagagtgagacccggttgctagatagatagatagatagatagatagatagatagatagatagatagcaaagagcgttacttttttttttatcttgttatatgttccacacccatttcttttattttttggtggagagcttatttttatgcctattattaatgttacaaaattgtttgaaagactgaatggaaaacttttaggaagtagcttacacgttggaaaaatctgggtcaggcaaataaagcgaaaggtaagatggccaaatcatgtataaaaggcttttaatgttgaatttttgatttaacatttgatttaatgttagaatttgggcactttatcttttatgactattgcactgagaaaacaaaggtttatttgattcttctttcagcattatatgtctcatattcttgattctgaactttttaccaaacctaaacttctgttgtgttaaaaatggctgataggtgaagagtagcatattttatgacctttggtttactatgtctggtgatgtaatgcaaaattagtaaatgtgctcttcctcttttatgtaggaccagtggctgtaggacaatttcaccggtcatttcgtcgagatagtttgtctccttactcctgtgtatcaactccatcccacgaccacagtacttaccctctgaaaggtttagatcggaccccagttcctcatagaatatggcagaactcccttggaatgcatcctggacaagtggagacatctcccacattttcagataaaggggttccgtttcctgtactccagaggtttccaactgaggttacctatacactgcagcccagcaccacatctgtacatgttcaacaaggtcctcaaacaatggtcagctcctcccaaaaatacagtaactacacaccctcagcacagtactcgcaagcctactatccaacaggtatgacaaattcaggttcatggccttctatttaaggttgtttataatgagcatatatatatattttaaatgcattttaatgtctatgtgctttaacacaaacagtaggaatgtacacctaagaaatggcaaagatttcttagcaggagatatttttaaacaatatacaaaatttcattgtgtttttaaggattgtgaaaattttgttgatgtataaaggtgtgtattgttagtgaaacttgtatattcaaaatatgtcctagttatgaaattaagacttagtaccccaaggccagatgtggtggcccacacctgtaatcccagcactttgggaggctgaggcgggtgcatcatttcaggtcaggagttcgagaccagcctagccaacatggtgaaaccccaattctactaaaaatacagaaattagccaggcacggtggcaggcgcctgtaatcccagctactcaggaggctgaggcaagaaaattgcttgaacctcggaggcagaggttgcagtaagcagagatcactccacagcattccatcctggacgacagagtgagactgtctcaaaaacaaaaagcaaaaaaccttagtaccccagaaccttattttaactctgtacttggtgctgtagtttttttttaatatgtttattatatatttaatatggtttaatcttaaggtgagattacctcataatgaaatcatttagtatctcagtaatgatatttaatgaaaaaggatactctctgaacattgaattctttagtaaaaacctggtgaacagtgggatctccgcagtgttattcctaggcagctaagaactggggagtagcagagagaaggagaaacctgacaatgacaactgacctggaactcaagcaagggcattgagaacacgctggtagatcccaagccactaattgggaacgcttatgatagttatcatctgttttttgcttcttggggaaaaaaaaaagttgtgttttcttcttttcttttcttctctttttttttttttttttggagatggagtttcactcttgttgcccaggctggagtgcagtggcgtgatcttggctcactgcaacctccgcctcctgggttcaagcaattctcctgcctcagcctcctgagtagctgggattacagatgtccatcaccacacccggctaattttttgtatttttagtagagacagggtttcaccatgtgggacaggctggtctcgaactcctgacctcaggtgatccacccaccttgggctcccaaagtgctgggattacgggagtgagccaccctgcctggccatttttttttcttttttaatagaaaactttttgcaatataatcttaccatttcactcaaatgtattttcttttcttttcttttcttttctttttttttttttttgagatggagtctcgctctgttgccaggctggaatgcagtagtgcaatctcggctcactgcaacctccacctccttggttccagtgattctcctgcctcagcctcccgagtagctgggactacaggcgcctgccaccaactctcggctaattgtgtgtgtgtgtatgtgtgtgatrtatatatatatatatatatatttatttattttagtagagacagggtttcaccatgttggccaagctggtctcaaactcctgacctcgtgatccacccacctcggcctcccaaagtgctgggattacaggcgtgagccactgtgcctggcctcaaatgtattttcaattttgcaaaaacacaacagcagtggcatgtatttcatcatgtggtatgctttttacacaatgatgaaatgaggcaatagaaataagacaagggtcaaagctttcagaaaagaccagaaagagaagaaagggggcattccagaaaagaccagaaagagaagaaagggggcattcctttgccctgtgaattaataatctaggatctttaattttttcagttatgtaaatctggaagcaatttctggaggtcttttgttagaccatttctcccaggcggcactaaagggaaagctaaaatatttttttattttaaatattaaaaaaaaaagatatttacttaaagtagaagaaatgtaaattagaaaagggaatggagtggccgggcacggtggctcatgcctataatcccagcactttgggaggccgaggcgggcagatcacgacgtcaggagatcgagaccatcctggctaacacggtgaaaccctgtctctactaaaaatacaaaaaaattagctgggtgtggtgacgggcacctgtagtcccagctactggggaggctgaggcaggagaatggcgtgaacccaggaagcagaacttgcagtgagccgagatcgcgccactgcactccagcctgggcgacagagcgagactccgtctcaaaaaaaaaaaaaaggggaatggagtaatttgttgccatttaaaaattataaatctgggcctggcatggtggctcacacctgtaatcccagcgctttgggaggatgaggcgggcgattcatgaggtcaggagttcgagaccagcctggttaacatagtgaaaccccgtctctaccaaaaaaatacaaaaattagccaggcatggtggcgggtgcctgtaatcccagctactcgggaggatgaggcaggagaatcacttgaatctgggaggcggaggttgtggtgagccaagatcatgccattgcactccagcctgggtgacagagcaggactccatctcaaaaaaaaaaaaaaaaaaaaagtatatatatatatccctagcccatacctgtcgtcaggccgcgagggcagcgctgggaggaggtggctggacccagcaagcgcccgcgcgtgtgccgtgagggggaagctgcctgcctgtycccttagccttcccttcccccgcccccgtctcccaaccgtgccacatgggcgtccgctgccaaaatcagtaaaaaggagctcaactccaaccactacagggccgacgagacctcaggaaaaaaaaaacagcaagaagcaattgaacacattgatgaaatccaaaatgaaatagacagacttaatgaacaagccagtgaggagattttgaaagtagaacagaaatataacaaactccgccaaccatttttttcagaagagatcagaattgatcgccaaaatcccacatttttggataacaacatttgtcaaccatccacaagtgtctgcactgcttggggaggaggacgaagaggcactgcattatttgaccagagttgaagtgacagaattcgaagatattaaatcaggttacagaatagatttttattttgatcaaaatccttaccttgaaaataaagttctgtccaaagaatttcatctgaataagagtggtgatccatcttcaaagtccactgaaatcaaatggaaatctggaatggatttgacaaagcgttcaagttaaactcagaataaagccggcaggaagaggcagcatgaggaaccagggagcttctttacctgatttactgaccattctgatgcaggtactgatgagttaggagaggtcatcaaagatggtatttggccaaacccattacagtaccacttggttcctgatatggatgatgaagaaggagaagaagatgatgatgatgaagagaaggaaggattagaagatattgattagaaggaaatgaggaagatgaagaagatgaagatgatgatgaaggggaggaaggagagaaggatgaaggagaagatgactaatagaacactgatggattctgaccttcctttttaaaaattttctccagtccttgggagcaagttgcaggtttttttggttttgttttttttgtttgttttcctcttgtgctcagtcaccctgttcttgaggtctcttttctctacaccatgattctcaacttatttggggggaaataccttgagcagaatacaaagggaaaagagtctctacccctttctgttcgaaattcatttttatcccttcttgtctgaacaaaaactgtatggaatcaacactacgagctctgtggaaaaaaagaaaaacttcctcccttctctctgctggaagctggaggatgtgaggcccctgagtagcagtgcccagaattctagcttttctcctcctttctctgaatgaaaacatttagcatttaccaacatgtatctgtctactttctcttgttaaaaaacaaaacaaaacaaaatcttagaaaatgtgtttatagaaggtcaccaaagggtgggtttgagatgtttgggggggttaagtgggcattttgacaacatggcttctctttttgcatgtttaattgtgatatttgacagayatcctttgcaatttgacactttttaaaataaattctctgctaatgatgacttgagccctgccactcaatgggagaatctgcagagcctgtaggatcttatttggaattgacattctctattgtaatttttatcctgtttatttttaaattttctttttgtttcactggaaaggaaagatgatgctcagttttaaaggttaaaagtggacaagctgctttgttacgataaaactaaatgtgtacacacaaaacaaaattataaatctggtgactgttctatttaatagtactcactattttctagctgttaatatccaaccatatacttgtatcgttggctcattgtacctaaatatagcagtgaaagggattattttcccaaaatgttttaagtttaatgatattaaaatcatctagattgagttttatagattttcagagctgttactcttttggtgaatggcgttgaaaagaaaaggagggaattacatgaagtaaggatgattttggacttttaatcattttgcctattagaaattaaaaaaaaattttttttaccatgttacatagaaaatggttaaggcctaattttttcccccagatttgcccagctacttctttgaagaaccaaaatatatgcacaatctttgaaaacaagatggccaggtatagtggcttacacctgtaatcccagcaayttgggaggctgaggtggaggattgcttgagcctaggagtttgaggctgcagtaagccatgattgtgccactgcattccagcctgaaaatgtattccaagtttcaagcaatcctcatggaaactactggctctaaattttatgaaaagtactcatatattattcactaaaaccactacaaatgttatagttaatatttattatagaactgctgtttgttaaaattattgttaaatttggacatgctgttttaaaaatattttattttagcttgatgtaaattataaattgggagttgtctccaagtgtttaaggtaagaattaggaaggaggcattaaaaaaagaacaagtaagtgctgctgatgtttttatagtatacagtatatagagaattttgtgttaactgaatttttgttttgtcttctttaatagggatgattgaaatgactataaagtttctgagattatgagaataagaaatctcatgatgacttctagtacataatgtgggcaaaactactttgagcattctgaagtactttgtaaatgaaaaattttattgttaatacaaaaaacttgcaatggaaaagaaagtgccataaaaataccctagaaatacttaattcctccaagttatggatgaaggaaataaaaagtagtgagcaatttaaccaatatttagtgagtacttatttatgaagagtattacaaatgactttaccaaaattaaatagagtatcattctcacgaggcgggtggatcacttaaggccaggagttccagaccagcctggccaacatggtgaaacacagtctctactaaaaatagaaaaattagctgggtgtggtggcagcacctgtagtcccagctacttgggggctgaggtgggaagattgcttgagctcaggaggttgaggctgcagtgatccgtgattgtgccattgcgagcaagaccttgtctcaaaaaaaaaaaattgtgttataaaaataaacttggatctggtcttcaaatagtataaccagtaaattttgaattttataatatttcataaattgttaatttctytagtaaagtcaaacattgaaactaaaaagttgccatcagactaactcataaaatgactcattggaatcattttttttctttctcacgttagaagcagactggaatcattttttatatttgttgtttttcccttgaagtgtcagttttccattcttaccacttcttcaaaggcaagattttgtagatccagcattagttgactctttttattcttgctttatctagaattcaatttttcctctgatgttatttttggtctgcaactgtaatttaattttcctcttttatgaaaaacttcattttaaaccttttaattttacttattctccactatrtatttgaacatacttaagaatattcatctttatatatagaatcctatattgagaactgtttttctttaatgctgaatagactcaaaatcaactttgcctttttttcaaagttttaaactcaaggcaatggttagtaaatttgtagctgcccttcatctctttttttattaacacatacttatatagtaatcactatgaccaggcagtgttcttagtactctttaaatattcactcatttaatccttataatacttttataaaatagtgtaattatcctcattttaaagatgaggaaactgaggcacagctaggaagctgtgggcttggaaacaaatccagacaatctgactcaagagtctgttcttttggccactgtgctcgcctgcccccctgcctgtctgcctgcctctcatgaagagggtcttttgttttttgctttgtttttttgagataatttttttctggtatatctcttcctcagagttagttcttcccagataggrtggacaacagcaattggtaggggaatctacctttttatgctgctggtggcattgggattgctctgggttattgactcaccagagtagagagaatgtactccaattgctagagtgggaggttcagcctgggggctctggggagtggggctgcctctaattcatttctgtatccccctacacctagcatagtgcttgctgtaatgggccctaagtaaataatttattgaatggaatgaactagttctagtcccaggtttgcagttaatcattggatatgaacttcagtggattatatcatgttatgtggcctcatttccctttctataaagtggccttaatagtttgagtgaggaattaaataaattaatatatgtgaataggctttgtaaaatttaaacactatttacatgtaaaggatcaagtgttttaaaagctgtgtttatttttatttttattattttttaagagacaaggtctcactttctcaccagactggagtgcagtggcatgatcatagctcactgcagcctgaactcctggtctcaagctatcctcccacttcagcttcccaggtagctaggactacaggcacacaccaccatgcccagctaattaaaacactttttttggggggggtacagctagggtcttgctttgttgtccagactggtctgaagctcttggcctcaagtgatcccctgcttagcctcctgagttgctgggattacaggcatgagctattgtacctgtccaacagctgttttttttaaatggtcctagaaggctgggcacagtggctcacgtctgtacttccagcactttgggaagccaaggcaggtggatcacttgaggtcaggagtttgagaccagcctggccaacatggtgaaaccccatctctactaaaaatccaaaaaaaattagccaggcatggtggcgcacacctgtagtcccagctacttgggaggctgaggcaggacaatcacttgaacccgggaggccgaggctgcagtgagctgagatcgcgccactgcactcccgcctcggcaacagatcaagaccctgtctcaaaaaagtaaataagcctagatattaacactttaaaggctaaataacagaatttataagaatatatgctttcccccaaggtacacgtgatatttttaatttttattagaaaatatatatctggccaggcatggtggctcatgcctgtagcccagcaccttcagaggctgagaggcaagaggattgcttgaagccaggagtttgagaccagcctgggcaacagagcaagattgtgtctcaaaaaaaaaaaaagaaagaaaaggaaagaaaaagaaaaagaaaatatccattttggcatgcagttctaggttaaaaaatacgtatgtgtgtatcatttaagatttttctgaattggcccttgggcaaaaaaagttactgattattgttttaaagtacatttaaattctataggtgtgatctttaygcttctaatcctacatcaatgtacataaatatagaatatagaattataagagctttttggtgctgttactcttgttctcaggcagtctgtattgcttctctgaaaatacttgattttgtgcttatggaaaagaggcacttagcaccaggaagctctctctctcctctgccaggagaaactaagcaaaaatacaatcatatttacctttttaaaaaattgtgaaaaaaatatgcataacataaaacttaaccactttaactatttttcagggtactgttttgcaacattaagtacattcaccatcaccactgtctatctccagaactttttcatcttccccaaccgaaactctgtacctgctaaccactaactccctattagagaatgccawcctgtccctgaggtggagaggttgtccctagcaaccaccattctattttctgtctctatgaatttgactattctaaatatctcatataagtggaataatatatttaatatataaatttaccatctttttttttgagacggagtctcactctgtcacccaggctggagtgcagtagtgcgatcttggctgactgcaacctctgcctcccggattcaagtgattctcctgcctcagccttccgagtagctggggctacaggcgtgcaccaccacacccggctaatttatgtatttttagtagtgacggggtttcaccatgttggtaaggctggtctcgaactcctgacctcgtgatccgcctgccttggcctcccaaagtgctgggattacagatgtgagccactgcgcccatccaagtttaccatcttaactatttttaaatatacaatccattgacactacttatattcacaatattgtgcaaccctcaccattgtttccaaaacttttcatcacccaaattaaacttggtacccattaagcaatagtttcccccaacccctggtaatctctaatttattttttgtttttatgaatttgacttttctaggaaccttacatgaggaatcgtataatatttgtcctttcatgactggcttatttcacttaatgtctttaagattcatctatattgtagtatgtgtcagaattttcttccttttaaaggctggataatactccattgtatatgtgtaacacattttgttcatccactcatctgttgatggatactgagttgcttccatcttttggctgttgtaaattttgctgtgttgaacatgggtgtacagataccttttcaaatgcctgctttcactttggggtataaactcagaagaccttttctttacctcaccataaatgaggagatactggggttctagttgccataggaacttatcttgaaattaaatatactattataatgctttttcttttgagcatttatattattgggtattttctcactgttgacattatactattctggagtagattcaaattctaagtattttaattctatatttgaatcacttccataggataaagtatattaacttgtttgcctcacctatagcgggagcaataatttttagtaactctggcttaacatttttttattacttagacattttttgaaaatgtcattaatgcctatatttatatctgaaatggaattcttttaattattttcagtttttctttctacatggaatttaatgcctcaactgaacactgccttcaggaagacactgaaagttctttgtgcagatgaatgtatcttaggacatagtgataaactaagttttataaatgtcagtgctttcataatgcacagttgattattttttcatatactaggcacatagtcaaatttctatgcctaggttttcatattcagtaaacttactaatactttgttctattttgttgactatacaaaataggactacagtggtaaggaatagccattgaggaatctttttggagtataatctattcaaatcctcattttcttcatacaggtactgttttactttccatttgttactggatactttaaagaacatttactttttcgctgtttcctgagatactaactcagctatcaagctatcaaaaatatattaacatattctctgttatatattgtagtttatttctctgagaaatttattttaaagtacatttttacacctattcaaaatgtgtaaccaatggagtcagaaacttccgaacaataaagctaatccttttattgatttatttgtaatgaaacacagctttttggtaccccgatggaatggacctgcagctcctaagtctttctctactkctgggtggctagattttccttagctgctataactctaggggaaaaagcttttttttttttttttcccttcccgagttttggcaagctctgcagatcctgcttggtgtttagctatttggattcaatttatttcctaggatatttgtgctgtcaaatactttgggaaatcaaattcaaatccaaaacatttaaaatatatatttgaataaccttcaaaggatcaaatctaagaactgttcagctaacctgtattggaaatgataacagcttgaattttatgaggcaatcttagtaatatatggccttttaaagtcaccaaaattgttaaaaaaagtcatccaaaaaataacctttatatttatgtctgaactataattttgcccattatttcaagttttctttctgtgtgcaaaatttaatggttaaattgctcatgatacaaagagaaaatatttatttctagtatatcttcatgaacttctgatgtttcaagaatcaatagtcatggagaaatagggaagcatttcggctattttttaaaaattcttaggtcaatttacctttaaagattaaataatgagattagcacactcaaaatatgaaaaatgtggacataaaaagggagagttgccaccttattgataaagacacctttaaagatattcggcaagtagaattctagtaaaactacaaatgttacatttcaggaacagggtttagcttagggaattattgtgagatatatatatatgtaaattttttttgtacatagagtcttactctgtcacccaggctggagtgcagtggcacaatcatggctcactgcagcctctacctcctgggctcaagtgatcctcccacctgagcctcctgagtagctgggactacaaacatgtgccgccaagcctggctgttttttgtattttttgtagagacggggtttcaccgtgttgcctaggctggtctcaaactcctgggctgaagggattcacctgcctcagcctctcaaagtgccgggactacaggagtgagccaccatgcctcgctgtattgtggtatattaaagagcgtgtgctttggagtttaattactgactctgtcacttccagctttgtgacttttggcaaattacttaatatcactgagctttagtttacttgttttgtaaaggcaatgtatgtaaagcatttactactgtgcctggaatagggtgggtgttcaatgtacatcatcctctgtttaaaccacagttgtgatattaataactgattctcacttatactggagagtctctacaaaaaagcagactcaacctattattaagactgcatctgtaagtaactttgctagtaccaagagttcaatcttttcacagtgtcctgactataaagggaaagttttgaaaatgtgtttcttcagttaaaataatagcagctaacacttactgtttgcttmctgtgtaccagtactcttctaagttctttatggatattagctcatttatatcacaacaaccaccatatttggtaggttctatattctgttattatctctattttaataggatgcagaaactgaggtacacagagattaaccatgctcaaatttacactgggctgtaaagccaggctggtggagctgggctccaaaaccaggcagtctggctctgtgatctgcattcctgaccacttgcctaaattattaaaacatttttgtgtacatttctactggatgcattgtttaatggtggaacatttggagaatacttcatagttattttactcttttaaaacactccaccctccaaatagttgttactgttgaaatgattgaaatacttattttggaatttcaatatattcctctattttcaataaaatgaaattactttcaataagaatatatgtttggttagaaaggtaacaaaatgcttaggtgttaaagaaatgatttataaaaatagacattagacatgacccttttaaagacctttaaaattattttgttactgtgtgtgttgttttcaataaataacaccacctaattggactaaatattttgttagacatacaaaagaagttcttcaaatttggatttctttccatgttgaaagaggggagctccttgaatgctatagaaatgtattgtggttgatggcttttctgtgtttgaatttgttccagctgtgctacagtgctgttctcctacccacatggatgctctaagtagttgtgtcactcccamtgcctcttcctatgcacactgcaactacttccaggtaagattcttgcaactgtggccatgctccgcgctttatgtgcaattttatcgatattgcaaaatttcaaagtgtaattttatattaatgagtaaccagaagtaagctgtggattaatgggctttgttttctcaattcttaaaaaaaaaaagagagaattgatataaataatatctcagaattcttctaggccagaactgttcaatatagtagccactagccacatgtggctatttaagctaattaaaattaaatgaaatttaaaaattcctcagttatactagtcacatttcaagtactcaatagtctcatatggttattaaaattaaaattaaattgatttaaaaattattccatacttaacgtagacacattttgagtgctcagtagtttcatatggcttatgggtactgaattatacagcacagatctagaacattcccatcattgctgaaagttattttaaacagtgctgttctggatttttccaaggtaaaatgaataccagataaacgctacaagtgtgtaagtcaccaaatgacagattcttccaagatgatacagataaattagacttttctttttaaggagaaaggagaaaaatgtcaaaaatgagaaatttaagtggtggcccccttcatccatagcccctatgttgtaaacaccataatggttcagtatcccttagtcaaaatgcttgggaccaggagtgtttcagattttggattttttcagattttggaatatttccaaaaacataatgagatatcttgggaatatgacccgagtctaaacataaaatctaattatgtttcatatataccttatgcatatagtttaaaggtaatttcatgcaatatttttagtaactttgttcatgaaacaaagtttgtgttaagtgcttttctgctggaattttccacttgtggtatcatgccagcactcaaaaagtttcaggttttggagtatttgagattttagaattttggattaaggatgctcaacttttacttcaaatatcttctcattgtttcttaggagacacttgcttggagttaaacgttttatatagctattttaaggatacttttaaattccatgctttgtatttttatgctgtaactgccaaagattggaattgtgtgtttgccttggataatcatctagccaagatagtttcaagatagtctcagttcttaggagaatatcttactagtggcattagggtactcaaaagaacattccctttttttttttttggagaaaatctacataggaagtcaaattataatcagattgttgtttggagtatagaatgagatcaaggggacttagctggccatttttcatggctgatatgatcaagcatgatatcctagcccattcatcttcactggagggacatacctatcccacagttagatgctcttgtttgtgggtccaggcactctcttctctggatcatgctggagatactatggcagtgtttatatcttgattatgttgtgtgctaaataaaacatttttataaagaccttttcttgttatagagacaatatatggccgtgtacaatgggtcatgccttataatcccagctctttgggaggccatggtgggaggattgtttgaggccaggaaattgagatgagcctgggtaacatagtgagtgagaccctatctcttaaaaaaaaaaaaaaaaagaaaagaaataaaggaaggaagaaggaagggagggagggagggagggagagagaaagggtgggttagttggatgtagtggtgcatgcaccttttgtcctagcttgggaggctgaggtgggaggatcaagcgatcctccccccttgaggagtttgaagagtttgaggctatagtgagctatgattgtgccactgtattccagcctgtgcaacacagtgagaccctgtctcaaaaaaaaaaaaaaaatctgccaggcgtggtggctcacgcctgtaatcccagcaccattttggsaggctgaggtgggtggatcacttgaggtcaggagtttaagaccagcctggccaacatggcgaaaccctgtttctactaaaagtacaaaaattagctgggcatggtggtgggcgcttgtaatcccagctactcaggaggctgaggcaggagaatcgcctgaacctgggaggtggaggctgcagtgagccaagatcgtgccatcgcactccagcctgggtgacaaaagtgaaactctgtctcaaaaacaaaacaaaaaattttaaaaagacaatacgtgttcatcataggaaaatagcaataagcacacataaaattttgaaatagaaaaatgggaaagtgtttcagattccatcctgaaaataaatgcagttggtttagttggactgtaggtatgggtgagagtgtgcgtgcacagtcagtacattgtattgtttaagagcaagagctcttgaatacggcaaacctaggcttgaaacctggctctgtcagttatttcattgtaactttgggtaaattaggaagtttctggacctcagttttatcatttgaaatggagattatcacatttcacagggctcttttgaaggttggatgaaatctatataaagcactttgcatgtgcttggcacatagtaataactcaataaatgtgctattggctatagtcacttagtgcttataccatttgaatttacattatttggcattagtggccttctgaaaatctttgacaatctttgttaatgattgtgtttagcagcatcaactcactacatactttctttaatcataactcttctgtattttaagtttataatctgatataatcagcaaacatttattgaatgcctactctgtgcgaagctcttcattgtgcaacatcaattcattacatgttttatttaatcattcttctgtattttatgttcacagatctttatcaccaaacatgtattaaatgcctactctctgcaaagcagtatatacaagggaatatatcttaaagatgtaaatctaaaagcaacagccattttagtctattgctttgttattaaaaataaataatcccaggaaacaaaggacatttgatattccatccatttttccccatattatttggaacagaatattagtaccgctccctgaatctgtagaaggattggtagacttgtgagcatcctgtgtttgaaatttccttactgcattcctgaaacagtatatgatagatacaaattatgtttctgtctgtcagcctttatggaagaatttggtgtatagatgctttatcagcaaataggtatttgggtactatagcttttgattttgtacagtttaaccttaagaattattgaccattggagtattaaacttagcagagtggttgacatgtagtatatactaagtaaatgctaacagtagatttgaagctactattgctgaaaagtagattagtgtctaggttttcttagtgatctttaagtttaatctatttatgtttagcactcatcagcctaaatattgtagctttcctccttaatctcatattttattttctatccaaacagttatattttttcttttcccagaatccttcaatgcagtcctcctatccagttgaatttttgccttccaattggccctgcagtactactgatgaaaatacaaagacaraagtaaacctagaggctgtctttcagatagttgatgagttgcattcctcccctaaattggagatggtaaaggtggagcctgttgagaatcagtgcccaacatctccgtcttacagaggccaacacattttagctaattctaacaacagcaatccatgttctgcaagtcaggctagccagctggagccacttactcctgtaggctcagatattatgtcttttgtggttggaacagaacaagcagttgcctgctctctaccacagtcacctgagtacatctataccatccacacagctcagcctgttgaaaatarcacaatacaggaatctgcagccatccagcaagctcatgtcaaactgaaggagcacctaaatcataatccatctccatcttcagtagtatttgtgcaggaagggccaccattcagcacacaccaggtaagggggcaaagaaaaaaatgcttataaagytcaaagtacctagtacttctgctaaagactattctagtggagagtttgttcagattttatttgggtttaataccagttcattatggtttccaggaggatcatgtcccagtggttctgcacaaaagattcagaaagaagttaccttaacccttaagcatcatctcactatattatgcatggtctgaagtcaacctctaaagagaggttgtctaattgagcrttgtagtatgaagcttattttcatgttataaacatctcttgagtttttgcttcctatcttaatttggatagattagatatgcctggctgataattctrttacccaggagggatggtttatttgacagatattatgatgactttcctagccatttgtagcatggaggtaaggagatggttggaagtcttttctaactttattacagcatcattgaactgtaacttgtgagcatactgtgtttgaatttccttactaatatctgcactcctaaagcagaaggtaaaggctaattcctttattgccactagtttattacaagaaaatgaataaactttaattctgaataattagtaagaataattcatcaaaagtacatccacagaaacaaagtcaaatagcacgttctcattttataagaggaagctaaataatgtgtacacactgaacatacaatgtggaataatagacactggagacgtggaaggatgcgggagtgggagggggaacggagatgagaaattacttagtgggtacactgtacactattcacccaaagcccagacttcaccactatgcagtatatccatgtaataaaactgtacctgtgcctcttaaaataataccaaaaaaatccaaattaaaaagaaatttttttttttgaggtggagtctctctctgtcacctaggctggagtgcagtggtgcaatctcagctcactgcagcctccacctcctgggttcaaacgattctcctgccttatcctcccaagtaactgggattacaggcgagccaccatgtccagctaatttttgtatttttagtagagacggggttccaccatgttgaccaggctggtcttgaactcctgacctcaggtgatccacctgccttggcctcccacagtgctgggattacaggcatgagccactgtgcttggccccaaattaaaatctttttttgtgtgtgaattaagtattttttcctactttttatttttttcttgatcttagcctgatatgtgtatatattttttttccattttggattttttcttcaataggactgaaactctgttcattgttagaaagtcccaagataacttttggcaggtttttgttttttgcagccttttttagctctatttttagatccaaatgtcttaaatttatatcacctcatttttttttagcctgactgtcaagatctagtatattgtgttaagataatattgtaaattcagtagacaaaatrtaggcccattatggtttgttgttgttgttgttgttgttgttgttgttgttgttgtgagatggaatctcgctctgttgctcgggctggagtgcagtagcgcaatacttggctcactgcaacctccacctcctgggttcaaggaatccttctgcctcagcctcctgagtaaccaggattacaggtgtgtccccccaggctggctatttttttgtatttttagtagagacagggtttcaccatgttggctggtgttgaactcctgacctaaggtgatccgcccacctcggcctcccaaagtgctgggattacaggcgtgagccactgcacctggccccattatgttttaaatatatttgtagaacacagaatttgtctttgttccttcatagtcacatctgaaatatttcagatcttaaaactgcacttgtacacagtaactttttcattaacaaatatatcttggccaggcgcagtggctcacgtctgtaatcccagcactttgggaggccgaggcggacagatcatgaggtcaggagatcgagaccatcctggttaacacggtgaaaccctgtctctactaaaaatacaaaaaattagccgggcgtggtggtgggtgcctgtagtcccagctactcgggaggctgaggcaggagaatggcatgaacccaggaggtggagcttgtggcgagctgagatcgcgccactgcactccagcctgggcgacagagcgagactccgtctcaaaaaaaaaaaaagtatatgtgtgtgtgtgtgtgtgtgtgtgtgtgtgtgtgtatatatatgtatataaagctgtgttttaaactttttatttcattatataattttattttaaaataaattcataaagaaatggagtatttcagaagttgatcaacttgacaaagggatttacattccaaagaaaatttaggaactgtaagaaagaaacttaggctaggcatagtagcttatgcctgtaattctagcacctttggaagctgaggtgggaggatcgcttgaacccaggaagtccagactggtctgggcaacatagtgagagtctatccctacaaaaacattttaaaaattagcttggtgtggtggcatacacctgtgtcctaggtacttgggaggctgaggtgggaggatagcttgagcctgggaggtcaaggctgtagtgagccgtgatcrcaccactacactccagcctgggcaacagaatgagaccctgtctgaaagaaagaaatttgtattttataaacagggcagatatagattttataggggctaaagcttatacaattttgagggcctctttaagagaaagaatacaaaattagtagaataaagtatccacatcccactgaaaccatctaacaggatcatgcctatggccattccaacaggagaggaagtctgatagaacatattctacagagaaaaaagatggttttaaccaatcatggtgaaactatcttacttttggtcaggtgtggtggctcacgtctgtaaacccagtgctttgggaggcccaggtggaaagatcccctgagaccaggagttaccagcctgggcaacatagcgagaccctgtctctacaaaaaaacctttttttttttttttttgagatgtagtctcactctgttgcccaggctggagtgcagtggtacaatctcggctcactgcaacctccatctcctgggttcaagcgattctcctgcctcagcctcccgaatagctgggattacaggcacctgctaccacgcccggctaattttttgtatttttggtagagacagggtttcaccatgctggccaggctggtcgagaactcctgacctcatgatctgcccaccttggcctcccaaagtgctgggattacagctgtgagctaccgcgcccggcctacaaaaaaactttttaaaaattagctaatacctgtagtcctagctgctcaggaggatcacttgagcccatgagctcgaggttacagtgagctatgattgtaccactgtactcccgcctggacaacaatgtgagaccctgccttaaaacaaaaaaaaaaacctgtacttttgtaagttaaaaaaaaatcaacaagcttcatggtagatattcctctgatcataagtaaatgttttagctccatatacattttaatagtttgtgtagggagaaaggtatagtatcaataataagaatgaaaagccttataagcttgtttgttggatcatgttcccataatagaactcctctgataaaatatcttaacttttagcagatatttggaggaaatctcaaataatgaatgggtttaatattttaggtggatgccaacataaaatgccagaccagttcacgtgagaatatcttgccgtcagaacagatgggattcctcatttcagaaatggggcctgctagcaagcctagtgaagacacaggtttagccactccagccagatacagagagcacagaagcaactcacaacaaggaaagtcccctggtaaggattattgtgctctagaatgccagaagtagaatcacgctgtagaattaatatatgaatgacattttttctgggtctccatttattattcataattgtattagacctgtcacattgctgtttttacatagctgtaattttaactctatatttgttcttaattattgttgtgaagtatgtaatagttattttcytaatattgcatataatgatttgggctttgaaaatatagaacatattaagaataagcaaaggaatttagattatttaacttggagaaggcaaggatgaaggatgatttaataagtatcctcagatgccagacttcgaaattgtagttgtacttactctgttattaacagactctaggacaagagggcatgcatttatattgtgacaagagaaaatcagatggaaatttaggatattatcctgagcgcattttaaagatactataaagtatgaccctataccaatgaatggtttgttattcttgtggtttgtaagaacccagaataagtgattgttttaggcacatacagttgattctaataagacaaaatcatattttttgaagaaatagtaacatctaataaaacatgtgtctcatatcatccaaaaatcaagttaccaaagtctgcagtggacaattttaatattctagaattatgttcatgtcaggggcatgcagtgcaggcagaatgacagtgtaggttaaaatgacagaccatcattttaacctacaataatttgaaaaatgttgagaacttctgtgagaatttttccaaaaagtaaattaatagtgatatgatcatggtgtagctcagactcatagggttctttctgcaaaatgtcttttaggctaaaaactgtctatcatttattcactaaatttagcttgcacacttttagttgattatattttccaatccataattaaagactaaagatttcttaccactgaaggtgtttaacacaatggcatgagccttgaaggcaatttagatgagagaaaggcaggaactaacatttaccgtatccatttttgtgccataggacaaatctgttggaagtggcattgtcattttaaacatcaggaaatttaggcttagagtaagtaacttgttcaaagtcacatataaatttgttttattttttcattttttagagacagagtctttctctgttgcccgggctagaatgcagtggcgcatcttggctcactgcagcctccacctcatagattccagcaattctcatggctcagcctcccgagtagctgggactacaggtgcgtggcaccacacccggctaatttttgtatttttagtagagatggggtttcaccatgttggccaggctggtcttgaactcctggcctcaagtgatccacccacctcggcctcctaaagtgctgggattacaggcatgagccaccatgcctggcccttttttcttttctttccttttccttttctttattattattattattttttttttctgagacagagtcttgctctgttgcccgggctgtagtgcaatggcgtgatcttggctcactgcaacttccacctcccaggtttaagtgattctcctgcctcagcctcctgagtagctgggattacaggcacactccaccacgactagctaatttttgtatttttagcagaggcaaggtttccgccatgttggccaggctggtcttgaactcctgacctcaggtgatctgcctgcctcggcctcccacagtgctgggattgcaggcatgagccactgcacccagctgccttttttcattttttatagagatggggtctcactatgttgcccaggctggtcttgcactcctaggctcaagcagtcctcctgccttgacctctcaaagtgctgggattatgagcatgagccaccatgcatggccagtcacatataaactaatattgctaatatcctaccctaagttgtctgcctgtagagcacatattctttccttttaattttttattgtgttgaagaacatgtaacataaaatttatcattttaaccatttttatttttaatttataatttaaatataattgtacatatttatgaggtacaatgtgattttttgacacatgtatatgtagtgtaatgatcaaattgagataattaccatatccatcactctaaacatttatcatttctttgtggtgataacactctaaaccttttcttctagctgtcttgaaatatacactacattgttatttgctacaattatgctactgtgtaatagaataccaaagcttattcttcctatctaactacaacttttgaccaacttctcccaatatccccactttcctactttccccagcctctggtatttactattctactttcttctatgaaattaacttttttagcttccatatatgagtaagatcatgtagtatttgtctttctgtgcctggcttatttcacttaacataatgttctccaggttcacctatgttgccaaaaatgacaagatttcattctgttttatggctgaatagtattccattgtatatttatgtacgtacgtgtgtgtgtgtgtgtgtgtgtgtgtgtgtatacacacacacatatatatatatacacacacacatatatatatatatatcacattttctttattcatctgtagatgcgtatttaggttgatccatatcttggctattgtaaatagtgctgtggtaaacacgggtgtggagatgtctcttcaacatactgatttcatcttctttggagatacatccagtagtgggactgctaaattatatagtggttctatttttaattttttaagaaccttcatactgtttttctataatgctatgctaacttacattcctacaaatagyatataagagttcccttttctctgcatctttgccagcatttgttattttttgtcttttttataatagccattttaactggggtgaggtgatattgtggttttgatttgcatttctctgatgattggtgatattgagcatttttccatatatctgttggtcatttgtgtatcttcttttgagaaatgtctattcaggtcttttgctcatttttaaaatcagactgttttttgtttttttatttgttttgcttctgagttgcttaaattccttatgtattgtgcatattaaccttttgtcaaatgtatagtttgcaaatactttctctctttatgtaggttgtctcttcattgtattgtgtcttttgctatgcagaagattttttgtttgttgtaatcccatttgtccatttttgtttttgttgcctgtgctttcgaggtcttatccaaaaagtcctcgcccagtccattttcatgaagcattttccctatgttttcttctaatagtttcatagttttgaatcttacatttaagtatttaatcaatttagagttgatttttatatatggtgagaaattggggtttagtttccttcttctgcatatggacatccaaatttcccagcactatttattgaggagaccgtcctttctccaatgtgtgtacttggcaacttttgaaaatcagttagctataaatgtataaatttatttttgggttctctattctgttacaattgatttagatgtctatttttatgcctgtaccatgctgttttggttactatcgctttggtagtgtattttgaaatcaggtagggtgatgcctccagctctgttctttttgctcaggattgctttggctgtctggggtcttttgtattgctatatgaattttaagaattttttttctatttctgtgaagaatgtcattggtattttgataaggcttgcattaaatctgtacatcactttgggtaatatggacattttaacaataatcttccaatccatgcacatgcgatatccttccatttatttatttgtgacctcttcaacatctttcatcaatgttttatagtttccattgtgaggataattcacctccttggttaagtttgtttctaattttcttgtagctactataaatggaattggtttcttgatttctttttcagatagtttactattggcatatagagaaacactactgatatttgtaagttgattttgtatcctgcaactttactaaattcatttattagttccaatttttttggtggaatctttagggttttctatgtatatgatcatgccatccacaaacaaggacaattagactttctccgttccaatttggatgccatttatttctttctcttgcctaattggtctggctagaatttccagtactgtgttgaataaaagtggtgaaagtgggcattcttggcttgttccagatcttcgaggaaaagctttcaacttttcatcattcaatgtaatgttagctgtgggtttgtcatacagggcctttatcgtgttgaggtatgttctttctatgaccagtttgtgtttatcatgaagggatgttgaattttattttttatttttatttatttttttatttattttttgttttgttttgtttttgtttttgtttttattgatcattcttgggtgtttctcgcagagggggatttggcagggtcataggacaatagtggagggaaggtcagcagataaacaagtgaacaaaggtctctggttttcctaggcagagtgtttgtgacagagtctcactctgtcaccaggctgaagtgcagtggcgcaatctcggctcactgcaacctctgcctcccaggttcaagtgattcccctgcctcagcctcccaagtagctgggactacaggcgcgtgccaccatgcstggctaattttttttcttgtgttttagaagagacgcggtttctccatgttggccaggctggtctcgaactcctgacctcaggtgatctgcccacctcggcctcccaaagtgctgggtttacaggtgtgatccaccatgcccggccaggatgttgaattttactgaatgattttttagcatctgttgaaatgatcatgtggttttcatccttgattttgttaatgtaatgtattacattgattgatttgtatatgttgaaccctccttgcatccctgggataaatcccccttggattatggtgaatgatctttttaatttgttgttgttgttgttgttgttgttgttgttgttgtttgagatggagttttgctcactctgtcgcccaggctggagtgcaatggcatgatcttaagctcatcacaacctctgcctcctaggttcaagtgaatctcctgcctcagcctcctgagtagcagggattacaggcgcctgccaccatgcccagctaatttttgtatttttagtagagacaggatttcgccgtgttggtcaggctggtctcaaactcctgacctcaagtgatctgcctgccttagccccccaaagtgttgggattgcaggcgtgagccactgcacccggcctggtttgctagtattttgttgaggatttttgcatgtgtgttcttcagggatattgacctgtagttttctttttttkttgttgtgtttttgtctggttttggtattagggtaatgctggccttatagaatgagtttgaaaatatttcttcctctccaattttttggaatagtttaagtagaactggtattagtgccttaaatgtttggtagaatttagcagtgaagccatcaggccttaggcttttctttgctgggagactttttgtttgtttgttttgagacagggtctccctctgtcacccaggctgaagtacagtggtgtgattatgactcactgcagcctcagcctcctgggctcaagtaatcctctgatgtcagcctcctgagtagctgggaccacaggcatgcaacaccattcccagctattttttttttatcttccccaatttaaatcttttaatttaaaagtaaacttcactgttgaacatgcaaacttggggagggcagaaagatcacacacacaaggctgccatttcacacctggagggtggcgtggaggccaggcagaggtgctcctcacatcgcagatggtgcggccgctgggcagaggtgcgcctcacttcccagatggtgcggtgacgcctagctaatttttaaattttttgtaggaatgaagtcttgctatgttgcctaggctggtctcaaactcctggcctcaagtgatcctcctgcctcagcatcgcaaagtgttgcgattacaggcatgagccaccatgcgaggccacctgggagactttttattactgctttgatattattgctcattattggtcttttcaggttttctctttctttgtgattcaaccttgatacattttatgtgttcaggaatttatccatttcttctaggttttccaatttgttgatgtgtagttgttcatagtagtctcttatcctttgtacttctctggtgttagttgtgatgactcctttttcaactctgatttagaggtttttttattatttctttctttcttttttgtttttttgtctttgtttttcgaggcagggtctcactgtgttgcgaagctgtagtacagtggcacgataatagctcactgcaaccttgaactcctgggcttaagtgatcctcctgcctcagccttcctgagtagctaggactcctcgtgtgtgacaccatgcttggctaatttaaaaatttttttttgtagagacagggtcttgctaggttgcccaggctagtcttgaactcctgtcctcaaggaatcctcctgcctcagtctcacaaagtgcattgcaggcatgagtcacacctggccgtcctttttttttttttttttttaaagtctaactaaaggcttgtttagtttgcttaccttttcaaaaaaacagctctttgttttggtgatcttttatattgttttttaaactattttatttatttctgctgtgatctttactatttctttccttctacttattttgggtttagattgtttttgtctttctagttccttgagatgtaatataatattgtttatttgaagtctctatacctttttgatgtaggcatttattgccataaacttccctcgtaggacagcatttgctgtatcacataggtttttggtagttgcatttccactttcatttgtctcaaggaatttttaaattttctttttaatttcttcgtagatccattggttgttcatgagcatattgtttaatttccacgtatttgaacagtttccaaagttcttcctgtattgatttctagttttattgcatgtggtcagaaaagatatttgacgtaatttcagttttaaaaaaaattgttaagacttcttttatggcctaacgtatggtctattctggagattgttccatatgttgttgagaagaacatatattctgtagcagttgggtgcaatcttctgtaaatgtttgttaggtccattaggtctaaagcacagttaactctgatgtttctttgttgatttctgtctggatgatttgtccattgctgaaagctgggtgtttaagtcctctactattattattttgcagttgatctctccttttaggtttgttaatatttgcattatatatttaggtgctccagtgttgggtgtgtatatacctacaacttttatatcctcctgctgtattaacccctttatcgtcatcatcattattatttctgagacagagtttcactctgttggtcaggctagagtgtggtggcacaatcccagctcactacaacctccgcctcccaggttcaagcgattctcctgcctcagcctcccaagtagctgggattacaggcgcccaccaccatgcccggctaatttttgtatttttagtagagacaggatttcaccatgttggccaggctggtctcaaactcctaacctcaagtgatccgcccaccttggcctcccaaagtgctgggattacaggcgtgagctactgtgcctggcctcctttatcattattttttattggttttaattaaagtccttttttttttttttgagatggagtttcgctcttgttgcccaggctagagtacaatggcgcgatcttggctcactgcaacctctgccttccaggttcaagtgattctcctgcctcagcctcccaagtagctgggattacaggcatgcaccaccacacccagctaattttatatttttagtagagacagggtttctccatgttggtcaggctggtctcgaactcccgacctcaggtgatccacctgcctcagcctcccaaagtgctgggattacagacgtgagccattgcacctggccttaaagtccattttatctgatataagtatagctaatgctcttcttgtttggatgatggaaaagatggaacattcttctccatcccttcactttcattctatgcatatcttttttttttttttttttttttttgagacaaagtctcactctctcacccaggctggagtgcaatggcgcgatcttggctcactgcaaactctgcctcctgggttcaaatgattctcgtgcctcagcctcccaagtagctgggattacaggtacacgccaccaagcccagctaatttttttgtattttttggtagaaacagaatttcaccatgttggccaggccagtctcaaactcctgacctcaagtgatctgcctgccttggcctcccacagtgctaggattacaggtgtgagctaccgtgtccagcctatgcatatctttttttttttttttttttttgagacggagtctcgctctgtcacccaggctggagtgcagtggcgggatctcggctcactgcaagctccgtctcccgggttcacgccattctcctgcctcagcctcccaagtagctgggactacaggcgcccgccactacgcccggctaattttttgtatttttagtagagacggggtttcaccrttttagccgggatggtctygatctcctgacctcgtgatccgcccgcctcggcctcccaaagtgctgggattacaggcgtgagscaccgcgcccggccgcatatctttttaaaattaaaaaaaattttttttttttttttgagatggagcctcactccgtcacctgggctggagtgcagtggtatgatctcagctcactgcaacctctgcctcccaggttccagcgattctcgtgcctcagcctcctgagtagctgggattacaggtgtctgccaccacacccagctaatttttgcaggttttgtagagacagggtttcaccatgttggccaggcttgtcttggactcctgacctctggtgatccgcctgcctcggtctccagaagtgttgggattacaggcatgagccactgtgcccggcacattgtgtgcgtatctttataggtgaagtgagtttcttataggtagcatatagttgggtcttttaaaaaatccattcagccactctatgtcttttaattggagaatttagtccatttatattcaaagttatgacttacaggtaagacttattactgccattttgttagttcttctggttgttttgtaactcctttcttcctttcttactgctttcctttgtgggtaagtgattttctttggtagtttattttaattccttgctttttatttttagtgtatcagttatgggttttgtctatgattaccacaaggcctacaaaaaacatcttacagttataatttattttaaactgatgacaacttgactttgattgcaaagaaaagaaaagaaacaaacaaacaagaaacccttaaactctatactaactccatcccccttcacactttgacttctggatgttatcaatttacatctttttatattgcctatcttttaacaaactgttgtagttattaatctttcttctttttgtatttattatttttaatagttttgtcttaggctttacactaaagatatcagtggtttatatatcacaattacagtattagggtattctgaatgtctctgtatgcttacttttatcaacgatttttatactttcagatgttttcttgttgcacatttaacatttctagtaaaacaggtctggtggtgatgaattctctcagcttttgtttgggaaaatctttatctctccttcatgtttgaaggatagctttgctaggtacagtattcttgattggcaatttttttttccttcaacactcagaatacatcatcccactctctcttgcctgtaaggtttctgctgagaagtctgctgccagatgtactggagctcctttgtgtgttatttgcttcttttctgttgctgcttttaggattctttctttgttcttgatctttaagagtttgattattgcatgctttgaggtagtctcatttgggatctgcttggtgatctctgaccttcttgtacctgaatatttgtatctttctctaggtttagaaagtgttctgttactgtttatttcaataagttttctacccctttttctttattccttctttaaggccattgagtcttatatttgctctttgtaattctgtcccatagatcttataggcattctttgttccttttagttctttttttctcctctgactatttccttttttctttttctttctttctaccttttttttttttttttttttgagacaggttctcactctgttacccaggctggagtgcagtggcctgatctcaattcgctgcaacttccacctcccaggttcaagtgattctcatgtctcagcctgccaagtagctgggatcatgcctggctaattttttgtatttttagtagagatgcagtttctccatgttggccagactggcctcaaactcctgggctcatgtgatctgcctgcctcggcctcccaagtgctgggattacaggcatgagccactgcgcccagatgaatgttcttgatattagtggacatttgtcgatatctgggcattagagagttaggtatttattctagtctttgcagtctggccctgtttgtacctgtcctccttcagagggccttccagaaattcaaagaggactgcctgttgagttccctaagcctgtggtcactgtaaccactcagcagtagagggcaccctaagcccacgtacgctgcagctcttgcagactcctagtctccagtcctaatgaacttgaggaagatcagggagagttccctgggttctcaagtaaagtccccctacactcttccctctctttcccccaagttgaaggagttcctgtccatgctgcacttcctggagtttggggaggggtgacatgggtattcccatggctgtggcagccggtgctatgctggatcacaccctaagcccacagcatcacagagcagcacagtaccaggtcttgcctaagaccctctgtcactactgtcagactgccactgatacttattcaggcctgagatcactttagtcagacagtggtgaagctggctgggacttgggtccttcctgctggggtggcagattgctttctagcccagggtaggtatagaagcaccatccaggagcactagagtggaatcaggggctttggtgttctgccaggtgctgtgttttaatgtggtggggctggtactaggttcctagacagagtcccctgcactctttcgtctctttttttttgagatggagtcttgctctgtcgcccaggctagagtgcagtggcacagtcttggctcactgaaacctctgtctcccaggttcaagcgattctcctgcctcagcctcccaagtagctgggactacaggcgtgtgccaccacacctggctaatttttgcatttttagtagagacagagtttcrccatcttggtcaggctagtctccaactcctgacctcatgatccgccctcctcggcctcccaaagtgctgggattacaggcatgagccactgtgcctggtcttctctctcttttacacagtagtctcttaccacactttactgtgtagagctgggacagggatgacgtggcactcagatagctactgcaactggtattgtgttgggtcgcaccccaagcctacagcctcccacagcagtacagtgttagggctcacccaagaaccactgttgctctggcctgcctgccacggaaatttattyaggacctgaggccactttagtcagcccacagtggatcaggccaagactcagtttcttcccactgtggcagtggattatcttctggcccagggcagatctgaatgmcccttccatgggcactggcatggaatcaagggccacaggattctgccccttgctgtattttgctgcgatggcaccagtactaagttcaaatgcaaaatctcccccatacttccctttgcctctcttaagtgtacagattttctctatgctgcattgcgtggggttgggggtagggtgctctgggcaatgtgagactgtcctttctaccctcttcaatgtgtcttttcttgttatgctaaatccaggcactgtgattcatcacctgatttcttcagctcttgtgaaggtgttttcttgaatggatagttgatgttcctgtggggggagaatcactagaggattcaaaactgccgtcttgctctgcctctgccccattttaacctttttttttttttttttttgagatggagtttcactcttgtcgcccaggctggagtgcagtggcgcgattttggctcactgcaacctctgcctcctgggttcaagcgattcttctgcctcagcctccaagtagctggtattacaggcgcctgccaccatacctggctaatttttttgtatttttaatagagacagggttttgccatgttgggcaggctggtatcgaactcctgacctcgggtgatctgcccaccttggcctcccgaagtgctgggattacaggtgtgagccaccactcccagccccattttaaccatttttaagtgcacagttcagtagtatattcacattgtttgaaacagatctctagaacatttttatcttgcaaatctgaaactctatattcattaaatacaactttccttttcctccttccsctggctcctagtaaccaccattctactttctgtttctatgcatttaactattccaggtacctcatataagtggaatcatgcagcatttgtatttttgtgactatattatgttctcaaggttcattcatgttgtagcacgtgacaggatttcctttctaaggctgaataatattcctttgtacgtgcatatgacattttgtttattcatttcttaatagacatttaggttgcttccatcccttgactattgtgaatagtgccactgtgaacttgggggtggaaatatctgttttgtttttccttttaagagatgaggcctcacaatgttgctcaggctagactcaaaactcctggactcaaataatcttcctttctcagcctcccaagtactgggactacaggcgtgtgccaccgcgcctggctccaactatctctttgagaccctgatttcatttgcatgtatccagtaatggattgctggatcatatggttaatccaatttttaatttttttaggaaactctgtactgtttttcatagctgctatacyattttataatcccaccaacattgcaaaatagttttaatttctccacatccccatcaacatttattatttcctggatttttttaaggaaggcttctgtaagtagccatctcagtgagcatgagctgatagatacctcattataggtttgatttttttttacatttctctgataattagtgatgtttagtatcatttgtatactcattggctgtttgtatatcatctttggaaaatgtatattcaagtcttttgcccatttttcaattggtttgtttgattttttggtgttgttcagttgtaggagtttttaaaacatattctgaatattaaccccttagcgaatatgatttacaaatattttctcccattctgtgagttgccttttatgctattttgtcctttgatgagcagacacttttaagtttgatgtagtcccatctgtctattttgctgttttttcttttccttgtgctttgtgtgtcatatccaggaaagcattgccaagtccagtgtcgtgaagttatctctctctgttttcttctaggattgttatagtcttaagtcttacatttaggtctttaatcctaaagacctaagttagttagtttgagttagttttcatatatggtgtaagcgtttaacttcattcttttgcatgtggatatccagttttcccaataccatttgttaaatagagagattgtcctttccccagtgagtgggcttggcacccttgttgaaggtcatttaataatatatgtgatatttagtctattgaatattcattgatatatttggctgaatttatgccagtagcacactgttttgattactgtagctttgtagtatgttttgaaatcaagaagtgtgagtcctctaactttgttctttttcaaaattgttttggctatttgggttcccttgagattccatacgaattttagtatgaatttttctatttctttaaaaaaaattcactgagattttgaaaggcattgtattgaactgtagattgctttgggtagtatagacatcttaacaatatttccagtccatgaacatggaatgtgttctacttattagtgtcatctttaatttctttcagtactgttttgtaattttcagtgtaaaagtcttttgcctcattcgttagatttattcctattttattctctttgatgctattgtaaatgaaatctttacttttaagttttaatctcacaaacagtgcacaaatacattctccttgtaagaactgctaaggccagaattccctttgactactacctccccatactgttccctttatgtcttccccagacgtaaccacatgttttttctacatcatcttagtaatggcacagtcactcgaataagcagataaccttttcagataatactccrgagggaaaagtttctcttatataagtttgggtatatttgttaaaaattattctcattactttatggttacacgtactagactactgaactaatataacaagagaaactaaaaagaaagttaaaggatagatacctctgattatgatttaagaacagtatattcaaaggttcagagacaagatgctttcctgagtgtatacaaaggaagagatgcttgagactgagggatggggttggttggtaggggatgggttgaggcagagggctcgagagcaggcaagttgattaacgggtcatatatagagtagttaacacatccacatatccttgcctccttctgaagagcgttggtaggtagaaattggatgtttctcctttaaaaaaaatgaaagacaggggtgggacttagaaatctctgtttcagcagtcgtcaagttggggaactaagaatgaaaggactgatcagatgcagtggctcacacctgtaatcccagaactttgggagaccaaggcaggtggatcacagggtcaggagttcgagaccagcctggccaatatggtgaaaccctgtctctactaaaaaatacaaaaattacactttgggaggccaaggcaggcagatcacgaggtcaggaggttgagaccatcctggctaacacagtgaaaccccgtctctactaaaaatacaaaaaattagccgggcgtggtggtgggcgcctgtagtcccagatactcgggaactgaggcaggagaatggcatgaacctgggaggcagagcttgcagtgagccgagatcactgccactgcactctagcctgggcaacagagcgaaactctgtctcaaaaaaaaaaaaatgcaaaaattagctgggtgtggtgctgcatgcctgtagtcccagctcctcaggaggttgaggcaggagaatcacttgaatctgggaggtggaggttgcagtgagcagagatggcaccactgcactccagcctgggcaacagagactacatctcaaacaaaaacaaacaaacaaaaaagaattaaaggactaactaagtctagcccatctcttccacttatgagacaaactctacttgktttgtctcagatatgcaaggcttatttttcaaatgttaatgttattcaccatattaacaatataaacgagaaaaactatgaccatttaatagatgcagggaaagcattggacaaaattttgcactattttatagtaaaaactctcaacaaactaggaatggcagaaaattcctcaaaccaataaaagagtatctataaagtgtgtacagtaaagatcataatggtgaaaagctaaaccatttaccccccagagactgggaacaaggcaaggatggccactttccctacttatcttcaacactgtactggaggacctcacccttgaaataaggtgaaaagttatatacatcctgtatgtttacaactctttgactttgatcacatagccacagccaattaattttagggtagttttggaaaagaaatctttggctaggtgaccatgtacccacctaagcattccaccaccatggaagaagaggtaaatgacttctgggggacagcctctgccaaatccactgctttgactacccaattatcagagcacagccatgttagtatacacagaacatgctcacattctccccaagagagacaatgccaaagacccatacaattatggcatcctgcttaaagtcaggatctcttgagtattatgaaattcttttctgttagatggctcttctttgtctcgtaacataaaaaacaagttatccatcctcccccctcactcacacatacccaaattagagtattagaataggatatgtaacaagtaaaactttcactcaaaaaagagaaaaataggaaacatacaacagtcgctgtttcacagcatttatcaaatcctgctggatggaaactgcaaagattttctgccttgacagtaggataaattccttggttagcccatcagtgaagccctgcttttgctttctgggagtatttttctatttgttgtctccatcacctctggcgttcccttccaagagggctcttcctggttcactatccttcatggactcatctgaagtggtcctcagggatatgctttttttttggaatgatcaagtttttgttgcctacttcttttcaaagccaacttttgtatttgttaattttttccattgtctgttttctatttcattgatttctactcttatctatattatttcctttctcgtatcactttgggtttactttcttcttccttttctgattttttaaggtggaacttcaggtcactgattttagatcttcttttctaagattaacatttaaaactatacatttccctttaaacatcgcttcagctgcatccagcaaagtttggtgttgtatttccattatcactcagttaaaaatattttctttttccttgtgattttgtctttgattcatgcatttttagatttattcccagatatttaaataaatttatatttatttccagatatttgaggttttcctagttactttattgttatcgatttctaatttamttgtgttgtggtcagagaatacattttgtataattttgatcctttatatttattgagacttgtttcatggcccagtgtatggtctatcttggtgaatataccatttgcacttgaaagtaatgtgtattctgcagttgttaaatgtagtgttctatctgtcaattagattaagtgttgattatgttgttcacatctttcctattccctgaattccctatgtcttaatttttttaaacctctcatatttttttcctccacatttcctttttgagttatttcttctaccttcatgttcactctttctctgagactaggtctaatgtgctgtttgactcatccactgagttattaatttgattatttttcaattctaggatttctgtttgttcttttttccagacctctggtcacatttttgagtttctagttatctgccaaaatttttcaagcttggaatttgcctccttgaaatagtaagcatggttgttttcttgctgaattctggtaattccagtatatggagtttccacaggtctctttcagttgtctcatttgtgttggttctcaaccayagtggctactccctcatgtaactggttattttcgctgtatgctggacatagtatttgaagaatagtatttgaaaagttacttgtaaaaataatttaaggcctaggatgacattatcttcctcaaataagatttgtttctaccaggcaattggggtcactggcaattagggatcaccttaatccagttcagagcctgagatttttctgaccacaaactgtgcaagggcttgtttccctgtggttcatcctctcctgggtgcagcttattgagatcctagccataaaagtgggaatctcatcagaactcaacctttgacaagcccagtctctgacatttgtccctctagacccaaaaggcaaagctcagcctctcaatctcctacagatggcaaatgtcacaaaggtaaaagtagcctcaaatacaaggcttactctctggatccccactctcacctgacactcagcccagtcattctttactatctcattaccttttgagacttttaaagaatattgtttctatcatctgtccaggttttttagttgtcttcaataggaaagctggtcttaattatcaggcctgacattaccagaagtggtcatatcattaaaaaaaaaaattcttacctctttacccttccatttttcctattttttctttagtccagtattggatatgctgagatgaacttctctctctgtttttttctttcaattttgttatacttttatcttttttctattttgtggaatgttcctcagatgaaactttcaaatgtttaattttaaaaatttggctactaaatttataatttccagttgggcatggtggctcatgcctgtaatcccagcactttgggaggccaaggcgggcggatcacctgaggttgggagttccagaccagcctgaccaacatggtgaaacccygtctctactgaaaatacagaattagctgggcatggtggcgcatgcttgtaatgccagctactcaggaggctaaggcaggagaattgcttgaacccgggaggtggaggttgcagtgagccgagatcgcgctattgcactttagcctgggcaacaagagcaaaactccgtctcaaaaaaaaaaaaattataacttctaacagctcttttttattctattctataattgttccttttkgggggaacttgctgttcttttatatggatataatatcttcttatagctctctgaggatactaaatggaagggctggttttgaagttgtttccccacaacatatgtcagtttcctctacgttctttctggtttttttttttggttgttgttgtttttgttttttttttccattggctttcttccctattcaagaatggagcattaaaaagcttacagaagctctgttgacaagatttgtcaactgttgggcttagcttaatgttaatcagcatgtaccaccaattttttttatttattattattttttttttgaggcagggtctcactctgttgcctagtctggcacgatcatagctcactgcagccttgatctctgggctaaagtgatcctcccacctcaaccaacctacccccaaccccccaaagaagtagctgggactacaggcacatgccaccacacctagctgatttttttttacttttcaaagagatggagtctcactgtgttgcccaggctgatctccaactcctggtctcaagcaatcctcccaacttagcctcccaaagtgctgggattacaggtgtcagccaccatgcctggccttaaggcacttcttagtgcaacttcaggttggggtattgaagcagttggattcatgacccagttactgaactctagtcaataagttgtcaaccacaggcagtcaaatattcccttccatctctgcttgcacactaggtacctctagcctgagtttatctcttcttttagggctttgctgaatgtgtcaagaaatagtcaacaccttgtgatttttgtcaatcttttcccccatggttgtatgttcacttggcatgtgtggtctgacttccatggtgtcacaggtaatgattttaccaaatatgttggcatggataacaaagatcaccaacattctagcttgctgtgtcctaaccatgtgctgcctgactgcaaagccagtagcacatataatcatgtatcccttaatgacaggaatgtattctgagaactatgtcattagttaatgttattgttttataaacattgtgaattgtacttacacaaacctagatgatgttgcctactacatacctaggctgtatagtatagcctattgcttctaggctacaaacccttacagcatgttactgtattgaatattgtaagcaattgtaatacagtggtatttgtgtatctaaacatagctaagcatagaaatggtacagtaaaaatagagtacaatcttacagaatcatcatcatctatatggtctgtcactgaccaaaatcaaccaattatttttttttttggcaatttgattggcaaaactttaactgttgataatatccagctttgataaaggtatagagaaaaggaaccttctctatgctgtaattggaatgtaaattcgtatagccctataaaggacaattggcattatttatagataactaaaatgcttatgagttttgactcaggaactctactcctgggaatctctcctgtagaaatgtgtatattcccaaaggtactcaaaataagtttgctatagtgttatttataatagcaaaaatttgagaaaagcataaatgcctgacagtggggaaccagatacattatgacatctacataataaaatactgtgcaaccatttaagaaactgaagtagcttgatgtgttgtgacctggaaagacagtaagtgttcataatgtgttcagcaaatgggtaagttgcaacacaatatgtctagcacaaccccctttctagaaagaaagaaaagaaagtatatgctgtaaaattatagaaaaaagtctggagatatacgatatagctgataaatataacactagttatctctcagaagatagaatgtatgggtgcaggggtatgcttaacttctcaatttgtatatgtatatataataggattacgggaaattttcaccatctgtattcttctatgtttttcaaattttaaaaaatctaaaaatactaaaagtagtttaaatacttgaagtgttcctatagcaggaatataaaagccttaaagtaatagaaatgaacaatttcagagtgtttttaaaaaatatttatatcccagatagtaaactgacttttgaggtttagatatgattgactcaagataaacttaccctataccaagaatgcctttctaagatttctgagactttctagggttcacagtagcttttatttttgagtttctgcttaaatgtaattccagacttgtccatatctgacctcccagggctgttcttatctgtctgttccatgctataccagatgcagaacttggcccactttctttgacctcttcctccctttaagcattatgctaggcatgtgtatgtgtagcacacttttatgaagatgtcgggaggcagaaataccgacagaaatatttagaataccgcaaaaatggaattaaaaggcccccagtcactttacggcatctttccttgtcactagtcaatatggtcctctgccatgttgctttctttccttgtactagcaccagaccttcgtttctctgctttctgttgttgttgttgttatggttggttttttttttctgctctttccccaggtgctgaattcctgtgttttacttaggcaaagaaggttaggtatctcttctattttttgatgtttttaaggcgtcatttttcccaaccagaacaatctatcgagacatattcctcaacaaagacaattacctccctgagaggaactctggtgcctgctgttaaaaaaataatttcctctctttcactacatgttatggttataagtgtaactgataaaataattagcacagtaattatctttattaactcttcctgttgttttttttttctaagtaaagccttatcctttggtcagtgcagttaatagatgagtcttaattgatgttggcttcctgctgtgaaacataagagttgtgaaatcttggcatcattatgacacctaatcacattttcattttattatggacaagaggaaaatgagttatgattaagctagaacctctctgctaaaaaaaaaaaaagttttttaattaaagtgtaggcagaaatacaattcatgaagttgcaaatgattctgctctgatagaccttggcctagcagttggtctatgaaaacatggctatatgtaaggtcccatggcattaagagaccttaaccaaagtcaatgtgtgagattaatatactgctcattaaaaacagtacagcatatggttagaaagaaagcttttggtgttagaaaaacctgcattaaaacctggattctgctctttactgtgtgaccttggacgtgtttacctaactgagctttggtgtcctcatctgcaaaatgaggaatatggattataatgatataaatcatagaactggcttagtattatgctgggttacatagtaagtagtccatacatagtagcaatagaattttagctatttttataacattyactttttttttttttttttttttgagatggagtctcgctctgtcgcccaggctgcggtgcagtggcgtgatcttggctcactacaagctccacctcccaggttcacaccattctcctgcctcagcctcccgagtagctgggactacaggcgcccgccaccatgcccggctaattttttgtatatttagtagagatggggtttcaccatgttagccaggatggtctcgatctcctgctcgcctcagcctcccaaagtgctgggattacaggcatgagccacagcgcccagccaatatttactgttcttatgtttattaccactggttacttttcagatggctagtctctatttatttatttatttgtttatttattgagctggaatctcactctgttgcctaggctggagtgcagtggcgtgatctcgactcactgcaacctccgcctcctgggttcaagcgattctcgtgcttcagcctcccaaatagctgagactacaggcatgagccaccacacaactgatttttgtatttttagtagagatggggtcttgccatgttggccaggttggtcttgaactcctgacctcaggtgatctacccaccttggcctcccaaagtgctgggattacaggcatgagctactgcaccccgccttagtctcactttaaattcacgtaggctgtcagtgttgcagcagtcctataatattttctagtcaatatattccccattctccaaagccactctattatatcctgtcctctctgctccgtttccaacactcctcctctctcttcattcgtggctgtgaccctgttttatatcttactgagaaaatagaagcagctagaatgaagctttcatatcttcccaccaacatatttatcagtctacttccaattgtaaccctacacgctgcctttccttctgttataatggaaaagggccagtcctttcatttgtatacagaatcctgtcccctttggtgtactcacagacttaggacctactgctatcccccttactcttcaataatcacattgtrtctttatttttgctttccccctaaggcagagtcttcctctgtcatccacgctggagtgtagtggtgtgaatacagctcactgcaacctcgacttcccggctcaagcaatcctcccatctcagcctcctgagtaactgggaccacaggctcatgccaccatgcccagctaatttttttaatttttatagagacagggtcttgccatgttgcccaggttgtcttgatttcctggtctcaagtgatcctcctgccttggcctccaaagtgctgggattataagagtgagccacagtgcctggccacattttatcttttttttttttttgagatggagtctagctctgttgccaggctggagttcagtggcaagatctcggctcactgcaacctccgcctcccaggtcaagcgattctcctgcctcagcctcttcccaagtagctggaattacaggcacgcgctgccacatccagctaatttttgtatttttagtagagatggagttttaccttgttggccgggatggtctcgatttcctcccaaagtgctgggattataggcatgagccactacgcccggcctaacattttatcttttatgttagataattcccatcagcatgcaaacatgtcgtcataggttctatgttttaaaaatccctttgggccaggcacagtggctcacgcctgtaatcccagcactttgggaggttgaggcgggtggatcacctgaggtcaggagttcttgaccaacctggccaatatggtgaaaccccgtctctactaaaaatacaaaattaaccaggcggggtggcatgcgcctgtaatcccagctactcgggaggctgaggcaggagaatcaattgaatccgggaggcggaggttgcactgagccaagaacacgccactgcacttcagcctgggcgacaagagtgaagctccatctaaaaaaaaaaaaaaaaaaaaaaaaaaaatccctttgacctttccttcatacctccatgtagctattcctctactttttctgctttccttagagcaaagctccttggaagcatatccttacttcaactactccaagcagatttttctttcttctgctcaactgaaacttcatttgtcaaggtttccaatgactgccatgttgccaaatccagtagccaattatcagtccgtattttacttaattcacctcagcagcatttgaacagattatttcaaccttcctgaaatgctttcttctggcttgtggaacatctccctttcctagttttcactggccaactctgtagtttcttttactgaatactcttcaactttcctaatttctaaatattgatgaaccccagagctcaattctttctctctctctattcaattcctaggtaatcttaaccagtctcatgcttttattatcacctttgtagtggtgtctccgaaatctgtatcttaagtctcaatcttctctgaacctcacttgtatacactactgcctacgctacgtctttggatgtccagtaggtgtcccaagcttaatatattctaccttttccccaattttacttatttacttataaataaatagtattggccaggcgtggtggctcatacctgtaatcccagcactttaggaggccaaggtgggcaggtcacttgggcttaagcgagactagcttggccaacatggtgaaaccatgtctctacaaaaaacatgcttggtggcaggtgcttgtggtcccagctactcggaaggctgaggtgggataattgcttgagcctgggaggcagaggttgtagtgagctgtgattgtgccactgcactccagcctgggcaacagagcaagaccttgtctcagatgaatgaatgaatgaatgaatgaatgaatggtacttctagtcatctggtcagccacaactcttggagtctcccttgactcccttytctcacatgtccagtccatcagcaaatcttatcagctcactgtagatgcagatccagaatctgaccatttctcacctcctttatttggtgtcgccatggtccaagctactactttctcttgcctagatgactgcagtagcttcttaaggtttttctgcttctgcycttggcccctacagtctttctgccagagtgatctcttaaatcagtaattattttcccatctaaatttatttaatagttttctatatatatatatgtagaagaaaatctgagaatccttactgtggtcttcaagatgctgaatgatttggctcctggcaactgttctggcttcatcccctaccaccttctatctccctcatctagtccagccccagcagtttcttcactattgtttaagcataccaagaatgctccagcctttacacttgctattrtctctgcctgaaatgtttttcacccagattttcacatggtgtgttccttcatttcattcagtcctctgctcagatgccagatcatcacagaaatcttcctgaccatgccatctgaaatggcaccctgttccccatgtcctgccctccttcagtctttattcttctttgtttttcttctgcagtgcctattactacttgctatttttctataattcccacccccactctttctagaaggttggttctctgtggttgttttacccattgttgtatccccaggacctagaatattacctgtggcactccttgttggataaataaatgaatgagttgctttttttctccatatacattcttatcttactaatgtactttttaaaaatttatggaaaaatgcagtcttttaaaaaattgtgataaatgctcataaaatttaccatcttaaccatttgaaaatgtacagttcagttaatgccactgctaccatcaccaccatttctctccagaactcttttcatcttgcaaaactgaaactctatacccattaaacagtaagtctccatttccactgtcccctgaatgctggtagccaccattctactttctgtgtctgtgtctatgtctacattttgtctctatgagcagtcttttagttaaccactaagaggtaaggtttgaatatttgggaagtcaaaccaccctcaggtttcttttagcaagtacttactgaatgcctgccttgggcttggtactgtgctaggtccaatagggttacacaagtggtgtcttctacagttctcttctgctggaaacaagaattgtgtatgttttacaaaagacaccattccatatctcattaccatgctctgatactgaaaactaagatatgttttggtatgtgtattagtcagggtcttacagagtgatagaaccaataggatatatatggtcatgcacggcataatgacattcagtcaatgacagaccatatatatggaacagtggtcccgtaagattgtaaataatgacattcagtcaatgacagaccatgtatatggaacagtggtcccgtaagattgtaacactgtagttttatggtaccttttctatgtttagatacataaatacttactattgtgttataattgcctacagtgttcagcatagtaacttgctgtactggtttgtatcctaagagaaataggctataccatatagccttggtatgtgtgttagtccgatttcacactgctgataaagacatacccgagactgggcaatttacaaaagaaagaggtttaatagacttacagttccacgtgtctgggaggcctcacaatcatggtggaaggtgaaaggcatgtttcacatggcaacagacaagagaagagagcttctgaagggaaactcccccttataaatccatcaggtctcatgagactattcactatcatcagaacagcacgggaaaacctgcccccatgattcagttacctcctaccaggtctctcccacaacatgtgggaattcaaggtgggatttgggttggggacagccaaactatatcagtatgtagtaggctataccatctaggtttgtgtaaatatacaatgtgatatttgtgcggggacaaaatcacctgatgacacatttttcagaacatatccccattgttaagtgactcctgactgtatatagacatataagaggggatttattagggaaattggcatatactgttatggaggctgagaagtcccacacaagctgtctgtaagctggagaccctggcagtgtagctcagtccaagtgtaaaggccacagaaccagggaagccaatggtgtaacttgtccaagactagagcctaagagccaagggggcttgtggtgtaagtcccagagtacaaaggctggggagtctagagttttgatgtgcaaggacaggagaggaagagtgtaccccagctgcagacacacttgccttttctccatttttgttctctctgggcccctggctgactggatggtgcctacccatattgagagcagatcttccccacctagtccactcagactcacatgctaatcttctctagaaacacagacacatatccaaagataatgctttaccaggccaggtacagtggctcacacctgtaatcctagtactttgggaggctgaggtgggtagataatctgaggtcaggagttcaagactagcctggccaacatggcaaaaccccatctactaaaaatacaaaaatgagccgggtgtggtggtgggtgcctgtaatcccagctacttgggaggctgaggcaggagaattgcttgaacctgggaggcagaggttgcagtgagcccagattgcgccactgtgctccagcctgggagacagaatgagtgagactccatctgaaaaaacaaaacaaaacaaaacaaaaacagtaaaaaaaacaaagataatgctctaccagatttctaggtatttcttaatccaatgaggttgacaaagtcaaccataactatgaattttgtatttatagccatttcctgctttccccttctttttgtctggtcatttcaaattgacaggaaaatataccttttttttttaaggtaaaattaacatagaattaaacatttaattttttttttttttttacagagtcttgctttgttgcccaggctggagtgcagtggtgtgatcttggctcactgcaacctccacctcctgggctcaagtgattctcctgcctcagcctcccaagcagctgggattacaggcgcccgccaccatgcccggctgattttgtatttttagtagagatcaggtttcaccatgttggccaggctggtctcaaactcctgacctcaggtgatccatccacttcggcctccccaaagtgttgggattacaggtgtgagccaccacgcctggccaaacatttagttttttagtttttatttttttagacagggtcttgctctgtcccccaagctggggtgcagtggtatgatcttggctcactgcaacctctgcctgctgggctcaagcaatcctcctgcctcagcctcctgagactacaggcatgggccaccatgcctcgctataagttaaacattttaaagtgtacgattaagtggcatatagtacattcataatgatatacaacctccacctctatttagttccaaaagattttcagcaccccaaaagaaaaacccataacyattaaacagttgttccatattcccacctttccccagcccctggcaactaccaatctgttttctgtctctatggatttacttattctgaatgttttatataaatgaaataatgcaatatgtgtgtgacatttgtgtctaacttactttactaagcataatgttttctaaggttcatccacattgtagcatgtaaatcagtacttcatttcttattatggctgaataatgttatgttatatatgtataccacaatttgtttatccatttattaactgatgggcatttgggctttttmtatgttttgcctattgtgaatagtgctatgaacatgcatatacgagtatttgttttagtaactgtttttggttcttcggggtctatacctagaagtggaattgccgggtcatatggtaattccatgtttaactttttgaggaactgttaaactattttccataatggctgaactgttttacacttctgccagcaatgcacaagggttccagtttctctacatcctcgctaacacttggtattttccttttttaaaaattattattagagccatccttgtgttgtgaggtgtaattcgttgtggttttttatttttttctgagacagagtctcactctgtcgcccaggctggagtgcagtggtgtgatctcggctcactgcaagctccgcctcctgggttcatgccattctcctgcctcagctttccgagtagctgggactacaggcgcccgccaccacacctggctaattttttgtacttttagtagaggcagggtttcactgtgttagccaggatggtctcgatctcctgacctcgtgatctgcccacctcggcctcccaaagtgttgggattacagacgtgagccaccgcgcctggccttcattgtggttttgatttgcattcccctaatgactaatcctttcatgagctcgtttgccatttttatatcttctttggagaaaatatattgttttgagaactataataacaatattcaacttgatgaaatctttttcctgttttccttaaatttatcttgattgtacccatagcgtgtgctattagaagaggagttagtaaactaagccctgtggatcaaatctggtttgctgacagtttttatatggcctacatgctaagcatggtttttacattttttaattgttggaggaaaaaatcaaaagaatatttcatgatacatgaaaattatgtgaaattcagatttcaatgtccataaagttttattggaacatgcagtcacagccgtgcatttatgtgttgtctttgactgctgtcgtgctacaatagcagaattgatcaattgccatagggaccatatgggccataaagcctaaaatatttattatctgactctttacaggaaaaactttgccaaccttgtattagatgttcttgttccttgttcttagcttctgatatttttgcagccctgatcattgatgggcagagaagcccttaggagagtgaggaggcaccccttgtggggagagctcaaaatggaatagcattcagtttagttctcatagatgaccaaatgttttttatcttggtagatactaaatttcaagttaaaatattaatgataggaaccaaataaaaaatttctaaaatatcatttaaatttcatctgtcattatcattaagagtatctctcatcaataatgttccaactcttaaaatacattatttatgatgaatataagagaatctcatgaaatcctcctctaaagactcctttggcccccaaattctgaaatgctataattctgacattaactgttggaatatcattatgttgctcaatatcacattgaacaggagcatcttatattgcagaacttatcagtgcccttccgtaactaaattataaaaatttaaaaactaaattaaaattttctttaacctgtgtaagaagggacatcttctcacacttgaagctttatttgacatttttatttttattttgttttattttgagatagtgtctctgttgcttagtctgagtgcagtggtgtgatcagctcactgcagccttgacctcctgggctcaagctatcctcctgcctcagcctcctgagtagctgggactatagccacatgccaccacactcagctaatttatttttgtatttatttttatttttttatagagacagggtttcaccatgttgcctaggctggtctcgaacttctggatgcaagcgatctaccctcctcagcctcccaaagtgctaggactctaggtgtgagccaccgcacctggccaacatttttttttcataagagacttcgaattgattaggtgtccaaattgtagtgatttcagtgatgtgtattttgttagggaggaggttatccattacagccactggcatgctttgtgtagctcttttgagtacatgctgacttaaggaaataacttttaaataaaaaataccaagaggtaaagaatattagactgaatcatgctcttctgatttctgcaatggtattaccctaaaccaaatgtacccaaatattaatctcattgtgggaactacactctgataggatgtttagttttacagtcaaaggaaactgaatgtttaagagcaaagttcaattcattcctgaagaaaatacttcccattttatagctattggattatggatgagattttattaaggtaatagccccaaaaccctagaggatgctcttggtaggaatgatcattcccaaacaagtagatgcaatgctcttgtctcttggggcctttcacctctcaagcctgtgattcccaaatacttatcttctctgatgaatatgcaagtttatcttttgagtgaaggcgtataaacctctagcaacaccaagctagtctatgtctttttgtatttttattgatttctgtactccttagctccttgattggcaactttgttaatgaaggaagcttgctttaataaaattatgtttagatgcttgttattagaagctgtgtgccaaatgctactttaaagcccaattattaaaattcagtgggtttgttactactgttcttcagtctgcctccccatttgagatctgtagttgctttaacagtcatttcctttgtccttatcaataattactactctgctttcaaagtagggttacaactgggtctattcatattccaaaatcttattttagtattttctaccaccatatggcctgtcctttatggagctggtatgtctctataggtttagaaaatgatcatagttaggtgttattctttttggtcagctttcaaaaatcctgatgcctaggttgcattccacaccaattaaattaaattagaatgtctgagggtgggaggggccccaagcatcagtaatttttaaaaagtcccaggtgattccaatatgcagcaaggtttggaaaccattggctttactcattagccaaatggcttagaggctcttcctcctagttatctactaactactcaggattaattacatgaccttgacacaatgcatttagctacttgaaaaagagatgttatgtaaatgtattactgttatcattattatcattattacttaaacttcagagaagccattttatggtaaaatgtgcataacataaaagttaccattttaacctgtttttttttttttttttttttttttttgarataraggtcttactatgttgcccaggctggagtgcagtggctattcacagatgcaatcataggacactgcagtctcaagtaattctcctgcttcagcctcccaggtagctaggactacaggtgtgcatcaccatacctggcacattgtaattttttttttttttttaaggkggagtttcactcttgtttcccaggctggagtgcaatgacgcaatctcggctcactgcaacctccgcctcccagatgcaagcgattttccgattctcctgcctcagcctcccgagtagctgggattacaggcatgtgccaccacgcccagctaattttgtatttttagtagagatggggtttcaccatgttggtcaggctggtctcgaactcctgaccttgggtgagctgcccgcctcagcctcccaaaatactgggattacaggcatgagccaccgcacccggcctcattgtaaccatttttaagtatacagttcagtggcatgaaatacattcacatttgtatttcatgtgaatacaaccatcactaccattcatctacaaaactcctttcatcttcccaaacggaaactccgtacctattaaacaacagcccttggcacctaccattctattttttgtctctgaatttgactattccagctacctcatataaatggratcatatagtatttgtcttttgtctttttgtgattagtttatttcatttatcctaatgcctattgttgtagcatgtgccagaatttcctccattttgtttgtttgtttgtttgttttgagacagggttttgctctgtcacccacactggagtgcagtggtgccatcatagctcactgcagccttgaattcctgggctcaagcaatccttccgcctcagccttctgagtagctggggctacaggcatgtgccaccactcctggctttcttcctcctttttttttttttttttgagacggagtctcactctgtcgcccaggccggagtgcagtggctccatcttggctcactgcaacctccatctcccgggttcaaacaattctcctgcctcagcctccctggtggctgggactacaggcgcctgccaccatgcccaactaattttttgtatttttagtagagatggggtttcaccatattagccaggatggtcttgatctcctgaccttgtgatctgcctgcctcggcctcccaaactgctaggattacaggcatgagtcaccactcctggtcccgctttattcctttttaaggctaaataacattccgttatatgtgtataccacattttgtttatccattcatctgttgatggatactaggatttcttctcccttttgcctattgtgaataatactgctgattatactgctgtgatcatgggagtatgagaaactcattttaagtgataaactgataaactctccttccacaaaatacttatgtggataaattacttgttctatatggctaggttgtagttcaccagatgagtaagcacctayccctggtgactagtctgtcttttacaaaatatgacaaaaattaggtactatttcaaatgctttctagattttctaccaagtggtagtagaattccattttatttgaatcagctatcctgctcgggctgtggatcaatcctgtagaggctgtgttccaaaaatgtagcaacaaaagtctttgtatgttgagaatgaaataaagggtttgtgctgtatactttaactcacaaatgctaaagcaaagttgtaaacttcaaaaccaacctaaaaatgctccctgggccgggcgcagtggctcacgcctgtaatcctagcactttgggaggctgaggcgggcagatcacgaggtcaggagtttgagaccagtctggccaacatagtgaaaccccatctctactaaatatataaaaaattagccaggtatggtggtgtgcgcctgtaatcccagctacttgggaggctgaggcaggagaatcgcatgaacccgggaggcggagtttgctatgagctgagattgcactccagcgcgggtgacagtgtgagactctgtctcaaaaaaaaaaaaaaaaaaaaaagctccctggtcatgttgctctagaagttgtaagcacattagcttgaagctagaagccactttaagatccttttattgctgcctgtgttcctctatagacgttttagctcaacttctacacatggtcttagcttttttgtattacagaacctagtacctaatttgcatttttacttctttcattcttaatgaaccactgtgtgaggacatgctttcttttttatggacagttcagctaggtgtttttacaagaattcagctgtgttagtcaataagtgggaattttatagagtcaatcaactttggaaaaatggtgattacttattttaacattgttttttctgaaggcattgccttttcatgttcccacaacccacccacctactcttacagcatgaaggaaatgaatttttatttgtatgtgtatattcactttgatccctttgacacttttccttactttttcacttacaataaaaggcaattgaaggccaggcaccgtggctcacgcctgtcatcccagcactttgggaggccaaggtgtgtggatcacttgaggttaggagttcgagaccagcctggccaacatgctgaaaccccgtctccactaaaaatataaaaattagccgtgcgtggtggtgcatgcctgtaatcctagctacttgggaggctgaggcaggataatcagttgaacccaggaggcagaggttgcagcgagccgagattgtgccgccgtactccagcctggacgataagagcaaaactccgtctcaaaaaaaaaaaaaaaaaaggcaactgaggtgaaaagagtcttggctatactactgaaaaggagggacactaaaatttgttggtctctttgggttacaactgggctgcatcagtgtgctttagagttacaggaatatcccgaaattgagaatctgatgggactatacaattttagagccagttctacaggtgagacatagacaacttgttctgcttgtctgaaaacttgtctatagaactctacagagaggctaagagggagtaaactatcctttctttctagatcttcatctgctggtggacgtggcctgcaagcaggagcgctttccaaaggaggaagaattaaaagagtgaggaatggatgacaaatgtgacattgtgcactagctgtagctggaggcagactagccttgcacatgacaaactgttgggattttttcagttctgttaaggaaaaaaaagtattttttgtttcgttaattgagaattttgttaattgagaattgggaatttgtatgtactacagtggttcagttcagattatctgccttgacaaactactgaacatctagcagccacgttttttggctgcccagatcccttttaaatgaaaagttctgaccttctgttatagtcaaggagcatctaaaaactgctccatctatggtactaagaataatctgtgtgtgtgctgatttgttgtcttgccactcaaactgtagtcagcacaactttagtggggaattcagtctctctgattcaagtcacagtgtgatccttttagaggagattgtgtgagaaacaaaggcatgtgaggtcaccagcatcacaggtctaaatgcatcaggaattccagggaagaaactctggagaagagctaattttctaagtgattaaccaggaaattctcttacttcctaacccagcattctgttttaagagcaaggcatccggacttggaccatctatcacacttaacagcccctgattcttttatattaatggaagcattcttctattttcatatctttctttaattttaatgatacattatcataaatggtaaaaagattttattaatatatcacttatttaaatgtctttaaagaaagtatttaacttgtttaatataattgtatttataaatgctgatagatttaaaggttttaaagttttatatttttattattgcaggatagaaggataaaggatgcatgtgtagtatttttattttgaaaggaaaatgtacaatgtgtgaacaaaaacattaagagatttaatatactattttcttattttagatttttacattcaataagtataaattctcatctatataaggtattgtgtgcaaatttgggaaaaaactgattagcagccatttagtagaagctatgcctctgatttttaaagaatggtttcaatctggtttaagcttctgagagaattttggataatgggatagatggtaacatttttttcttatccctgttacaggattctagatttgtgcagtaggattgtgggactgtgttttaggagagaaggatgtcttggatgtccagtttctgtggttaatcccttacttgcttatccagtgacagcaagaaactttctgatttaaagtctttcaattgaccaaaactttcttattggattctgtttcagttctcctattaagcactgcagaaacgaaaggaaagcctaggaatatgaaactaattaaaaaggcacttggtgatatgacatagtactatgctagccgttgtggatgtaacagttcatttcttatactgcattgtgccttcccaatgatgtcaaaccctagaaatattacagagatctacttttctggaaaagggtgagctctgtattgatctgcagtgactctgtttagatattaaagtaggttctgaaaagcgacctgtgtggtccctctgattagactagttaatgtctatgtgatgggcatttatttatctttattagcaaggtttaaaagagcaaattatcaagacacctatatcttttggccagactatataatattttgtcagagtatgtgaagaggagacccaatttccaaatgaaggaactttgctttttctctgtcatgttgaagagctaatatactgtgtagattttcccctaaatatggctttcttagctttatagatgttgagataatatcttttgaggaacacatgtcaagcaggaaccttggcatagatttggtttcagttgttttaaggcttaattaatgaaatgccttaatcagctttccaaacatttttatatatgaatacagcagaccaaggagctggatctcctgctatccttacacgccttgtatctatcaactaaagctgtcattaatgacttgggcaaaatggcaagaggtataataaagtcttcctgtgaattagccagtagggtctgacacaactagtcaactaacaaggttcctgactagtacctcagtatttcagcaccttaagcactgataaatttcaatcagtcaacaataaagtgagtgttccaactagacttgttgtcttgcttgttcttactgtttggtgattaatagaaaattcaataattatgacagttaatagtataattcaaatgagatttactttatttttcaaataatctgaattttaaaagttttttttcatttgtacttgaatagcaatggaattttttaaatgccgttagggataaggacaattcttagacatgttttacagaaacctacatttttggaaaaggatgaatgatctttgataaatttaatcaatccagaggtgaaagtagatcctgaaggatgatctatctcatgtataagactagctagtagatgtcattgagacttaggcatttcattacaatagtgatggcatctttatgacatctctaggaaaatgtagtagtatatcaaccctagagggtaactccaaaactttgaagctgaagaataattgctcttgcaattctggtgatctaaaacagtgaactaagctacatagagctgtttggtttgatcttgagtttctccaagtctccaggttcatgatgcatatcatcatcatttccaaatctcagagtttcctcaagagagggcaaccacatttgtaactgtcttctttctgtcaattaagtgtgtgtattaattactagggctaggtcttttcattcctttgcacgttttaagcaggaatagatgaggcaaagcccatttgtaggttattttttagtttaactatgttaaattaaactatgttggtcaggctggtctcaaattcccgacctcgtgatccacccaccttggtcaaccaaagtgctgggattataggggtgagtcaccacgcctggcccaacaaaaattttttttaaatttgcagggtgttggccaggcgcagtggctcacgcctgtaatcccagcactttgggagaccgaggcgggtggatcacaaggtcaggagatggagaccatcctggctaacacggtgaaaccccgtctctactaaaaatacaaaaaattagctgggcgtggtggcgggcgcctgtaatcccagctactcgggaggctgaggcaggagaatggcatgaaccgggaggcggagcttgcagtgagccgagatagcgccactgcactccagcctgggcaacagagcgggactccgtctcaaaaaaaaaaaaaaaaaaatttgcagggtgtggtgggacgcacctgtgatcccagctactctggaggctgaggtgggaggccatgaaggtcaaggctgcagtgagccatgatggcacaactgtgctccagcgtgggtaacacaagaccctgtctcaaacaacaaaaataaacaaaaaatttattttcgaatttgtctttgatctaggttagttattagatctgaaattctgaaactactgtcataaaccttatctacaggggaaacaatgttgaaggtcaataggctactcatcctttttgctttcagaggcattatgtcatttaatctttacaacagacctatcgtaattattatcatcagcattttacagatgatcagagattcgtttttacatgaggtaagaaacacataaaatttactatcataaccatttttaagtgtacagttcactagatttaactatatccacattgttgttcatttgtataattttgaaagtttatggcagcggttcagaaataaaatgtctcaccacagtcaaatataatctggtaatttgaaacttcaaatgttataaatgtattagaaactgttgtattatttctaatggcagggtagtaataaggattatagttcatgaatgtggtaattagccagaaattcattttctttttgcctatgttcttctcattaatcatattttaccctttggcttgtatttatgacatggacttatttggagtcttacattgaaggcataggtctgatccatagtattatttcacctcccaaagattgaaaagaaaataacagttggattccagacatctgacatcaacctgatttgaaagttccatataggcacagtttagacagagctactgaatttaaattagtaagagctgaagaaaagctaagcataaaatggacagagcccttcccagggtagcagacataagcagcaataaatcagtaagtactaaaacacaggatcactttattctggctttctgccatttatagacactcaaacttggaatgagcagaaatccttttgaacttatatttgcaaaaccttgtgtccattcttttatcttccggattacctttatttttttctgtttatttcctcataccatcatctatgctctgttgggtgcagagtctgcttagatatctttgagtggccctgatttgcatgtggtagcttgcttacccagagaaaggtactcgggatcgaattggatgcagtttagctgtggctcagtagagggagtagaggagctgagggaggggggagagcgaaagaacgggtctggttaagtaagtgttgtgtgtgagcaccaggaggaggggggcagggtggggagtggttgcctctagcagctccaccctcactttgtcagcaggtagagagcgtgattgcagtcccaggggagggagtcagagctagaacaccaattacaaaccacaggcttcctgctctagggagttgatccagaattgtctttctgaaaggaagcactcggaatccttccgaactttccaagtccatccatgattcagagatactgccttctctctctctgggattttatgtgtttctgatagtgaattgttgatgtatttgctactttgcttcttttctctttcaagacttgatcattttatatgctgtttggagaaaaaaagaacttttgttagcaaggaggtttcagaaatgattttggattttctgtaagtgtttaatttagttctaggggacagcatctctcatcccggagtaaatttctgcctttgacctgcatggattattttttcaggctgcggaatttctcggcacctacctgtagtatggggcacttggtttggttgcagagtaagaaggtggaagaatgagctgtacttggttaagcagttgaaaccttttttgagcaggatctgtaaaagcataattgaatttgtttcacccccgtggattccagtgggcccgacagcgcaacaggtttgcagatttcttttgaaattcctttttcccccctccctctgcctcagcaaaagaaaagaatccatataacaggttcatgttcaattgcttggcttttcagcacttattctgaagactttataatatttttaaacttgaccttggaacacagagggctttgtgggtgaggtgtatttatatttacttaagggtgcacattttaaaaatcttattctgtgtttgtacaaagacgcaaattttcatagtgcctagaaatagcacagatctattctactcaagattatttgtattttttcagggtattctacctagagcctgtggttaatcgcctccctgctccccctaccttttattccctaccccctcagggaatttggatacatgtgaggaatagtcctttgtttttcttatgaacctagaaaattacagatcataaaatctggatattaaagtagtttccaaaagcatctcatgggaaatcaaagtgctcggcatttccgagctggagaataaaatcaagaatccttaagagagaaaagaaaatggagatggaaatatgaattttaactgggaaaaataattggaaagctaaccttttcaaatactctaattatgaaagttggaaaaggttgtgatgctcaggattatcctgtaatgtgtgaagatacataaattagcacctaatttataggcaaattttggtaaaacacaaaaaattatggtatgtctaagttcatgaaaagta

SEQ ID NO: 96651 - DNA, 16794 bp, Homo sapiens
atacactgttgaatctgttttagggcctttagtaagcctttactaggaacactaatcgctgtgacaatccaagtagcatgtgaacattagtcctgaatacttttccagaatgagatagaaaagaacctctcaaacaaacaaaagttctctaaaaaggtagggaacgatggttggctacagtttgttaaagattcttatttaaaagttttctacaacttttatagaaaaactaagttatttccaacattagattacatttctcatctgttatctttgtattttactcacagggttagacagactgatatgccttgtcactggatctccaagcatcagagatgtcatagccttcccaaagtccttccggggacatgacctcatgagcaataccccagattctgtccctcctgaggaactgaagccctatcatatccgagtctccaagccaacagactccaaagcagaaagagctcattgaatcatgcataccatgcagaaagttgagcttttaggttttgtcctctttgcttccccaaggctaaagtcagatctagagttctgccacaggtctaacaatcaagtctttagatggaaggaatccaggcaacattcttcaccacaacgaagaaacagataaaagatacccaattttgacttgatttcatgcatcatttggattttttttggttaggactttttttgaagttcctttttacttaggtgtgaaagatggttctttgttgaaataatatagtggtttagtgttttcaaatcatgtttctcatacccagatagtagattattcacttaggacagaggtaatcaaattatgtgtgaaatgtaggaaaatgcttgcccctgtaaactagtgagttgatggagcatttgcttcatcatcctcatcaagagaatcatataaattaagctttataatgacatttcaaccatcaacataatatagtgaggagtagcataatattttttaataatgcagaaaacatcactgaaatgagagtcacaaatttttcttcagtgtttcagcctgagtaagttacataaacctcgcttagcctcccttcctgctaatgtgtaaaatacatacttgccctggctacctcaccgggctgttattgctggaatcagaggagataacatatatggaagataaagtgaataaaagtactttgaaaaactataaagcattccacaaatatgagatgatggtattatccatccataaataggtagatatatctctattttatagtttcagattaaacaaaactgatatcaatagtaaaagtcattttacttatcaattttctgtttttttttttagttttaaagatattattggccgggagtggtggctcacacctgtaatcccagcactttgggagattgaggtgggtggatcacttgaggtcaggagttcaacaccagcctggccaacatagtgaaaccgtctctactaaaaacacaaaaattagccaggcatggtggcgcatgcctgtaatcgcagccactcgggaggctgaggcatgaggtttgcttgaacctgggagatggaggttgcagtgagccaagatggtgccattacactccagcctgggtgacagagcaagactccatctcaaaaaaaaaaagacaacaaagatattattaatcactgaacactattttctctcaattataagtaattgaaaattctaatcaaccttagattaacctcaaatgtgcgaaaaagtgaacaccaaaactcattgtgattttaagttctaatcatacacataaaagttttaataaactaataattataaaatgaggccgggtacagtggctcacgcctataatcccagcactttgggaggctgaggcagacagatcacaaggtcaagagactgagaccatcctggccaacatggtgaaaccccatctctactaaaaatacaaaaattagctgggtgtggtggcacatacctgtagtcccagctactcaggaggctgaggcaggagaatcacttgaacccaggaggtggagattgcagtgagccgaggttacaccactgcactccagcctggcaacagaacaagactccatttcaaaaaaagacaaaatgagaacaaggtcttgatcagtgattttgaaattgttttcttctactcagtcttcacttctgccttgaaattcttttgatttataccttttttttttttgagacagagtctcgctcttttgcccaggttagagtgcagtggcaccatcttggctcactgcaacctccacctcctgggttcaagtgattctcctgcctcagcctcctatttaattaattaataattgatttaatgatttagtttaaaatgttaaattcattttaaaataacccattacatgttaacacaaatagcatgtttttattttattttattttgagacagagtctcactctgttgcccaggctggagtgcaatggtgcgatcttggctcacttcatcctccacctcccgggttcaggcagttttcctgcctcagcctcctgagtagttgggaccacaggtgccctccaccacacctggttaatttttgtatttttagtagagacgaggttttgccatgttgaccaggctggtctcaagctcctggcctcaggtgatccgcctgcctcagcctcccaaagttctgggattacaaaggcgtgagccaccacactcagccatgtttttattttaaaaataattattttcaaaaaaaaaatagaagagtaacattgttttatatttctgcaaatattttttatttctggcttaatagaagacactagattctgatatctgcttctgtatcctatctgttgttatatgctgttttggttgaagtctgtgaagaaaatctgaccccactcatatataaagttggaaaagggaggagtattttaatagctttgtctgataattatggatactctctttgataccacaccaaaatatgacaagtagtagagttccttaaaggctagttgcaatgtggattctgaaatcgtattgatgagcttttctaaagtccattggtgtaccttgtatttaaatagaacttttacctatgtgtgatatttgtaacaccagtccagtgattgatcatttggaaaatattggttcactgagttatgcaaatcttccaaatgttgacacattttgatatacaatatctaaaacaaaataccattaattaatattaccaccaatcccattacaaaagtctaagtctgaggaagctataagggcacagaagtgtatacaagccttccaaaattttaggtttcatttggaagcttgagttttatcattggcaacaaatgccatcagttttttccaagctgacttgttcttttttgagcaaatctctgccaaaattacccctaaaatatgaataatcaatttgtcaggttttttcaaactaaaaatgttctgtgaaaacaagcagctagttcagcttgtatctcaaacaattgtaactactttttctagggaaaaaaaaatctagacatccatactttatggcagatgtgcttcatgcatacttcccattttgtcacacagaatatcaaaataacgtgtactcaaggtcaagatttactaacaactaaaattccaaaactgctaaacaacagaatgctgaataaggtgatccaatttttaatattttatttgagacaacatctcaccctgtcacccaggctggaatccagtggtgtgacacagctcactgcatcctcaacctcctgggctcaagcgatcgtcccacctcagtctcatgagtggttgggactacaggcatgcaccatcatgcccggctcactttttttttctttttttttttaattgtagacacagggtctcactatgttgcccaggccggtcttgaactcctggactcaagcaatccccccaccttggtttcccaaagtgttgggattacaggcatgagctactacatacaactgaaatcttttaatatgcttgtcaaaaagttttctgattcagcaaatggcacttatatataaaagagagaacaagaagctggatgcggtggctcacgcctgtaatcccagcactttgggaggctaggtgggcagatcacgaggtcaggagttcgagaccagcctggccaacgtggtgaaaccccctctctactaaaaatacaaaaatagccaggcatggtggcccacgcctgtaatcccagctacttggaaggctgaggcaggagaatcgcttgaacctgggaggtggaggttgcagtgagccaagattgcgccgctacattccagcctgggcaacacgagcgaaactccgtctcaaaaaaaaaaaaaaaaagaatagaacttggctggatgcagtggctcacacctgtaatcccagcactttgggagggcagggcagttggatcacttgaggccaggagttcaagactagcctggctgacatggtgaaactccatctctactaaaaatacagaaaaaaaaattagctgggagtggtggcacacacctgtcatcccagctactcaggtagttgaggcacaacaatcacttgagcctaggaggcccaggctggagtgaggtggcacgatcttggttcactgcaacctccacctccagggttcagagtagctgggactacaggcccacactaccacacccggctaattttcgctttttttcagtagagaccgggttttgccatgttggccaggctggtctcgaagcctgagccataacctggcgaaaagatactttgaaatgtaacatcgtttttcacttcaaaatcaaggtattttaccaacttgtctttggtacctccccaaaaactgatctactacatttgcagtttcattcatttttccaacattaaggaataaacttgaagcgcttacattcttgtgggggaagtaagaacaaaacacataataggtcatggtggtcacatgaaaagtaaagggtaaccgattggggtaggtggtggtagttttgtgtgtgtgtttttttttgagaccaagtctcgccgttgcccaggctggagtgcggtggcatgatctcagttcactgcaacctccacttcctaggttcaagcaattctcctgcctcagcctcctgagtagctgggattacaggtgcacgccacacctggctaacttttgtatttttagtagagatgggggtttcactatgttggtcaggctggtctcaaactcctgaccgtgtgatccacccgcctcggcctcccaaagtggtgggattacaggcatgaaccaccacgcccagccttcttttttcctttgagaaagtctcaccctggcacccaggctggagtgcagtggcaggatcacgggtcactgcaacctcagcctcccaggttcagttcccctgcctcagcctcccgaatagctgggactacaatagcccaccactacacccggctagatttttgtatttttagtagagatggggtttcaccatattggccaggttggtcttgaaatcctgacctcaggtaatctgcccacctcagcacccagccaggtggtggtagttgttttacagcctgtgtgagacattcgggtgagccccaggaaatgaaagaatgtgcttatttgggggagggggaggccttttttcttagacaaaattgggcattcccaacttacacgcatttagtgcataagctgacatttcaatgagattgtgaaatgacaatgggaagggccctgaaaaaaacatcaagcataaaaggcctgggaggccgggcactgcggctcaggcctgtgaaatcccagcactttgggaggatggggtttcgtctctactaaaaataccaaaatgagttggttgtgatggtaggtgcctatagtcctagctacaagaggctgaagagaatcgcttgaacccgggaggtagaggttgcagtgagcagcggttgagatcatgccattgcactccagcctgggcaacaggattcagtctcaaaaaaaggaaaattcagagagtaactgaagttttatcattaatgggactaaagtgctttagcccagaaacagatttgtaaaaccattactgctaacaaagacatcattataagcacagctgtactgacactgaaattaaaatttgacccatcttggaattttggccccttggtcctgtttccctgggacagattgccttaaaccagttgtgccctttatacccacttttggcatccctaaacacttagtgcttgccaaaaacctatcaccatggctatggattgtagattttcccaattccattaatgcctatcactagttgggcatttctatagtattttctataacttattttcccagcctcagactcaacatgactttctccaagtagctccatcaatactttaagctcaaaaccrattagcacaggggcctatgaaacctgacaatttgctcatatggagaattaggaaatattgcactttaatgcataagacaccttgtaaaatacccataaaattttaactggctgcagtgttaatgaagcaaataccatggagttataatagcttttgaatgtgatttatgcttacagctaatgaacagatgaaaagcactgtccttttttaagtaaacactacacactccagatggattgcaaaaatttattaaaattggagacactgttttaatcttcttgtgccatgagactccatcaggcagtctacaaagaccactgggaggctgaggatcacttgagcccagaagtttgaggctgtagtaagcttcaaaggccactgcactctagcttgggtgaggcaagaccctgtctcaaaaaataagacaagacttttagccacatttacagacttcaattaaaatgctacatgggaatgcagaatatcagatattttattgtcatcaagtaatcagtgagagagttcaagttggattgagatcatcatgtattctgcaattataatagtcccaacatttccaatcctcacctttcaagcagtaagctgcatgcttgcttgttgtggtcattaaaaaccctgaaagcgaagccaacatattaatcagggcaaaatacaaatgtgtgatgcttgttagtagagtaacctcagaatcaaaatggaacggttttacagtgatatcattatatttcatttggcagaatcattacatcattggttacactgaaaatcatcacatgtaccaaaagctgactcacctagtttaggataacaggtctgcctgtttgaagatgaaaaataatacccatttaaaatttgccctactcaatttccttctcagtcacattttaacttttaaacagctaatcactcccatctacagattaaggtgtatatgccaccaaaaccttttgccaccttaaaaatttccttcaaagtttaaactaacctgcatttcttcaatcatgaattctgagtcctgaaattaagggacaatacacagtaagacaacttgcatacaattaggagtaatccaaaatctccaaacattatagaatggctatattccccttttcggggcataaactagaatgttaccgccagatacatcagataggagcgaaagacttaatattgctcatcagcgttagtctgctgaactatgttatcatcattgtatcggctttacaacacttaaaaaccagacttgaggcggggcatggtggctcacgcctgtaatcccagcactttgggaggtcagtgcgggcagtatcacttgaggtcaagagttcgagaccagcctggacaacatagctgtacaaaattagccaggcatggtgtcacatgcctgtaatcccagctactcaagaggctgaggcaggagaattccttgaacctgggaggcagaggttgcagtgaactgatagtgccgctgcactccattctgggcaagagctagactcttgtctaaaaaaaaaaaaaaaatacttggaactgctatacctttgcttctttaaaacttgctccacacagtgtagtcaagccgactctccatacctgtagaaatttaatctcctttaccaataggtagtaataggtggatttctaaaagatttcccaactactgtttcagtttaagattaatctccattttctttctcagagagattcccatctgctttaattttaaaatcatcactaacagtagctcaatcaattaacgttaacatcaataaaacatrtacctttaaaaggtatgacaggaactrtcttcatgtccttacccaagcaagtcatccatggataaaaacgttaccagragctggaatacaaatgaggacttccattaaaatgctaaacatcattaaactcttttcaaagttgtctgtcacagggttcttcagtgttacctttgtctacatgctcatttcaggtcagacatttgatcaacatcattacacaaaccccgttccaaacatgctcaaggaaaacacataaacactgttccagacatgctcaaggaaaatacagtcagtattcatcagccaagccttaagccattagctcagcagtaagcatatcaccatcagcattttcattaagtctatctactgttttcattaatacttaccagaaccattaagctggtccaggcaagttggactccacctaagaaataagagtggtcttagaatagccacagatgagtgttcaccccctgccaaaactaacaaatgcctttagtcagttagagctaattaagaccttcatgttcagtcagcatttgcttatcatcatccaggctgcatttacaaactttcttattaatcataacaagacaagaatcygccatttatttaatgcattcagcactaggaggtaactaaaaagccatttgtgccgtaggaagtttgcccagttacctgcttacttggatacagtttcacttaccatttcaacttccagctttctgtctaatgcctgtaattttaatacaaaattgtcagcaaaaaatattttaatggtagattggtggtacactgcttaaccattaacagcaaaccacaactaccccagatacatcagacagatagtacatctcttcatgattaaatctgctgaactatgcaaccatcatagtatctgttttcacattttcttcagtattaaacttagtatcaatatgagagcaaaattctcatttgaaaagaggggagagaagcactaacatagataatcatcattgctttggctattttctaatcccttaaaagtgagaagtacaaaatagaggtgtctcacctgtgtgccaatggcttgagttaggcttgctctttaggacctgggaagaaacaacttcatgtgaacttaggtgtactctctmtgttccccaamtcaccattttgggtgcctcagttaagataatggtggttaagatcctcatcattctagcactcaagagtagcaaataaactgtcatcattgtggcacatccaatggctttaaacctttttgagagggaattttcaacttacttcagtagctattctcatccwtccttggggacacaactagaaaacaaaaagatgcaagcaaaacagtgagaatgaacctcacagcagtcacgttaaatataaatgctgttaacattaaagcctcagaatagaatttcagaaatcccttctgtccactactcttaaagcatcacaggctgagaccacctcttagatttcattcttcccaccatactttccccaattcttacctgtccataaggtgctatccagagccacactgcatctgcacccagcaccatacctaaagagatcaggtacagattttaattcattgttccacggttcttttttttaaagagtgttctttaaaaaaacggttcgtctttttaaaccaatgatgcaggtaacataccattcattatctagcgacaggtaaaggatacacttaatgttacaaagaagcactgcacccgcagttaagaaccaccgatggcggccgggcgcggtggctcacggcttgtaatcccagtatgttgggggaccacggctggtggatcacctgaggtcaggagttcaagaccagtctcgccaacatggtgaaaccccgtctctactaaaaatataaaagcctagcayggtggcgcgcgcctgtagtcccagttacttgggaggctgaggcagaactgcttaactcgggacgcggaggttgccattaaccgatrtcgagccactgcattccagcctgggtgacagaacgaggctcggtctcaaaaaagaaaaaagaaacactaatggaaatattggtgacactgcggaatgcaggcacttaagcacgtggactaccaccgacagcctttcatgagagcggacggctgatggaggctcgggtcacggcccttaacaatagcttactcgggtgactcggcatgtgccaccatcagagcggttggcattcatcattactctcagatgtccctaccaacacaggcttcatcagaggcagggcacgagagccgaggcttctccgcagttctactctaacatagtcgcagcttaggtcacgcatgcaccatatgtgcaatcccccaccatcctcaacttgtaggccctgcaaaggcgcgcgactggcttagaagtcccagtcaattcagggtgaccttagcagacaaaggctggagcgccccaaaacccgcaacattcgcaaagataaaacatacctcacaggagtcgactcctacctcgaaaagacagtatggtgcctgggctcctgtatataagagttcttttgatgacgtcacgacgcacgctcccggcagcgtccgcttcggctcctccccctaacctccctcaatcttcctctcatccagtatcaccttcttcccaccccttaagtccgccccttttccccgcccttcctcgccattgtgggcagagacatgaccgtccacgtgatgccgtgctcccgccctcctcccgactgaggaggaagagcagagaggggagggggcgcgaggcaaggaaagctctggggatgggggaagggggggcggtgtaaggctgagtgatttccttccggcacgtcgcccgctccgtgggagggggtgggggatttcacttccgggacggtgttccggcccattccggcccatttccacccccggaggtaggtgctgctccttgactggactcgggccccacaccccagtgccacttccctgcaccggggtcacctcgcccgccctccgccgcagcgcgctcctggggcgctcagctactttccttcaccccgcctccaggcaccgggcgaccttccacccccttggcccccggccgggctgatctgccggacccgccccctcgcggggcccctccctcaggaccccgggaagggcggccccctcccccaccgcagccgggacacacccagatacgcacacccacctcctggcagctccccgcccgccgccgcctggagccggtccctgggcgccgcccccttcctagttctcacctgagcgctggctcccccgcccgacgccttgtccccatcttctccgaagttcctcagtgacattttgccctttagccagttcccctctccccaggcttcctaacgcagaagaaagctgctcaagtgctggagtggccaaccccatgccgttcccaattctcccttttacagctctcacccctccagtgccgacggtagcgaaagactttcctccaggggcttcctcactggggaattgccggaaagagcaaacaaaaaaggcgctggtgtaggctccaaaataaacacatctgaattcatgatggcatcgacagaggctcttattggattaaaagtttcaaaacaaacaataacgctttggaaaaaggtcagattggctaaagttgattgttgaaaacagtgtatacacttccctatttaataagtgtgttgttaatgcggggcagtactgtgagcttggcagagtaagttcctgaagtttcaggtgtggtgtaactatgtaatatatagataagtgaacgcacattgggcttaagtaaatgtcttcctgttcggatttatacaaactattttcagtagttgaaactgtactttcaactatcttgtatacagcttcaggtttagtgtttcagccattttttaaaaatattttaatggaaaaatgttggcatacttggtaaatgctgtattttttcatcggatctggagaactaagtttcaggatggaagtattcatcaccacctcggaattgccaacttcgaatttggcagatttacccagctttcctaattttgacaactgaacttcacattctctgcatcttggttgaatcctggcacagctgtgggatttttcctagagtttgcttcacagccctataaccaaagtctttttgtggggggggctctgattcttaagcttagaaatattagcctacattcatgtgggatattagtccttttataaaataataaacataattcttgcagcaggtagtaaaatactaagaagagggatatcaagctatgtagaattgcatttattcagaaagctttcctcctccagagaaaagttgtaaagttatgagatgttatattcagtctgcaagtaccttatagttaacacttaaaagtccttccccctaccttctgttgaacttctgttttgatgttatataacttattagtaaggaaagcatggtcataacatgaatttttaggagtctaaagatcactttttagttttaactatgtcctcctgtgaaacttaaactgaaaaacctgttggtgattctgtttccacatctaaatataaggaaggtatttcttttatctggagattttgaaactttaccagataactatgtttaaatacttttgaaatggaaaccatccgggaagtaaaattataattattaatgagaatatggtttcttttttcagcagggttgaatgcaccctcaggcacgaccatggagaaaggtgggaacatacaattggagattcctgacttcagcaactctgtcctgagccatctaaaccagttgcgcatgcagggccgtctctgtgatattgtggtcaatgtgcaaggacaagcttttcgggctcacaaagtggtgctggctgccagctccccctatttccgggatcacatgtccttgaatgagatgagtacagtctccatttcagtcatcaagaaccctactgtttttgaacagctcctttctttctgttacacagggcggatatgcctgcaactggcagatatcatcagctacctaacagctgccagttttctgcaaatgcagcatattatagacaaatgtacacagatcctggagggcattcatttcaaaattaatgtggctgaggttgaagcagaattaagtcaaacaaggacaaagcatcaagagagacctccagagtctcacagggttacaccaaatctcaaccgctcccttagcccacgacataataccccaaagggaaaccggcgaggtcaggttagtgctgtgctggatatcagagagctaagtcctcctgaggagtccaccagccctcagatcattgaaccaagttctgatgtagagagccgggagcccattcttcggatcaaccgagcaggacagtggtatgtggagacaggagtggcggaccgtgggggtcggagtgatgatgaagttagagttcttggagcagtacacatcaaaactgaaaatctggaggagtggcttgggcctgagaatcagccttctggagaagatgggagtagtgcagaggaagtaacagccatggtgattgataccacaggccatggttctgtaggacaggaaaattatactttagggtcttcaggagccaaggtggctcggccaacaagcagtgaagttgacaggtaggtttggtttggtttggttttcccatgtaatggctattgtgtagacatcactaaagtgtcctctgtagtacagagagcattttccttacctgattttcttggtcaaaataagttgatgatggggaaactggaggtgtgccaaaagacttgcattcttatttttttaaaccaggaagctccattcctgaagtattcacaatgttgtgagaactgtggtaaagttagacacttccgtgaatcagaatagcatctgcagccacactaggataggatcagtaattgccagggcttcctcgggattcgaggcagggagccgatcatcagctgggaacctagcagcattgcccttccttggtgtgttatcacacaggtaggtggcctccaggagtctcactttcctttgtagcactgcttgcttttctttgcccccaactaccaaattagaggaagtatggtaccagcagtaattgttcttttcaaattagtaaaatagtaattctgaagaaaagcgttatggatatttttcatctcttttttcccttgtcacgtgatggtatcttccctgttttctttcatggatgactgctgctaccacaggcctgacaatctccctttttttcaccagtgctgctatgccccatgcctcacttttctcttttaatacattgtatttattagacatttctttttggtggaaataccatgggtttcagtcaattgagagaaagtctcaattgaaagaaatattactaatttagattggtaatatttgttctttttccctcttaaaaataaatttaaattgactatatgagcaaagaaaactaaaaaactattactttggtcttgagaaacaaatgtatcacagagattcagttagtgtatactgtatccacttcaggtggtctttttattttattttatttattttatttgagacggagtctcgctgtgtcgtccaggctggagtgcagtggtgcgatctcggctcactgcaagctctgcctcccaggttcacaccattcttctgcctcagcctcccgagtagctgggactacaggtccctgcccccatgctcagctaatttttgtgtgtgtgtttttagtagagatggggttttaccatgctagccaggatggtctcgatctcctgacctcgtgacccacctgcctcagcctcccagagtgctgggattacaggtgtgagccactgcgcccggccttattttattttatttttgagatgaagtctcactctgttgcccaggttagagtgcagtggtgcaatcttggctcactgcagcctctacctcttgggttcaggcgtttctcctgccactgtgcctggcttcaggtgatcttgatttgagtattgtcttcctgtgtccttattaaaataatcttgagcatagaacttgtcctcctatgttagaactgtatcagaagttctcgggtgatgggtgcaccaaaatctcacaaatcaccaaagaacttacttatgtaaccagataccacctgttccatgataacttatggaaataaaattttaaaaaaaactatcagaagtaatatcagggccaggtgtggtggctcacacctgtgatcccagcactttgggaggctgaggcaggtggatcacttgaggccaggactttgagaccagcctggccaacatggtgaatccccatctctactaaaaatacaaaaattagctgagcgtggtggcacgcacctgtagtctcagctactgggccagctgaggcaggagaatcgcttgaacccaggaagtggaggttgcagttagctgggatcacgccactgtactccagcctgggcaacagagcaagactctgtctcaaaaaaaaaaaaaaagtaatatcaatttcaatgcaaagattttttaatctccatgatctatatcaatagtctaaaatacagattattatgggaccttggggaagaaacagccaaaaacctggtaattacgtagaagaaacaaaattataggccccgttttaatttattcttttatggtctcccagtatttatataaggaagaaagcttatatttagctttagcttcaccagctcatatgttctatctgttatgtcattttgtgtttattaaatttactagggctaacctattatttcaaatcagattatgtattaactccacaaaactattcctcagttatttgttgcttggtttgttcccccttcctcagccatagaataaagaggggcgacatcaccatttttcaggttctttgatgctgcttttgtattagtcccctttatgttcctcttccaacagatttagcccctccggcagtgttgttcccttgacagagagacacagagccagaagtgagtctcctgggagaatggatgagcctaagcaacccagctcccaggtatggagttgtggatttagaactgctttggtggttggaggaattgctactgtgtatgaatagaaaataatgaaaaagaaaagatgtaggagaggtaacaatggccctgttaaagaaatactgtattttttttccctgagggtagcagaagtttaatattaaaattatacagagacatcaccagaaaggaaaattgcagactggtatttctaccaagcatagatgcaaatattttgaaaagaacattaacaaattaacactgatagctggtttaacattttaaaattaatcattgtaatctgtttcattaataaggaaaaagtgataaattacatgtggcaattttgataaatacagaaaagaacaattggctaaaactcttagcaaactagaaatacaagggaactggccgggcgcagtggctcgcgcctgtaatcccagcactttgggaggc

SEQ ID NO: 96652 - DNA, 14548 bp, Homo sapiens
agcgattctcctgcctcagcctcctgagtagctgagatcacaggcgtgcagcaccaggcctggctaattttggtattatcagtagagatgttgtttcacagtgttggccaggctgctctcgaactcctgacctcaagtcatccacccgcctcagcctcccaaagtgctgggattacaggtgtgagccatagtgcctgacctgtagttgttgaatatttattattaatctacaagttgggtgtgatgcaagtcctatatatggagtcccccaaacttctagagcaagggcttccccataatcctggcaggcaggcctcccctggggtttccaacttctgaccccactgaagtgtttatcctcttctctaaccccagcctccttttccctgtctccgtgtgctctgagagatgctctgagagatgctcccactcccccaggctccctccgcatccccctcattttcctcctccccagtgtgtcaatggagtcctaaccccatcctcgacattgtcgccttttcctcctccagagtgggaccttcttttcccccgagtggtcctgtctaggggtgccgctgccgggccccctctggtcttcctgctggagactggagcctttcgggagtcagcaggcgcccgggccaaccgcagccagcgaggggtgagcgatacttcaccggcgagtcatcagggtgagctggccgtgtgcgatgcagtcagtgtctgggtgacagacccctggactgctgtggacttgggtgtgctcgaggtggaggtgttgggcgaggtgcctgcagctgtcggcagttccctccgccagcacttctttgttgcccgcttcgaggccgataaatctgaggaaggtggcccgggggtaggtggaggggctgccgccggggtgtggaccggggggcactgggtgtctgagtgcaaggccaagcagtcctatgtgcgggcattgaccgctgatgcccagggccgtgtggactggcgatggattcaaactggcacagcctgtgtctgcacactcctcagccggactggccgggcctgagacttatacccaggaactggtcaggcagaaaaagaacagagctggatgctgagagacctcagggttggcccagctgctctacggacggaccccagttggggaactcatcaaatcatcacaaaatcacaactctctgaatttgagctcaatctctgcaggatgggtgccaccacatgtggttttgaaggttgaataggagctctcccaggggaacttgagggtaatcatgatgatgatgatgatgatgataataataatagccactatttactgagtgtttactctttcgtagccctaatacataactcctcggatcaactctcatggatttgatcattggtgacctttggtgttaagttgctgactgctcagtcacagaggacaccaccttgctcatcctggggagtgggagggcacatttcacgatgtgcatgggggaggagggaaactggaacatgcaagcagatggccaggggaccttgaggacatggtctacagaaggcctttaagtatctgggagctggggttcaaatgagaaatcttacttggtgagagcaggcaggggttggcttagaatattctgttttgagataaagagctaccgatcacacggggagtataagcaaggttcaatgagaagtgatcaggatgctggagagttcagccctgggtggggagctcaagtcaggtttctagccctcttccctgtgccaacctataccctacactgggaaagaaacagaccttaaaattgtccagcttgatggcatcgcggggaagggactaagtccagataatgtcctccgaggctgcggccccgcgggcaggacacaccccctgcgggcctattcaataatcagttaaatcacctgaagcacacgcatttccggggaccgctccgggcatcctggcttgagggtagggtgggcggaggtccctaagggagaggtggggctcgggctgaatccctcgttggggggcaccagggtcaagtggcttccctggcagcacagtcacggggaggccctctctcattgggcagaagctaagtccgaagccgcgcccctcctgggaggttggactgtggtgcaggaaagcctcaagtagaggagggttgaggcttcagtccagcactttgctcgggtcacggcctcctcctggcttccaagaccccaccataggcagaggcaggccttcctacaccctactccctgtgcctccagcctcgactagtccctagcactcgacgactgagtctctgaggtcacttcaccgtggtctccgcctcacccttggcgctggaccactgaggggagagggctggggcgctccgctgagccactcctgcgcccccctggccttgtctacctcttgccccccgaggggttagtgtcgagctcaccccagcatcctaccaacctcctggtggccttgccgcccccacaaccccgaggtataaagccaggtacacgaggcaggggacgcaccaaggatggagatgttccaggtaagactgcagggcccctgggcaccttccacctccttccaggcaatcactggcatgagaaggggtcagaccagtgtgagctgtggaaggaggcctctttctggaggagcgtgacccccagtaagcttcaggtggggcatttcctgaaggtgcggatctgaaatgttggggtatctcaggtcctctgggctgtggggtgggctctgaaaggcaggtgtccgggtggtgggtcctgaataggagatgccgggaagggtctctgggtctttgtgggtggtgtaccacgcgggatgggaaggccaggactcggggctgcggtctcagacccgggtgaagcagtgtccttgtcccaggggctgctgctgttgctgctgctgagcatgggcgggacatgggcatccaaggagccgcttcggccacggtgccgccccatcaatgccaccctggctgtggagaaggagggctgccccgtgtgcatcaccgtcaacaccaccatctgtgccggctactgccccaccatggtgagctgcccggggccggggcaggtgctgccacctcagggccagacccacagaggcagcgggggaggaagggtggtctgcctctctggtcaggggctgcggaatggggtgtgggagggcaggaacagagggcttcctggacccctgagtctgagacctgtgggggcagctggggagctcagctgaggcgctggccccaggcacatgctcattctcccactcacacggcttccagacccgcgtgctgcagggggtcctgccggccctgcctcaggtggtgtgcaactaccgcgatgtgcgcttcgagtccatccggctccctggctgcccgcgcggcgtgaaccccgtggtctcctacgccgtggctctcagctgtcaatgtgcactctgccgccgcagcaccactgactgcgggggtcccaaggaccaccccttgacctgtgatgacccccgcttccaggactcctcttcctcaaaggcccctccccccagccttccaagtccatcccgactcccggggccctcggacaccccgatcctcccacaataaaggcttctcaatccgcactctggaggtgtctttctgtgggctcagggcaaccacacacacacaggatgggtccagcttccaaaccattttatacagagtcacagtatgagaactctggtagaaaacagtgtggggtcgggggatgacatcgcaactttactctacattgggaaagaaacagaccttaaaattttccagcttgatggccaggtgcgatggctgatgcctgtaatcccagcactttgagaggccaagacaggcgaatcacctgaggttaggagttcaagaccagcctggttaacatggtgaaaccccgtctctactaaaattacataaagaaattagctgggcgtgtaggcgggtgcctgtaatcccagctactctggagggtgaggcaggagaatcgcttgaacccgggaggcggaggttgcagtgagcggagactgtgccattgcactccagcctgggcaaaaagagggaaagtccgtctcaaaaaaaaaaaaaattgtccagtttgagtgggacatgaggttctgactaactcgccgtccccctggctaggatcagggggttattcgtcattgagagcccttgagtagggtcagcaaaatccaacagaagggccccagaagcatgattcagggaggaacagtaagtgggattgtgggcctggctgcagaaggcagcctcaggtttccttgtctgaagaatgggctcgtgggatgagataatgagggttgaggaggcagaggcctagaccaaaagctatttttttttttttttttgagatggagtcttgctctgtcccctaggctggagtgcagtggcatgatctcagctcactgccaccttcacctcctgagttcaagtgattctcctgccttagttgggattacaggtgtgcgccaccatgcctggctactttttatatttttcgatagagacagggttttgccatgttggccaggctggtttcaaactcctaacctcaagttatctgcccgcctctgcctctcaaagtgctgggattacaggagtgagtcatcgtgcccggtgaccaaaagctctatatggtgaagaaatgacaagggaagccagggacagaccacaggagttcacagtagcccttcacctatgacccctattacccatctccctacatgtgttgccaacacacagacatacagacacacacacactcactctctctctctctctctggtccacaggacttcacaatagcccttcacctattacccatctccccacatgtgttgccaacacacagacagacacacacacacacacacactctgtctctctctctctctctctctttctctctgtctgggacagaccacaggacttcacaatagccctttacctattacccatctccccacatgtgttgccaacacacagacacagacacacacacacactctctctctctcactttctctccccctctctctctctcaggtccagctttgagcaaaggacataggcaccccctccaccaatctgtacagaccaggcccctcggcagggaggggtgtggctgcctccgtttctacatctccttgttaccatctctgattttgctcttttttgccgcctttctctctgtctctaacttccggtggctctagcctctgggtgagtactaatagctccgtttccagcgtggtctgtgtcttcctccctgtctctctcctctcttgtatttctttctcactcatcaaagcccatgtttttcgctatggtccggtgcacttctctgtgggtgcctccctgtttccacaccccgcctacccaggtggaacttttcaagccaatcaaaggcaggcaggacagccaatgctagtgctgattacttcagcacgtgcatgcagggagggtcggggagccccggggatgtatggaaatcgttaccctgaggtgggcaggcctggtagagggaggaagcagccaggagcatctgggccctggaagaaaggggggtgtttctcatggatgtcctgagttgctaggtgcagcgcaggggtctctgtctctctgtctggatctctgacacctccaggtccctgtccctctttttgggtttctctctcccccaccccctgggtctctgaaatactgaacttctccttccctttccaccctcctatctttgagtctccattccccctccttgtgtttctttgtacccctcttggggtccctgtctctgggtctctttctcattccatccatccaggtgcctgcaggcccttgattgactaggttctgggtgggcgggttctgtcacctggggcaacaaccacaataagccagctcctgcttggctacggagtgggggtggaaccatggccagtggcaccctggctccgggctgtcgtatctctgcaaccgaggtacctggatccaggcccaactgccatctcaccagcagctacttttcccaccgcattatcccacccatacccttcaccccgcccacggtgcaggtgagcggaccctacgctgcagccctgccgggcctggagacccagaaagataggggctaaataaagcggattgggagcttggactcctctctgaaggaggagggtcctggagttctgggtctgagagaggaggcaccagggaagctgaatgccagggactgcagaggaaagggctgggggccgactggaagaggtcagagtttggggtggggggtgatagggactcctgagtctttctagctgatgtgcggcgccttctctccagtccacggtcgcggaccctctaccccaagttgcaaagcaggattctcrcawctgggctttcgacgaggtcctcagcagatgggagacaacctctggctcggcctacgtgcccaagacccatggcgggccctgcgcccagcccagagccccagagcctgcagaccccacgcggactgtggggatcaaggattyaggagaaaaggtaaagtttggggagtgccggagtccgcaggggacagggcgggggactgcatttgagtcccctgctccttcacgtgartctctgggtcgcctttccgcagctcagacaccgcggctggcgcctcccactgaccacaaagtaccagagcagcgagacgagggcgcagtacactggctctcccagcggggacccgcgcgccccggaatacttcgggccccagcccccacaactcgcagaccaccaccgcgggggtccttcccaggtgtctgggtggaagccggcgccggcgagacggggcggagctccgggagcctggggcggggccagaaggaatcacggctttggggcgtggctaaagggtctggggcgggatcgcgaggttagaggagccgggggaggggctgggcattaggccaggccagaaggaccagggactacaaactcaccttcagggctcctaagctgctgcggagctagacggcgggctgtgggtggggaggagactagaatattctgagacggggtcaggtgggagttgggagaggtaacktggagttgctgcccaagatgcagctcagctccagtggccacaccaagacggtttaagasagagcggaaccagggaggttgtttttggtggctgggggcttgggtttgagttccttgaacagcagaaggtgcttggatttagggaggtgaggctgggaagggttcgggtatgagaaaggaagctgaagttccctggcgtgggtggcaggaagggctctaaccctggggcggggtgtgagggccgtggccgtcatggctgtcgaggccgaaggagagggattctgaactcgggacccagggcttgggatggggtatgaaatctatgtcttgggtatgcctcctcccccaatcttgctcaggctctaattgcctggacgaagaaccccgagctgtctggccggcctttcacagtatccgaccggggcgtcctggaccgccgccagctctatctgaccacctcggcgcgggactttcggttctatcccaagtaagccgggctctcgctcggcaccgcctcctgcacagcccccgccgtggccggtgcacgccgagcccctgggctggctcccattccctgagccggtggtctcagcctcgacttctgtagcagcaagaaccaaagttcaggcctcagcccctcccttttttttttaagcacccaggagtccttagtgtcacctctcaggaaccgcggtagggacaggaagcctgcacagcggctcgaggggattccggatctgagggcagggcctccttcggtacttgagcccccagatactccttcccaaggaagcgaaagtccccttttacttccctaggatgsgaaagctcagtttccaggacgttaagtacctcgaggacccaggaacgcaggcaacgcgtgccgggtcgcgtccttcctaaggggtgctcgcctggaaatgcaggagtttgaatgtgcagactccttagatcccgaggtctgaaactcgtccccaaggatccagctgtatcctcaccatcccgccctgctcccacaggacggagctgtccggatacccccgcaaggactccctgacctactggagcttcgaagagacgccccaggtctggagccacggcccgcagcggccgccctgtccgcgctcctcccggccgccccgaccaccgcgggtccgcgtgccgcgcgtcagcccggtgacctcggccatgccgcaccggggagccctgtctctggctcaggagtcctacagccccctgctgcacccgctccggcggctcgaccgcttctgcccgctggaggcgccctggggcggcccgcactggaagcccctgcggggcatctacagcgtgccgaaagcctacagtaccgagaactccagctatggcagcttgaagccggcgctggtgtgagccgtcagggccagccccaccccagacccgcccccagggccgcgctgccgagcggagctcgggacctccgctcactaggaagggttccggacccagcctgagtcgcactcattacgtctattggcaacgtgggggcgggactagcccagacacccactcagctgcggcatcacggagaggggactaagtccagataatgtccttgcaggctgtggccccgggggcaagacacgcaccctgcgggcgtattaaataatgagttaaatcacctgaaccacacccacttccggggacgctccgggcatcctggcttgagggtagggtgggcggaggtccctaagggagaggtggggctcgggcttaatccctccttgggggcatctgggtcaagtggcttccctggcagcacagtcacggggagaccctctctcactgggcagaagctaagtccgaagcagcgcccctcctgttaggttggactgtggtgcaggaaagcctcaagtggagggttgaggcttcagtccagcacctttctcgggtcatggcctcctcctggctcccaagaccccacaattggcagaggcaggccttcctacaccctactccctgtgcttccaggctcgactagtccctagcactcgacaactgagtctctgaggtcacttcaccgtggtctctgcctcacctctggcgctagaccactgaggggagagggctggggcactctgctgagccactcctgcgcctccctggccatgtgcacctctcgcccccggggggattagtgtccaggttaccccagcatcctatcacctcctggtggccttgccgcccccacaaccccgaggtatatagccagatacacgaggcaggggatgcaccaaggatggagatgctccaggtaagactacagggcccctgggcaccttccacctccttccaggccatcactggcatgagaaggggcagacccgtgtgagctgtggaaggaggcctctttctggaggggcatgacccccagtaagcttcaggtggggcagttcctgagggtggggatctgaaatgttggggcatctcaggtcctctgggctgtggggtgggctctgaaaggcaggtgtccgggtggtgggtcctgaataggagatgccaggaagggtctctgggtctttgtgggtggtgtaccacgcgggatgggaaggccaggactcggggctgcggtctcagacctgggtgaagcagtgtccttgtcccaggggctgctgctgttgctgctgctgagcatgggcggggcatgggcatccagggagccgcttcggccatggtgccaccccatcaatgccatcctggctgtcgagaaggagggctgccccgtgtgcatcaccgtcaacaccaccatctgtgccggctactgccccaccatggtgagctgcccggggccaggggcagatgctgccacctcagggccagacccacagaggcagcgggggaggaagggtggtctgcctctctggcctgcggttggggaatggggtgtgggaaggcaggaacagagggcttcctgggctcctgagtccaggacctgtggggtcagcttgggagctcagctgaggcgctggcctcaggcacatgctcattcccccactcacacggcctccagatgcgcgtgctgcaggcggtcctgccgcccctgcctcaggtggtgtgcacctaccgtgatgtgcgcttcgagtccatccggctccctggctgcccgcgtggcgtggaccccgtggtctccttccctgtggctctcagctgtcgctgtggaccctgccgccgcagcacctctgactgtgggggtcccaaagaccaccccttgacctgtgaccacccccaactctcaggcctcctcttcctctaaagaccctccccgcagccttccaagtccatcccgactcctggagccctgacaccccgatcctcccacaataaaggcttctcaatccgcactctggcggtgtctttctgtgggctcagggcaaccacacatacacagggtgggtgcagcttcccaaccattttatacagagtcacagtgtcagaactctggtggaaaacagggtggggtcgggggatgacatccaactcaggaggtgtccatggtctcgccttctgtggggagaaggagggccacatggtcagtgtcgcccaggtggcagggcctgagccttctacgccgagctccctcttcctccctctgaggttggctctggcagtgcaggtgcggggtggggattcttactgagttcgttgaagaggaaggcgtcctggtactccttcatgtactgcgtggagcgggactcgtccaggaagagtgagtagacccgcttgatgtcatccacctgcacttctgtaccctggagggggagggcgagtcctcagttgggcccctctccgtgaggctcaaggcacagaccccagcgtatgccacctccatgctctaggcagcagagtgtggcatgtgaggggagggcattctgggccagattgcctgggttcaaatcctgcctggccatctccttgttgtgggcccagcctcttcattcctcagtttctttatctgtaaggtggacctaacagcatctacttaagtcaagagagatttactgacacctactataggccaggctggatgatacagaagccaacctgagggatgaaaattccctgcgtctgaaaacgtacattctaggatgaaatcagaaccctggaagcccctgaagtactgtgtcactcactgccgccatctggccctgctggctaattcggccggctgaccttgcgtttccggcacaccaagctggcagctgtgatgagctggatggcgtagcgcagtgacgtctccagcccgatgcgggtcagcaccgtgtaggcgtcctcactcatctccacatcttcttcctcgcacctgcaagcagtgggggacaggggtggctcagccggggcccagcctctgactgcagcagaagtggccacagcaaccctctggcccttccccactgggaatatgtggcgcctgcatcttagaaccatagaatgctgaggctagaagagccacggagacaggggctgggctggacctaaaaccgaggcctcctgaccacccccagggcgctggccccaacaccagtcacgggtacctcgcctccctttcccaccgtggctcctgctcccggatcggaggccaccgtctgggtgcccgctcagccctctctcctgtaggcccagccaccatgccactccgctggacctcagtgtcagcatttgtcaaacagggtagaccccagccctgcgtctcaggcgcacggcctggtcctgcccgcaccggatgcggaggatctgcttcgtgtctttctcgctgtagggggtggtggagacgataagcagccggtccagcaggtctatggggatgccgtgagggctctggtagctggtgccccggattctgaggaagaggcagaaagagggggctgtcaggggcatgttccctcttcattccctttgctgggaacactctcacctcccatcgccacccactcactgggcccaacaccacttaacctttagctcgcgtctcctgtcacatgatgacatcacccctgatgacgcagccttccacagctgcgtcagtcccccaagggcacctttccgcggagctgggctgctttaagctagatctctgcctccaggattactggatcaaggtcccactcccgtgctcgacacaaagcttcacaaaggaggggactgcacctgtcttgttccctgctgcagcggggccagcccagggctggtgccaggggatacagtcagttccccttattcacagtagtgaggttctagaaagtcatcgtgaacactccaattagctgatcctgagccactgctcctactggaatacagggttaggctctctcgagcctcggcttacagtattttcatcaatccatatatatataatctgggtctatgcgtattttcatttgtgtgtttctggtctttttggtttgttttttgagacggagtctcgctctgttgcgaggctggagtgcagtggcgcgatctcggctcactgcaacctccgcctcccgggttcaaccgatcctcctgcctcagcctcccaagtagctgggtctacaggcgcacgccatcacgcccagctagttttttctatttttaatacagacagggtttcaccatgttggccgggacggtctcattctcttgacctcgtgatccacccacctcggcctcccaaagtgctgggattacaggtgtgagctaccgcgcctggcctcatgtatgtgtgtttctatttccatgtgtttgttatgtaacatcactgtttattctctaacatggagctcgtgtcaacagcattctaacttgggctcagcgaagcgtctgtaacatggcattttctccgtcaggcttcacagcctccttgcacttaggatactagacagcacttcaacactgtgcacaggggacactttaaatggcaatatcaccaacaaatggccccaaaaagtttaaaaaaaaaaggcacaaaaaaagtgacaacactttgggaggctgaggcgggtggattgcttgagcccaggagtttgagaccagcctgggcaacatggcaaaacaccatctctacaaaaaaaaaaaaaaaattaggccggacgcggtgactcacccctgtaatctcaacactttgggaggctgaggtgggcagatcacgaggtcaggagttcgagaccagcctggccaatatggtgaaaccctgtctctactaaaaataccaaaattagctgggcatggtggcgggtgcccataatcccagctactcaggaggctgaggcaggaaaactgcttgaacccagaaggcagaggttgcagtgagccgagatcgtgccactgcactccagcctggtgacagagctagactccgtctcaaaacaaaaacagaaattagctaggcatagtggtgcatgcccgtggtcccagctgatgaggaggctgaggccagaggactgattgagtcccaggggtggtgtgtgtgtgtgtgtgtgtgtgtgtgtgtgtgtgtgtgtgtggtgggcactgaggctgcagtgtgccatgatcgtgcctctgcactccagcctgggcgacagagcaagaccctgtctcaaagaacaaaagtgacaaacgtagcactaaatagaatacaacaaggacacttatttacagcatgagcgctaagggagcaggcagtgttgcctcgttcacactcagctgggaaagtgggtgtcaggtgacttgaatttgttgccgaaagcagggcagatatttatttggggattacaaataaatcttagcaagcgagattctcagatacagagtctacgaacaatcagggctgcccgtagctgctgcctcccacaggaggtgcccctgggcagtccccaggccctgacctgcagtttctgtgaaaacaccatcagccctgggggtctcttccagtgtccagccatccagagaccaaattacggccctgctaccttctagacttgtgacctgggcaagtcactgggcctcactgtcctgccctataaaatggggctgaggtgatatctaccttctgagcttcttctgcggatccaaggagttaaaagagccaaacacagagccaggcccagcggcccagcatcctctgtagggtgcccgcttcttcccttttgtgatgcccatcccaaccgcccagtttcagctgggcccaaggctgcagggctggagctgacagtacccagccttctttgccaccaggtacagcactgagcccaagcagtgccgggcaatggaatgggggtgcaaggttggggtgcagcctgtggatcacagcctatgggggctgcctgccctccacacccccctgcttcctgcgggccaaaatgtggcgaggtggagaagacagccagcgggcatgg

SEQ ID NO: 96653 - DNA, 82551 bp, Homo sapiens
atccaaactctgcatccagtgctgggcacagccctgcagtctggcctggggctcaggctctgtcctggctgaatcccaagctccagccgatctggccaacttgcctccccctgaccttctccccttttcccccaggccttcccactcctgggactttcctcctcttatccctgtacctggaatgtggtctccccatcctggcctcagacaagtgcatggcacccacggctggcacctttccagctctcctgcggccagagggtcacctcaggaccagcatgcgtgcagcccagcctcccctccatgtgccacccttaagcagcatatggcacctccaaatgctctgggtatggtcctgtggtttccacaggtaaagccacacctttggacatctctatattactcacagcaatggacgccgcagtgccttttgtacatactcatgccacaaacagcaaagactgatgaattattaatgagtgaataagtgaaaacctcaaaggaaggaaggtgggggcaaacgggtgttactgaatatacttaaaatgattcagaatttactttaaaattgacaaaatataactactttgctatattctcttgcctattgtactcctagacttcttcatccattctctaaaagacataattctacaacttaaccacttaagacacatggaagtaaatatgtgatataaactaccgatgttttagactgggcttctactgcgtgtctgttttgatcaaaacttgaaatagctaggaaatgactgtctgaataagatccaaaggacagagggggaatttcatgtttttcagctttcggttccacccagagcctaggattcaacaacaaacattcacagacctagggcctatctgaatgagtttacgactttggcacacaaggactcaattttaatatcttgccatctacatggccaactcagttaattccagtattacgcagttttagttttatcacggcctatcatctctcttttcccaggcattgttttgttggtctagcccagaaagcactgggaagccaatgatttgaaaccccacacagcagcatgaggcaattcagagcaaacttgtcaagtctagtcttggccaagctgatcagagttggatcaagagttaagccaagaatcttctcaacaattccaacagaaatggccctttgcctgggagcataatatttttataagagctggcacaatcgaccaagaaaacaagctataagactacagagaaagggtgtgtgcttgtggtaaccgaaggacctgctccatcacaccactgtcttcttgacaaacatttttaagaattaaagtcagaatcaaaataaatatttgcaactctcaagctactatctccagcacttttttgtccccatgttcaagactgaatgccttcctcctaattatgatgtacatgattgaaaaaagtcactcctatctctaagaatcaaaccagaagctggagctctgttgggtgtggagctgaactcctcagcttagaaacactgcaaactgccatggcttgcaattttcaatgaaatatttttatgggacaaagtgaaagctagaagtgactgactgttgaatattgtaagaaacaaaggacagggttgggctgggcgcagtggcacacacctgtaatcccagcactttggaggctggggcaggtggacaacttgagtccaggaatttgagacaaacctgggcaaagtggctaaaccccatctctacaaaaaatacaaaaattagctgggcgtggtggtgcacacctgtagtctcagctacccaggaggctgaggttgcagtgagctgagatcttgccactgtactccatccagcctgggtgacacagcgagaccctgtctcaaaaacaaacaaaagatagaaaagaacacattttctaaaaaaaaaacaaacccataaacagaaaacccactacatgacacttaagtgcattctgagctgcaaggaaatgatgatgtccctcaggtctgatgcttgccgtgtctcttaaaaggatagaggcgtgctgggttccctccttgatgatacagaataaaaacgttgttctttagtttaattagataccatttgtcaattttggcttttgttgccattgcttttggtgttttagacatgaagtctttaaactaaagagcttctgcacatcaaaataaactaccatcagagggaacaggcgacctacagaatgggagaaaatttttgcaatctacccatctgacaaagggctaatatccaggatctacaaagaatttaaacacatttacaagaaaaaaatcaaacaacaccatcaaaaagtgggtgaaggatatgaacagagacttctcaaaagaagacatttacgcagccaacagacacatgaaaaaatgctcaccatcactggccatcagagaaatgcaaatcaaaaccacaatgagataccatctcacaccagttagaatggcgatcattaaaaagccaggaaacaacaggtgctggagaggatgtggagaaataggaacactttaatactgttggtgggactgtaaactagttcaaccattgtggaagtcagtgtggcgattcctcaaggatctagaactagaaataccatttggcccagccaacccattactggacatataccccaaggattataaatcatgctgctataaaggcacatgcacacgtatgtttactgtggcactattcacaatagcaaagaccaagccaaatgtccatccatgatagactggattaagaaaatgtggcacatatacaccatggaatactatgcagccataaaaaatgatgagttcatgtcttttatagggacatggatgaagctggaaaccatcattctcagcaaactattgcaaggacagaaaaccaaacaccatgtgttctcactcataggtgggaactgaacaatgagaacacttggacacaggaaggggaacatcacacaccagggcctgttgtggggtggggggctgggggagggatagcattaggagatatacctaatgtaagtgatgagttaatgggtgcagcacaccaacatggcacatgtatacatacgtaacaaacctgcacgttgtgcacatgtaccctagaacttaaagtataaaaaaaaaaaaaaagggctacacatgtgagtttcccagacatgcccacaatgaaaaattttgtcccctgacacatgcacagtaagggaaacaaagcaatatggagtaactcaagctaagggcctacgtgtgcactaggaggacggggtggagctaccacagatttgcaccgtatgcaaataagatgcccagctctcatcagtttcctataaaagcctttgcattcaactgtaaaaacagcaaccctcttctgggtcccccctgtgcaccagagagctttcttcttttgcttattaaattttcagtccagtgatacccttggcgtcggcgctccttaactttcttggtcgtgagacaaagaactttgggtgatacgtcgggctatgagagactgctacgttgtggtgcattggtgagacataacaattcaatatatgtacctaaggtaactgtacacctgtctagaaaaatgaaataaaagttcatccctattatatatatctcaaaaagaaaaattccaaatggattaaaaaataaatgtaaaaacaaaaaataaaaataaattaaataaaaaaataaaaacgttgttcttaccccttggttcagcacacttgctgagaacctactatttgcgacacagggttgcagcgactaaggagatgggagggtgagtgcaacagagccctaccccaaagcagctcagaacttcctctctcagctgtgcccaccaaggatggaggctgcatcctgaggacaggctcgtggtcagtcatgtttttgttcttaggaggtaggcctgagaagaacccccacgccctgcccagatcagctgacagaagatgctggcaacagctgcaggcccagggcaagcacgttctgttctcacttctctcccggccttcctctatcacaaccttcaaactcatgacttctgtattctgaaccatcacttgttcgcatgatgtcacctatgccaggcatttaggaaataccgtccaggacaggtgacctccttaaatggagaaatcctcatttaaaaacagccctggcaggccgggcacggtggcacatgtctataatcccagcactttgggaggcccaggtgggtggatcacttgaggtcaggagtttgagagcagccaacatgacgaaaaccccatttctaccaaaaatacaaaaattagtcggatgtggtggtgggcgcctgtaatcctagctacttgggaggctaaggtaggggaatcccttgaacccgggaggcagaggttgcagtgagaggagatcacaccactgtactccagcctgggcaacaaagcgagactctgtctcaaaaaaataataaaataaatacataaataaaaacagagacaaggcctctggtcttatttatgtggaattatcttacttgcccatcttaatggcagcttggaagctgatttagggatctcttttttttttctttcccctgactcaatttattagcaatagcataacattttttttttaactttgtttaaaaaaagtgcttctgttcacatatccaccagtctgtgccctccagtttctgtttctgctgctctggacattaactccgaagagctgccaattttctcagaagagatttaaataaacttctgaagccaaaggagtaattttctttataattgacattaaaaagtcacatgaactagatgaaggatggcggttaagcacatctgccactgggcattgtcttaaacttaagaataatcaatggcaaaagggaagaaaaggtttattggccaatcctcaaaactagggaataattaaatacagttgcacataaataagaatataaatagaaacgtttcttattcaattacttagaaacccagaggaagatgtgggcatgcagactattcatcagcaacagacttcactttctgtgaggtgtacctgcccatctccagagataatgaatggtttcttcattagacttcttgcaatgattaggtcttatttacatgactttctttgaatgagctcaaagcggagtcaggaacctgaaattcactgttctgaaaacacctaggattaactcattcactgcacaagctacttaacgagttcctgttatgtatcatttagctacagagaacacaagtgggtgaataagagaagtggggctgagccgaaagggccccggggagaggagcccacagaagaaggtctaggactcacctccacggctcggggaggtggagggtcgaggaggccaggaggtggcaggctcagcggagacgttaaaggcactagacagggaggggaagacaggactagccccttccagattcacactggctgcctggcagagaactggccagagggagccaggacagctgcccaggccaggcaggaagttttggagacaccagcaagattctgtacttgatcatcagtaaccaaaactaagcagtcttgttcaagtcattacatgctcccattaaagctgcgaaagtgttcttgtccatcatcacaattcatacatttgacacatatggcatatttaaaaatcagcaaatcttgcatgtttatctgactttcaatcacctgcttccaattaagctgaccaacgacattggctcaatctcctcacagaacattctggaaacctttatgtgatgccactgtcacaggtttaccaggacaggcactcaaaagcttttcccacgtagaatttcatcagctactcgggcctgtcatagaactgtagcatcacatcaagatgcaaatcgcttagaaagaatctggttcctccagcaagttctaggaggatggcatttggatctcccggatgtctctcgccatgaactgcaatttttacaaatccaggtgagaaatctaagaattcctaacatttatacagaattctgcatttcctcctggctggtgatgttgaaccatgagaaaggtgtccttgtgacatggatctgtctcagggctttggagcataacaaaagtcttggggaacctcctttcctgtggatgtctctaaatgagctaggtggtgctcatctcaacttcaaggctccattctgatttttgtgttttcttcctttttcctttcaatgctgttggctggtgtagttaccacatacacaatcacttacgtgtattcacagactttattagatgtttaagaaattatgagatttgaaaacacacagaaaagatatcttttgagaagtgtccaatttggagaggatttgtatttgtggaaaaagaaagttggtctcacgcacatacaaggctgacaaattttcccatagccagagaccctccctgactaccacrtgctgggatggcccccctgcatctccctctatccccaattaatgtggaactaattcgtatttcaaacttcccatcagccagtctgaacccagagtcttcggcagttatatttcttcacaatgcttgatttatgcacccaaactctccaacccacaaatacaacactaaaaaatgcagaccagggatggaaatttgcaagtacacttgctcattccacactaggtgaagtggtttagatagctgtcgctaacaccaaggggtttattaataggcaaaaattaattgtatgtagactgaattaatgagatggaaaaacatgcatatttcagcaaatacagaggggaccagcctctgccgaggcatctgtaatgaagtgtctgggctgtgggatgagtggggagcagctaccagcaagccagggtccttttgtgatgatgggggctggaggtactgttaaaaaaatacactgtgaaatgtaaacatcaggcaactgttttgagcacaaagttgacccctgacacatcttctgcagactgccatctacagatttataaataaatgattagatgtaaaatctccagagggctttccttttccacagcaattataggagcagattattaccattcaagtggggttccagggaaagttccttgactggcaggaatcactcactgctgtcctcctgtcttaagtcatcatgacaggaaacccagtgttcacatgtactgtgaacatttcaacaagccaagtcaatatacactgaatgaacacattcttgagttaaaatatattactgtcaataagaggctgaattaagaaagtatgaagtttcaactgtgatcaacgtcaggaagttttccatatttcatggctgcacgttgttaaaagctgccatgtgtatggacgcctagcactcacccgggcattttctctttggctattcttaaccaattttttatgttgttcaaatactaggtaatgaggctaatcaaagaaccatcaaatgaacagtatcaagttcagccacatttttccagcctaagagtttcctttctttcctaaatttcagggggaatatcaccttttggctttagggctcactttcattacaagaatgctgcccccgtactcctacgcaggcacttgcactggaaatgggttttccaagactcacagcagcaaagccaacgccattccctgctctcttgtccattttctctttttaaaaatgggtatgggctgggcgtggtggctcacgcctgtaatcccggcacttagggaggccgaggctggtggatcacttgaggtcaggagtttgaggccagcctggccaacatggtgaaaccccatctgtaccaaaaatatgaaaattagccggacatggtggcgtgcgcctataatcccagctacttgggaggctgaggcaggagaatcgcttgaacccgggagatgaagtttgcaatgagccaagactgcgccactgcactccagcctgagtgacagagtgaaactccgtctcaaaaacaacaaaaaactggtatgtaaaaggcacaaatttttttaaactttatagtttgaaattgaagattcacaagaaaaatattagtgacagttcccaggcaccttcattcagcttaactttctacataatcatgcgttaccaaaaccaggaagctggcattgatacaatacatctaactaaactacctatcttatttgatgtcaccagtttttacaaacattttaaattcttatgtatttttatttttaatggacttttaaaaattatgttttaaaatgaaattttataatgtgtttagatttacatgcacaaaaccccagacaggatactgaactgtctcatcacaaagacacctgtcaggctacacctacgaagtcatctgtccccagtctctgttaacccttatctcttccccatcactgcttgtcatttcaagagtgttacatacaaaaaaaatcctatcttttaggattagcttcctttactccacctaatgccctttagatccatccaaattgtaccgtgtatcaatagttggctgctttttattctgttttcataagtattccattgtatggatagaccacagtttgctttttctttcatctttggaaggacatctgaattgcttccaatttgggggtcactacaaataaagttgacatggacacttgtgtacagtttttgtgtggacataagttttcctttctttaggatacaagagcagaagtacaacttccggttcctgtggaaacagatgcttaactttctgggaagtggccacgtggtctccgagtggctgtaggagtgtgtggtctctgcgtggaacctcactgaggctctgatttgcatttctctgttggctaacaataaacattgtttcctgtgcttatggtcctacgtatctcctcttggatgaagtctctgttcagattgtttgtccaatttctagctggaatgtttattttcttatttttgagtttagagagttggtttcatgttctgaatacaactcctctgtcagatatgggatttgcaaatacagttgttcctcggtatatgctggtgagtgcctccaggatttcatggatacaaaaatctgcacctacacaagtcctacaatcagccctgtagattctgtgtatatgaaaagctggccctccatatacacggttttcatatcctgtgaacactatatttccatccacatttggttgaaaaaaatccacatgtaagtggacccacagagttcaagtctgtgttgttcaaaggtcaatggtattttctcctgggctgacttgtctctgttctctttttacaagaccttttgcagagcaaaagtttaggaacagaattttttaaaaatattgatccttctggaattctcctgctctgacaagtttccaggatgagtgatctctcttatagctgaagagtcaccttggccgtctttcagcagaggtagccaggaccatgggcgtccccacaggaagcatggtctctatgggacggaaacatggcgtgctgctgagccatactaaggaaaaygtgattcacatgagaaatacactatatatcatcatggcatttaaaatgtcattttccttaccagctcaaatgaatatttacagtgccacagcggggcacacgtgtggagtgacatggaagtgtcccagtccacagcgcacccggtgctayggccacaggtggagaccatcggacgacaacgcygcctgcatggtgcttcctgtccagcacaggagacagacaggtagcagccggcgctccagtgttaggccacaggacacaaagcagggccacagcacaggcagcactggtggtgggagcagtttcagagggaaattcaggatggcagctaccacattgtctcagtacaaggactgccagcagcattgcatggtggcgacgctttactgatggggtcgctcaggaagcaygcacaggcagcgtccacacagcgtgcccaaggcccctgtggggaggcatcagacacggccggcacccacatctaccctcacggagtggcgatggcgctgggcacaaggggccacaggcacacgggggaagcagcagccacgtccccacgggggcaaaggagggtcagggaaggcttcccagagcgggtacctgaggaaatacctgacgactggttaaaggagcgggaggcggagaaggcgggggccagtgtttcagatccaggggagagcatgctccaaagtcggtagaattcctgaaccttcctgaatcttcccttccacgcctggatgtcttaaggagtkgtgggtggataagacgggggccagtgtttcagatccgggggagagcatgctccaaagtcggtagaattcctgaaccttcctgagtctgcctttccatgcctgcatgtctcagtgctggcgggtaaccaaatacagatgcctaggagaaggtggtttctcctctcaacaatttccacaacccactgcagcgctggaaagggggctttattacaacacaactacaatctagcacgggatccccaaaatcatgcccgcgaaataaaatctgaactcaggctgacctgtgtgccaggagattttaactagcttgtcttggctttcctcagcttgtacaattcaccaaccttaatgaaaattcacagaaaagtctacaagtcatacagtcggttaaaaaaacctcttccttgtactacaatagcatgtgatcgctgtcacaaatcgataggatatgaacgagaggaatgtatggggtctgcgactgctgggctcgttggccactgaattgcaccattgtacagcactcgcctgtctttcctttctaaatcgaagacattttccagcctctacacttaaactatgggattaggatcagaatggtataacggagcgtggaatgatctgttcagtcacagtaattytggaaaaattccttttaattttgtgacatttttgtattcccatgaagtacataggagttctctctataactataaaaatgatgtgttgtctggtatatgcgacacttctgactggaacttgcaaaggaaggcattaggtttgttttctatgactaatttttttgtttcaatggcatcgaggtaagataagatggctgtaagtcctcaatgcaccaatgctgaataaaaaataaaatctttcattaaaggataaaagtagagcctggatttgtttgctgaatgttaacacctaacataaaaataccccacagcacgtcccgacatcaggcttcctaaaggatatcctattacttcattcaagacagaaacttttaataaatattgtactaatattcttaattacatacatttccattgaaacataccaacatttctcaagctgtgctttgcgggtccctggagtcacatgggctgcctcatgtgtttgtgaaaaaaacgctctttggtcaagtaatattgtgaaacaccgggactcagacctcatgccagttgtggaagcccgcagggtcccacagcgactcggacctcacgccagttctggaagcccgcagggtcccacagcagaggggaccggtgtttccccaatcactttgttcctagaaccctcaagcacacaaggaccgcataaattttggggaatagataaaaagtatgaaatttaatcaaatcaagttttctaagaaaacacattaatctgaactgcttgcttgtaagagcttagaataaaatcttgtaatcctatgactaacatttacttcctatcaagaatatcacgattcttttttttttttttgagatggagtctcagtctgtcatccaggctggagagcaatggcatgatcttggctcactgcaacctctgcctcctgggttcaagcgatcctcccacctcagcctcccgagtagctgggattacaggtgtgcaccaccacgctcggcgagtttttgtatttttagtagagacagggttttgccatgttggccgggactggtctcgaactcccgacttcaagtgatctacccacctcggcctcccaaagtgctgggaccacaggcatgagccaccatgcccggctcttcctaacagtcccttatggcttagcaccacatgcactggaccaagtctacacccggtgcacacgtagcatagtggatcctrtgtcattaaaacattagggagtggatttcgccccaggcactgagggtttggttacattttttacatgcagtttagggttcaagataaataacttacagtgtgtctcctacagtctcaaccaaaggatgtattttcccagggaagacgcttgtttagtaggttaaaagtctttcctgctgcctgaggtaactggaggtgatgcatgctttctaacacagcccctccaagaggcagaagcagctacacaagcttggcaaaatgyggcagggartcacccagccctggcagccctccaatctgcaccagcaacagcatcgggcacttgttcctgctcagagaaggaaacccagccagggcagyggggcctggaaaagtgtccctgacagcagccctggcaagctcctgcacctgcaggaactgaaagtgcagaaacaaaggcagccaccactggtggcttcattctgagcttggagacayagtactyatcactccaggcctccaaaacaggggccccaaagtcctttctctctccagcttgaaatcagaaataatgtttcctgcatggagccaccgaggcgttctttccttgagcctcctcttttcagttttacgcccagccttcccgagaggagcgtttctggacaatgatgaaggaygatgccaggcagccctccagagttactgtggactcggcattcacaatctgtcaaggtaactttatgacctcatggctggctggtgtaattccagtaatgacctacagacaccaaaacaatctaaacttatcaccgctcctcttatggccaacaaccggcctcatcaaaaagctgaagggcagtgctgctggtggggacagagatgcccccggaacctggcctgattcttggtggtgctggcagtggcctcggtgacctgttccttcgcccccggctggcccacacccttcacctgctcagggctttgtggggggcagtccgatcacagccagtacctcctcccagcagacagagcacttcgctgggctgtgcgccctgactagtgttagagcagggacgaggaggcaggcaggtgttgagctggcctgtcaggtggggacatggtgggggcagaggcactgcttacaaacagactgggtgaaagacaggccctcaactccaggttacatgggatttttcagatctggacattacccaggcacctgctatggcttccctttagagaaacagagagatgaggcatggctgcgaaaacctgaggttggctattctctacagggcagagatgaatacagaagttagggacctgctgatttatggtaaccttgggaattaggaaagcttaaatgtgttagcataggccaactcaggtcaagctagaaataaaatggtattacataaaatcattaaaaataattataaataatagaaaatgcttataaataatataagacaatttaaatcacaaaggcaaaagacataaaacactataaagctgaaaatgaaaatatgtgcattaaaattgtctttaaaaaaaaaaacacatgtgtttcatgtaaatcaactcctatcagtcttcagcacaagggcctgtcatttcccttggcccatcagagacacccacataccacatgcccaggctgcagaatcagccgctttgcccctggatggttactactagcacgctgatggtggaaatggctttggcatcccaacttagctatgggtaagatggtcaccatttcagatttactgaaataaggaccttgaggactccaattaataactctgctttttcaatgtttttttttccaaaagaaaaatacactcataatgcccagtatctgtgatttactgctttatgctatacagaattctctgtgctaaaaaagtaaagtatatgaggtcattttacttctaaaatctaaatgtaatgtatgtatctgcttgcatatttaccaagaaattcccaatgagatagaaaatttcatttcctcatgtgctttttctgcagaacaatcattcttaatggtttcttttatttaaaagaatccatttatcaatttaaaagtgattataattatcaaatggttattttttattaaacagactgttcttccagctgcaggctccatgtcacgtgcagagcctggtgtggcccaacccctgcaaacacgtcgtcttgctgatctcagccacttccacagggaccctcgcagagtacgccgcagagacgcagagatgcacctcttcacagaasaacactggccagagggagagggtccactgcgcttgctctgccatgagcccttctccccgcagtcatccccatggccccagcgctgttgccatcaacctgtatgttcacagaaggaactggtgggtgccgcccacaccgagcctggccaaccatgacagcggccaaagtgtcccattaccaaggaaatgaaggtcggggggcggccacagggaagaggaagtgaaggaggctcagtaacatcyggcccaatgccctggggaaaggcgggggtgagtccagccttgccttccattgattcacgcacaggatggtggcttcaccccgactccccatctgggtgtgggacggccactcctgggagttacaggagaggtagggtgcaccctgctcagccaatggagccccttccctccctcactcacatgtgctcatgagagcccggcgcagtgccaggtagcagctactcaatggtgacacatggccgggaccttgcagaggccacaactgagcagcgcctgcccctgaaatccaccaggttttgatttaaggaaaagggacctggtgggtgttgtgaggagggggtggtggctgccacagggaaatgggctctggcaccctttttcccgatggttccaccagcctctgtcaccacggcctgctcccttggcgacaccacctactgggtctttctctcttctccctgatgctctcacccaaggagatcacagcagcagcagtgggtgtgtggctctcaggccrtatctctgacacatgctgcttctctgagctccatgcctgcatgctcacggatccgacccactggttccctggacctcaacaagagcaggcccaaggttgaagcgttgytcccgccactcctggcttcctgctctgtttccccttctgatggggactcccctcctgctagtcacacatgccagcaacacgggcccacgcctgccttatcctcctctttggccctatttaatcacaaagtcctcgttttmactcctaactcttccggcaatctgtccacttacagacgtcactgctgtcatccttctactagtctaaacccagtcattccctgcctagaccaccatgatggtccagtaactggcctgcctgcatctgcctaacctctccaaatccaatgtgctcaccacactacagccagggtgaggactcgagacgaaactcctctggttgcccgtggcttctccatccaaatggcctcctgacaccctctcaaacctcccagtgtgctgggcccttgctcccgcctggccctcagctgggtcctctgtcctgctgctttgcacggcaagcacacaggtcctcctcgggtcccccaagtgcaaggtggggtccttcttcacaggcactcgtgagctcttacttgttccacgtggttcagatctcatttaaaagctacctctcaaagaagcctcctctgactctgataaatgctcccacgatgcctcatacttctcctgggcagtgcctctctcagctacgactgagccacgctttgttcattagttgttgaaagtcaccctcctcccctgcactgtggactccaggcggtcagggaggccacatcttcatctctcactgctgtgttcctagcacggaccccaacaggtactgatgctggaaagatatggcccacagagggctatggaccaagaacatgcaggatagagcccaggggaggcgaaagctgggggcatcccagctactccacctcccccaggctgctgtcaccagaggacaaagccaccaaggttttcccatgcttcctagaaatgtgtcttttatttttcctttggaaactcttttcaccttccaggactgcacttggttttggtatctgggttaccaaagagaaacacatttgcatttccatcaaggccctgctctcaaagataagcaagggggtccatgtggccattaagaggtcaggaaggagcaagagtccactcaaaccacagctgtccctagagccacttcaggggcaggggcaggagtgcaaagccagatccctgaagcagatagccgattcgtgactggcttccagttcccaccgctaacgtgtgtggcactgaaacatcacatccaaacaatgcagcttccaaactaccgtcagtgaggagtttatactattttttttttttacaactggcttgcaaaatcagtgaaaatttactaattttaaggaattggtaacctcagaattagaataaaaaagcatttgagtggtttctaattgtatgactttggtccccaaagcaatatgcattaacatcttatgatgacatgaaagaattctggcatttagtttaataaaaagagacagtggcaacaacttcctgtagaatcaaagagagctaaatcagaggaatgagggtgctgccttcctacaacagccaagacaattgctatatgtaagaggtctcaggaattaaaattcagttacttgttcaaacccagacagaagcaaccacactgctgcttcaaatcaatactttaaaatattagtaaaaggactgggtttggcagaaaggtaggaaagaaaggtagaaaggcagacttttttcgcacgagcatcaactgagatattaacaaaagtcatatttagtaagcatatttaaactcacattaaataccacataaaacatagtttcatatgatccaaaaaatacatacatcccattaaatttttaattcccactaatttgaaattacgaggtggcaatttcttcaactaatagatccagaccaggagaacttgcaacccctgaatgggcatcaagccgatgtggacagaaccagagggctggtccttggccagtgctcacctcccccagcctccagcagaagaccaaggcatggggtggtgcatcaggcagaactggagctcagcttcatttgccagctgggctcgaccgcaaggtggcaggcactgcgaggaagacaccttaaccaagacayagagactaaaataaagtttggggtgggagggtgtgtttgcacatacaaaattttgcttgttgcagagaaatgctgcatgtctcagaaaggaagatggggaggtgggcagggctgagagaaaagtggatttgttgttagtgttgcttataacatgatttttttttttaaattgggatgtgggatttgaactcagctttatgaaaggagtgggtcatattctaagagcagacagcgacaattttgggccagcgtacaggaggaaacagcagcacaggagctgcccctaccctgggatgaagcaccattcctgcgaggtgactgccctggggcaacagacagtgtcttgcagggtcctttgagcaccctcaacttgggggaagaatctgaatggccaccttgtaggagtaaaagtgagctgtcactagagcaaacctcaaaagagccacagccctgctctgatcgtattaatccctaggattagaatgagctgatcccacactgccggtgccccaagcactgctagaggaagaaaacatcctcccrggcaatacgtcatttctacacactgtttctccaatgtactaatatggcacaaaataaaaaacaactagacccacgaggagataagacaatatgaacaaaaatggcagaaataaagacaaaaaatagatcacagggattccaggtgttggaatgtaaaataactatgctttactaccttcaagcaggaaaaaagctaagatctcaaattcaggaaagaatcaccaactatttaaaaaaatgaaaatactagaattgagaaatcattgaaataatgtattctatgaatgggtttaaaaccaaattaggcacagtagcaaagaaaactaatgaactgttagagcgatcagaagaaatcaacacaatggaccccacggatataaaataatgggaaataacggagaacaagagatttagaagatacagggaagtgtaccgatgcgtaaatgggttcaaagaaggaaattcaagggaatggagcaaaaataacctctgaagaagtaagagatgagaacattctgaaactgttgaaagacattgagctatagattcaggaatccctgtgatctcaaagcaagataaataaaaggtgtccacacctagtcagatctcaatttagagaaaagacattacttgaaagaagagctgacttctcaagaagaatgatggaagcctgaagaaaaagtcacagtatctctggattctgaataaaataactggaaacctagacccctataacaaatgatataaaaatacagatacaattaagacattttctaaaaaagaaactgaaaccagaacttgccagcaattccctgtgaaatgaaataaaggcaatggtgtactgataaatgtttagctggcattccaaaacaagtattcatgtagatgtgcatttcttaaagaataaactctactgatataaaggatgtgaagtatacaatttacaaataattcaatacacaatactctttgttgtaaattctgtatagccagctgattcttatagcatgactttgttgatatttgccaaactcatgtccatagccaatctgtggttgcaactggtgaacacacagttctacatgaatgctgcaaagtgacgagacagaggtgatgaagatgttatgtcagaacttcacgtsttcggcaatgacatgagcgatttctttgttgaatgagatgatacttttaaccactggaagaggggctaaatttctggagctattcaaaatgtaacagttacacacaagacrtctgaaaatgaatgcaccttactaacatcttctccatcacattttgaaatctagattttggttggcaaacattttctcaaagggccagatagtaaatatattgtgttttgtgggccggaagtctcagttgctcccacttgactgctactgagctatgaaagcagccacagacaagacataaacaaatgagtgtggctgtgttgacaaatacttatttaccaaaaaaaaaaagatgtccagccccagccccaggccatagtttaccaacctctggtctagataatcaaataaacttctaattagtagcatttgctaatttctgctgtgtaaatattcctaccaggactgacttcaagctaccaaggtgacagcactaaatgtggagtatcacagcatcataaaaatggcctccaaggtatggataacagcacaattagtacaataattggaaggaatcagttttgaatgtgtgttctctttccaaacataatgtatttaactgtaaatttatataattcgaattttactaatgggtgtgtttgacagccagctcataaaattctcgtaaattaaagaactggctctcggagctggctggcttcagcttgctgctgctgaaaaggtattcttcaggcagaaggaggattatcacataaagaaggctacagacacagaaaggatgaaaagaataaaaatggtaaatctacgtgtagctcaaatgactgacagcattaaacaatattttaaagtcaagtaaattgagataattttcacatacagaaaaattaaatcttttcatacatacagttcaatgagtactgacatgtacagtcatacaggcaccacagcaactaagttacgaattcctgagagagctttgatagtttgtgtctttcaatgwttctgtccattttgtctgttgtcacatttactggcataactgtttataatatgtccttcataatcttttaatgtctgtaggatctgtacttatttcctcttaccacatcaatttgggtaatttgtaatctctttctcagtttgagttttatcatttttattgatgtcttcaaaactgaaataagctattggtttctttgattttctcaaaaattttttttatttycattacattaatttatgcttttcattattgcctttcttctactaggtctatgtttcaattttctcttctttgtggtttcttattttgaaagctagattaacagctggcaaactatggccatggcaagaatattttcaaagaaaaaatttttaaatccaaagaaaagattttcagaaaaatgagaaagtactamttcggtacaacctgaagtggaatctgctaagatgtgttataagtggtggttgtgaaattgtgtgaagcaaaaaaggattagttggctaaactgaaaaacttatgaaaatgttaaggcctatggttactatattacctactagcaggtactctgcataaaatatgtgaatctgaatctattgcacattatttaaagagtgtaatcaatggtgtacttcattgatgctcacggacctaatgacaatcatttctatgaaatttagtcagaaactgaagctggatatcctgacatactgtatcacaaagcacttcaatgacttagcagaggtagtaacgttttactgcaatttttatggttcaggtttgatattaaaatttttctgaatcaaaagaatttccttcaactattgttatcaaacattaaatagctttgtaaatcggactttatattttttaaaaataaattcaacctaaagttacaaggcaaaacagtaattatatgcttaaaattcagtaaagttattgtgatgaaaagtaacaactgaatcataagaaacatcagctgttcatttacttctccagatttctattcccacagaaatttacagtggatataatttctgagcacaaattactgttctggtagtgttttgttttttgtggatcccaaggcaagtacaaaaagaaatctccatatttcaaagtctttttaactgtgcaattgaagagcttccacccaacctttaattggaaattattaatctgcagtgtaatgccatgctgaaagaaaaatgtcgagaagaatttaataaaattttataaatgctttctaagcaatacaaatgctcaaataaaattgtatgtctgtgggttgatctcatataggaaactgatgaaacagaaaacaaacaaaaaaataagaaaaagcagtaaaaccagaagtggggtcattaaaaaggtgagtaaaattggtaagcaaccagccagaaagatcaggaaaaaaaggaaattagaggtgggcacagtggtgtgcatccatagttccagctttttaggaggctgaggtgggagaattgtttgagtccaggaatttgaagccagtctgggcaacatagtgagactctgtctcttaacaaaaaaaaattgcagtaaaacaaaataagttgatttttaaaaaaacaaaaatatcaggaaacctagtgtcctataattttaaatcttctatggaaatgtataagccaagatgctttcagcagcatgctccaacaaacacttaaggaagcactgccaattaataaatgcataacacttacaatagattatatatatttaaatattcatctacctaataataaatccaacaaaatgtatgcaagacttctgtagggaaaggctttaagtcatgattgggaaagattaagacaacctcaacaaatggaggactataatatgtttacagatttgatgactcaaaattgtagagatgtttctctacaatttcaagaagaaaaagattttctaaaaaccttctctacatttcaaaaagaaaaagttcttttaaaaattactctgaaactgaaatgtgacaaactgattcatttatatactaatggaaatgtcttaaccaagaataaccaagacagttgtaaaaagaacaaatgaagtactttctctattagatttgaaaatttgttataaagctacaataattaaagtagtgcggtatggtgggagaataagcaaataggacaataaaatggaatagacaactgagaaacagactcatttcacttgtgacaaaggggtcactgcatagacatggggaataaatggacttctcaacatgaataaatatccatttagagatgtcccatgtctcatgctgtaaacccaaacaacaaaaaacaaaaccaactgcaactgaaatcataactgtaaaggtgagagcaaataactgtgacttctagaacaggaacaggcaaagtacagcctggcccactctggcccagcatctaagaatggtttttatacttctaaaggttattctttttttttttttaagatgaatatgtagcagagactatctgtggtccacaaagcttaaaatgtttactatttagtcctttacagaaaaaagtttgccaacctatggtctataaaacataggagaatatgttttcttcacgttcttatgggaragaaaagacttcttaaacctgacaaaatgcaccaatcataaatgaggggattgactaaaaactaccttgacattaaaaccttctgttcagcaagacacaattaaaataatgaaaggcaagccaaagagtggagatactttcaacatatatggccagcaaaggatccatatctagaacatagaaataattcctatataaggcaacacaataagagaatgggtgaaagtcctgtacaaatactttaaaaagagcaaatacaaatggcaaataatcatacaaaaacatattcaaccacattagtcattatagaaatgaaaattaaaaccacaatgagatacatgaacacaaacacaagaatggctgaagaagctcctaataccaaacgggcacccgagtggagcaacaggcagcctcagacattgctaatgggcgctaatctgatgtttaatcacactggaaaactaacaataattacatccataccgtataaccagtgagtctggaactaggacatacccagcagaaatgcgtgcctgtgtgcatcaagaggcaggcaggaatgaccacaggcaggggcatcattagtaatgaaaattccaactaccaaatgtccatcagagtggaagatactaataaactgtgataaattcacatgaagggacactacacgacactggaaatgaacaagctacggtgacatgcagttgtatgggtgcgtctcccaaacataacactggattaaaggagcctgcaataaagaaatatataacataatttattatatgtacagttaacaaaaagtacaagcaaaacaacagtatcgtgttgaagggtgcatacttaggcaacaactctataaagaaaaaccagaaattgattaccaagaaaacccagaaaagtcggaatagggttacttctgggagcagcagcagsaaaagatgggaagaaacacgtggcagagttctgaggggccgccatggtttgtctcctgatctgcatgatggttacacaaagattcactgcaggcgcttctctctgwgtgtattatctttataacaaaaatggttagaaacaatgggtgacgcttcaaacaactgattctcaagatggtatggatacaacttcagggtttgagtccatttttggcaatatgacagtcaaagtgaatctcaattatgtaaggctgggaagccttcaacatgcactggttttcagtaaatcacaaatgcttttcaggtgtgggaaccaagccaagaacttccagcaatcacctgttaattaccatcttatgtttcataagcagcaaacattagaaacaaaaacttctacaactgttgggtaggcacaccccatcaacagtatcactactctcagcattgttgtctaggttctggtcaatgcatgacaagacaaagaaataacagataaaaatattaggaaggaataaacaaaattatcattatttccaggtattattagagaaagttaaagagaataaattgatgttagaactaataagagaatttagcagaatggccaagtacaaaagtcaacagcttttctgtatgtcagaaataataaattagtaatttcaatgaggtgaaaagagctcatttataaaacaaacattaaaaaatatatatggctaaacttagcaaaaaatatgagttctatgactcatagtataaaattttatggaaagacataaaagaagtgctgaataagtgaaaaaacagcatattcctagataggaaaatatcagaaatataaattttctcaaaattaacagaaattcattgtgatcccaaattaatctacatagtgaatgcaccctgaatcaaaactgtaactggatttttaaaacgtgaaagttgacaaatgcattctaaaagcatggaaaaagatatatgatctagaacactgaaatagttaaaatttgtttcaaataacgttaaacttgcagaaaagttacaagaatacagagaacaccagtatattctttacctagattcacctgtttttaccatcttgccactgttttttctttctctccccctccctccccacacaaacattattatttgtttgtgtgaaccatttgagagttactttgggtatatcacacatcttatttcctaagaatattctcttaggtaaccataatacagtacagttgtcaaactgaggaaattctacatcaacacagtgcttttatctaacatataatccatagccaatttcatcaattgtcccaattaagtctctcccacaatacactttccctggagtacaggcacacgttgtattcagtcgccatgtctcttcagtctccctcaagctggaacagttttacagcctttgtctttcatgacattaacattttttacatgaagtaaaactcacccttgttggtgtttagttctgtaagttttgacaaacacctacagtcacatgaccatcactaagmtcaagccagagttccatcatcctaagcacttcctgtggtccttyataggaaacctctttccccctcaatcccatccctcgctaccactgatttgctgtcccagtggttttgcctcccacagtcagtcctgtaagtggagtaatgtcatctcagtgtctggcttcttccactatcaaatgcataatgccttgagagtcattcatgatgttgtatgtatcaattgtctgctcctttctcagggctgatctgaactgcatggtasggatgaactacagcttatctacttactcagttctccaagtgagggaatggctgtttaaggcttggggagactctgagtaaagccacttttctgagttagagagagagagagagttgggagagagagagttgggagaggggagaggatgggtgggtgagcgggtgtgggggtaagtgagttggggggtgggtgggggagtgagtaggtgggtgagtgggtaggtgggggggtgggtgagtgggtgaagagagagagagtgatggagtgggtgggtgactgaaggagtggatgggtgggtgagtaggtatctgtttttgttcacttgagtaaacatttaagtcagatttctgtgccatatggtaagtgtatgttcaactctattttttaaacctgcctgactgtcaccctggtggctgtaattcagcattttcccccgcaatggactctggctgctctgcatcttcatcagcacttggcactgtcagttcactttagccattctaataagcatgtagtggaatctccttgtggttttagttttcatttgctaagggtgaagatgttgagcatattttcatatgcttatcttccatttatatgcattctttggtgaagtgcctgttccaatgttttgcccattttaaaaattggcttctcttccccctgctaattctgggctcattttgtattcttccttctcatcctgcttatcattcttcttgttctaggctccttttgtgtctttgctgcccccatcctggaatcagccatttctccaagctgcacaagatccttttcagtggtgcatggtattttgaaaataagactgggaactaggtgtgttctttgtgactggggtattactgcctctaggcctttttagttctagctagagctggaagaagtgtgtacatatgtgcatgtttgagaaataatgagtccatatagatgatgctgattccaagtcaactgcaccaacttcttccttgaygcctactccatgtaagtgtccctcttcttcacagggggttctcccaaacatcaacacacttagtcattttctcaatccacatacacatgaaataattccacatcactatgaaaaacaaagttattaagaagaatatttgtagttttccccctacaattgagtacatgtcatcagagtacagtgtttaagttacttgcattggtacttttttccttcctttttgcatgattatattattcatctgcaatgcaatgaacagatttcctaataccaaactacccttgcattcctgggcatagaaaggttatatttgttgaggtatattatactactaatgaggtgtcggaatctattcactaatattcattgggatttctgcatcaatatttccatattatattagtttttattttccttacaatatactatctttaccaggtttaggtttcaatttgtacttgctgcataaaaaatatgggacgtttcccttcatttcttatgcttttaaacaatttatgtatcattagaatcatctacacaaaagatttactagaattcccctgtgaaagcaactgggctcagacccattttgtgaggtagttctttgaaaatgttctctgtttcttccatgtaaattggtttatttaagctttctatctctactggggttaattttgctaaaactggatttttcctaattatgcacttcaaaaatgttttcatatttatttgcaaattagtctcttgtgctttttaaaaacttctgtatcaatacttatttccctgttgtcattctcattttatatatttgtgtttccccatttttttccttgaataaaataactaatgatttgtctgtttaaatttttttcaaaggacctagaatttgatttactgattaaataaatgctttttccttctctacttcgttattttctgcttctattatttcctttcctatacttttttggcttcccttttaatttttcatagttttctgagtttggtattaattccatttatttttcttccctcatttttactgatataggtgtctacagtcatgaattctctaatcactgcattaactatgcctttgatacacagagttattattttacagacattctattacgttggtttatatttmcactttcattcaagaataggttttaagtctctaggtggatgggccttgtttttgttaacaatttatagttttattgcactgtgatcagagaatgttgattgtaacaattcttttatgaaacttttcttcataacctaatttttgataagcttttgtaaatattccatgtatgttgagaaacagacgtattttctactcagcgaatgcatttcaataygtatctgtgacgggataggttgtttgggtctcctgtatcattccttacttgtggccacttgacctgtcttgtactgagaatagtgtgttaacatctctgacaatttccgtgttgctatttatttctctttgcgtatgctgtaggttctgctttatacaggtggtttctgtgttacatgggttttatcttcattatgagtgtgacttttagcattttaaggtgttctcatctgtctcttataatgcctttttagcctgatttctgcttggtctaatcccaagatggcaacccctgcttccctatggtttcatttgcctgattaatcaccgcccatccctttgcccttcccttgtgaatcactgtgtttcacatgtgctgctcacatgtgctgagctacgggctgccttaccaagccaacgtgaaatttcatttccagaagcagctaagccccctgacagttcctgacacagcttccgctttgtcctgttggctgatgctggaattgcagtgagggttactgtgtctctttagtcttctttgctttttcttttaggttaatattttgtaaagtgtttttattctagtggtacctttgtgtgtatatcttttatagcgtctgtaatctagggtgaccaacttgtcccagcagtttacccaggattttcccagtgttaaaacggaaagttccgtgtcctgggaggcccctcagtcacaggcgagctgggatgactggtcaccctattttaattcctttttttccttgcctaatcttccacttcctggtctgtgagcttgaaatagtttcctttgattcctacctatgacctatacagtagggcatgatcttactctacttcccctaaccccctttttctttaaatttttattatccctgttctgtcaggctatttgtttatgattctgcctcccgtgtccccacccccattcttatttacaaacaagaatgaaaaaggacacatcctctacacgtggaactgtctgcagagccacattactatcagggaagagctggcccaggaatagcaatggacagaacagagcctgtatctagacccacacacaggaaaggtcagaataagatgaaggggacatttcagtgatgagggtagatgacagtgaagcctatggaaagggtgtagcaaaaccatctatgtagaaaaaccttatgtcagatcattctcaggtcacacgaaagcaaattaccagtaaattaaaaatattaaaacaaaaccgtaagtcaagatagtcctttttcgaaatcttacagtggcgcttcaaagcaggactcaaaactggaaactccagtaaattgatcgtcagattaaattgcggaaaactttaaaactccagcgtgactaaaagacaccactaaactgctaagaaaagagactagaataaaatatgtataacttgttagacaaaggactagtagccatactgcagagttactaaaagaaacaatcgaaaaaagcaaagaatatgtataagtaaatcaaaggagaaaaaaatataattggctaataaacacagaaagttgcacaacatcaatagttgtcaaatgtaagctttttgaaaaataaaaagccattttagaaatcctctgcagaggtgtgagaaatggacgcgtctttattactgctgagagtatgagttggtacagccttatgaggggggtctgggctgcatccgtgaacatttaaatgtgtatgccctttggccaaacaattcctctcctagacgtctatcccacagaaatacttgcacacagcacagaaatacagacatacacaaatgttcataacaccataaaagcaaaaaaaaaaagttggaaataaactaaatttccactcaaagtgggaaaagttaataaattacagtaatccataatacagaaccagctgcggaaagcctatgatatattaggaagttaaagtcctactcacaaaagaatatactatgtactctccaggtaaaggcaggtaagaacagggaagtatatttacaacagaaacagatttataaggttgcattccaaaggactaagactgattgcttctggaaagaggattttacggctgtacttccagagttgaagtttttaaaataataaatttgtgttactttaaaaattttcaagtcaaagaaaggaaaaacaatgtaaaatcaacagtgacatacgaacattccccagaaagagatactccctactccggctatgcaaactgtgcatgtgtgtgcgtgtgtgtgtgtgtgtgtgtgtgtgttgggggtgggggatcttcctctttgtgaaaagaaaaggtctcccttgaagtctttgcatatttctgaggggttggccccccgcaacctaagcacatgcattaatttcacattatggaaacccacagcagaggcaggagagaaagatggaatcaattcagataatggtggagggctccatgtccctcagcatgctgaagaggaagcaaggctgctgggacagaaaagctgcccttcccagccgactccccactgactctgtcagagggtcccaaggcctctctgcagtgctctgtaggttcttgggttttttgtctgttttaatctcaagtttgatggggtatcagctttgtaagggcagaaactatgttttcttcttccccaaggtgctcccccacaccttagcctctgaagaaatggctgcaggacgccttccaactagaacccctgagacagaccacaggcgaacagcactcgcccatccgccgagataccaccccatgctatcaaaaaggttaatgtaatactttaactgcaaaaagatttacaccagcacgtgttctgggaaatgaaaaagaaggattaataaatgagtgctcagaaacgaaaccacaattggcagggagatgaaaaatcagaatggggtaaaagtgacaggagagaaaggaggaagttataaacttagctctgaaaagacaaatggctgttggaattggcagtaaaaaaccaaaatgtcgcaagaaataattgttcattatttagaagaaaagcaccaaagaccacgcaaatccttcactgcacgggtgatgaaagagaaaacacggcctcatcttccagcatctactaatgccatagagagctggggagtggggcagggatattcggatgaccaccctacgtcctgtcgcccgtgcccaaacatcaggtgctgggcatccgccattactcaatttcaaaggcaatctttaaggaggactttggttcaatttagacttttacttctgttttcgtgtcagtctataaatgtcagaacactttttctaaagtttaatactgttccagaaaagcyctcctggcagctactcatggaatattttcgggctaaactgctcttcaaaatttcacacagtcattcatcttcagggcctttgtacatgctacttcctcacccctcaatttgcactaactcatcattaaataataatgccagtagcctcggaactaatatgcatgctgtgtgactttcacttctgttctcatgagcaggtacaatggcctgtgttctccagagagcttgccatgaagctaactcccttacgccgtggatagaggcaggatctgttctatctccagccaaacgcatttagaaaacaacccaggcagagacagctacatctgagtatcttttttttttttttccacacagggagtctcgctctgccacccaggctggagcgcagtggtgygatcttggctcactgcaacctccgcctcccaggttcaagcaattctcctgcctcagcctyccgagtagctgagactacgggtgtgcaccaccatgcccaggtaagttttgtatttttagtagagatggggtttcactgtgttggccaggctggtctcgaactcctgaccttaggtaatccacctgcctcggcctcccaaagtgttgggattacaggtgtgagccactgcacccggccttgagtatcttctgaaacaacatgaagtcatcagaaccaaggatttttttttgttattgttgcagccacaaaatccaaagctagtgtattaagataacattgaatggtacctatgccacagatggagctaaaatgtatacaagaaattacagcgacacccgggaggccttgaatgctacagcttacagtagcctacagggggcgttttcagccttagggttgggcacgcgagctaagggcgagaacagcagttaaggacactgaggaaggggccatctaggcttcaggatgtttgtaaacaggctggaatccagctagccaatcaggttaatacattatgacacagaaatgtggtgttaatttcatttcaatcaactaaacttactttcttgcgaagataatttcttccaggacatgtcaaatcactgcagaactccaggatgtggtgagctcccttgcttttaaagagcaggctgggcttcaattctcaaagcatgatattagatatttagatatgtgaaaaactcactgacgttaatgggaataacatggactttcaaagcaagatttcaaaatgttggggttaaaaatcctactgaattagaatcaaataagtctctaagaaatactggcaagctaacgcagtgcataccaggcgtgctctgagggtcacctgtcattcagcattttggtgttgctctcaatgcatattttataaaacaaatagagtagcaaatccctgtgtctgttttaaggtggcaaggcaaggcgacgctgttcgtcattagtcaataatagagctgtgttagtctaatggtgccgctctccctcccttgcagacctccagggcaatcacctgtagaattatcccatctgctgcagcgggagccagaagcccgtcttccattttagttccttacttgggattcatagaagggggaaaaaactccacaattaggtctttcaagaaaaagaaaagaagcaaaaacaaaacagcataataggaccagggagatcacctttaggttttgaaagacccccagagatttgatgatctttgggggatgggggagaactaccaatctcaacaccacattaaatatacatttacgagaatttcctcagccaaagaaaataggatagaggtgccaattagggaagggccggttcaggctttgcactcatgggatgggggctcctcactggagggtggcaaatcctcccattcccagcrtctccatgacaacgggggcctcatgaagtcaggccacactgctaagggtcagtgtgatgactccacacacgctaagaggccgcagtccttgtgggtccttgggggagagggtgtgtgtgtgtgtgtgtgtgtgtgtgtgtgtgtgtgtgtgtgtgtgtgtgtgtgtgtgtgtgttggaggagctggccagcctgtcccccccccagctccagctcctcctccaggctgtcagaggccatttcttcagcagtcaccacatttaaaactcaccccatccctcctccctgctttagaattctccaagacactgaccagcacctgactttgaactgtattttacctgtttcttctgtctcacgcctgccccacctccacccccagacaagacaaggggcgcctcagggcagggtttatctgttttgtttgttgctcccccccccacccccacaatccctagaatgcaggaggtccttgctaagtatttgttacattaattaaaggaagctggtagatttctggcctatttcacaattacttgccaataaacagtcacatacatgtgtattcctgaattttcaatggaatgcatcagatgggtaggaaaatcccgattcgaagcacttaaaaccagcatgaggaaaggaagctaagggacagtcgtctgtgtcaactctgggcaggtaaacacacttaaatccccaagacagggtatctgtccccaaatgaaacacaatttgcagtctatgggatcttttacagttacttagaacttgctaagtggttgyaaatccctagcctaattcatagagctcacctaactcacagtcattgtggcagctttagatgtcttagaaaatgaagtgcactattttcgctgtcttctgcgtggaagttcttttgggttaagaagcccgagagttgggtctgagacgtgtggaaaaaccctcctcccagcatgaaaggagaaccttggggcccccaaattactaatctaaaggggaaagtcaagctggaaactgctcagggccaacctgcctcccgttgtattcagtcatccctctgctcacagagagaaagacatctctgattgcctcctttggagaggcttatcagaaactcggtgcaaccacttgactctcacctacctgtgacctggaagccccttccctgcttcgagttgtccctgcctttctggacagaaccaatgtacttcttacatatattaattgatgtatcatgtctctctaaaatctataaaaccaagcggtgccccgaccacctggggcacgtgtcatcaggacctcctgaggctgggtcacaggygcatgtccttaatcttggcaaaataaactttctaaattaactgagaccatctcagatatttggagttcacaccagaaaggacatgccgatgctgcttccagaggcctggaagtaggccccacccctcctcaccctgcaggaggcagtaccaaggaactcccagggagatgcccaaccaggagccctcccatgctcggggctgaagcccatgttcactgggcagatagtggccacaactggttcccaagagaggggctcttgctgccctcatgccatggatgtttgtcacctcccgactgcagtccagactccactgaagatgagtcctgggtgacagcttacatagaactgtagtgccatagtcctgaagggactccaggaggggcaccgcaccaactacctcacctctccttggcctttcacctgggttccctggaatcaacagtctgcatctgtgatgtgtctggttaattcaggggttgtccggtgaagagcttggctagctgacccttctgagaccttagctcagtccccaggccagggcacctctgactgctgcccggctaagctatctgggaccgctgttgccagtttatttaaacacgtggaacttctcatccacgttctttcagtgcaaaatcagtgcctgctctatatggacactgtgcgtttcctccagaaacacatgcgctgtgtgtttaccatgtgcttttgcaagatttagagagcatgagcatgaagagaaaatccaaatccatccaaagtgaaattccctcctgctcacgtaacgacaacccacagctatactgaggaacagctcccttcctgccttcactgttaaacagtgattttcatttatatttttctccttttcaagggattacaaagtgttttacaarctcatccctgtttgtttatgccagtccctcagccgggcgagtcacacacgaacatgcacagaagccacgagagctctcctgcaagggtcacaaggagacaacaaaggtctggacgtttaaaactcaacggggaagattttcctgctctccccaccagcttccgggatgaggccctctagaagcgtcagggtcagcgccttggaaaatcagaccttaatgggttttaaaaatggtaatgtgtgaaagaaatgtgtcttcaactgagtctaaagacrgataaacattgacttccagccatgcaaaccacttctccgcatgctcggaggcggcccctccacaccaggccagtgaggctgctcaggtcttcactcctggcagacacacaggaaaccacggcagtgcgcagccctgcatctgcccaggccctccgcggggcccccacgggactgtgtcccacccctacactggctggggaatggctgcagtgctttctttccatgcatacctccgggtgggtgcacaaacgtccttaaaccaggagcacctcggtagtgtgctgacaccagggatgagggtgcagcggtcaccctctccatcgagcctgaatggtttcctcccactgctgctccacaggcacttccttagatgcaaggaatttgcaaagaccattataagtgatttccactgattttcagtgggaaatcccacttctctgagttagaagaatagttttcttctcaggcatttgtagaaacaagtgacccactgtggcttgtgccgtcacattccaaatgcccatacagccccccaccctcaggtatcacgtgtcatgacaaggggcctaaggtagaggtatgggcaggagggggcccttgtcctgcctgccagggccagacaagcttcccgagaccccggccaccttcctcatacctcaagaggcttgcacacccctgcctcctcctgtctctccaggracttacccacccatacaggccctgtgctccaggcagcaggtccctcacagccctccaagcagccagtgggaatggggaatgccctatctcagcccccgctgaggctggtgtctcgatctgaggttcacagtgacggtcaaaggatgcaggctcagagtgagcaggggtatgtgatttctgtccacttaacacaataccaaactacatactaaggcacagaaggtaaaatatgagcaccttctcttctaccacaagaggcttcaaagacatgggagagtgtggcaggtgcccgaccccgcgtgcaggtcctccaggtcccaggcctgtctctgtacccgacctgggcacctgctccacgccctgcacccctttccatcctcgcccttccccagcatggatcttcaggtctctcttctcatgaagctgaggtcttgccgtcttctcggatcccaaaccacagatgggctacctcaccatccagcttcccacctgcatctttatcagcacagctactccagctgcaaggcgggggtcrgcgaggcagccaccgaggtgggcaaggacagacaggcgtggagggtgcagtagtagggtgtggccctcgctctgggccagctgtgcccagcacaggccgmagtcttgtcaagggggaggtggggtctccaagcaggggtctctgagggccaccaagttctccccgcatccccaaaggtggctccacctggccccttgactgcagggccgctctcctctcatccccagcacagggtcctcctcatgcttctcctgcccctagcccacctgacactcttcacatctggaaatctgtgcccttcatcctaaacaccctgggctgtggggcctcagtgatgcagaaatagccttcccagaaggctgtgacggccaccacgctgtgcttcctgaggcctgtccattcggctccctgcctcttgtttagcagaagcattggccatcacatgatgtaatcttgcaagctgcctgagacatctcatagggtgggccagtccagtgctgaccacagtcaagggccaccatcagggaggccacgtgaggccactccattggtgatcagggtcgggtttgcaggcgttacccctcccacacgggccatctctgcagcacctcggcctgggggccactcagtgttttgtagagggagcagccttgattagtaatacacacacatggcaattacaggatcacctcaaatggtttcaggatgggtgtgaaactgagcagttactgttagcaataaatccagaggatactggccatcctgagggggtggaaaatgatcaatgttttcaaatacaaaaggacagagacttagggatgctaattttcaaagcctatatgatttaactttttagttcagattatttgacagttaactccagagcaggctcgatgacagaacgagaactgcttattaataaccggacatgaagtccagtggagtagagtcttgaaataaagggtgtctagaaataaagacaaggaaaggctgtgtataacccggaccatgtttctcttttgtcacagccgaccggacgaccaagcattctgggacaagatcagtgccactgatatattctcagccaaccctggagggatcccgagagccactggatcgtgtcctggggcgggcattctgctggcaccctcagcccacactgcttgggaaggaactggaagacagagctgccagcacagtcccaaaacatcatgcatcctaccaggaggaacacaacaaatattcaaaacagtggagactgcggccacagctgcatgggtgcacgggcacgcttgggagggtcccacacgtcaccccgtgggtgcgccctgcatggcagggaatccaacaggcactgaggcctcccagaggcaggcaggccggccggccatctggcaccagctgactctccggcagctgacgtgcggaggacagggtcctctcccacagaagcccccacacagtaggcacaccaacagcagcagccactgcgggggacagcaccgtgtcaggtgcccatgcctggggactctgagtgccgatgctttcttgctcccctcctcccaccttcaactttgtgatcagctctgaagtctgctctcaggcctttgaaagccttcgcatgggcgcacgcacatactagaatgttccctctccagtctcctccgttccctcaggagggtcagaaacgtgcccctccctttgccttccaggaagggggcctgagtcacccaggggacccaccgtgcaggcaggcagctcacctcgctgtcaaagacacttttccctccactctactggaactccagcgtctccgctcgggggctgctggggccagaggaaggaggccgagccccccagttctgaagcctggctgggagaggagagtgttctccgcatggccggccccccgagtggyggggaagcacagggcaagccagggacctgtctcccagggggcctttctgttgtcttcagtcctggtttcataactcccccattcacacaagcccctccacatctactcctacacacgatcccacaaaccccggcttccgacagcagctttcccggaacctttcctctcgggcactcagtgtgcaggcccaacacctgggtgaagcaagtgatcctggccaacgctgaacatcacaccacgccaccggcctctgtttccagcccccagagaacacctaaaggatttttaggttgagttattaatggaaattcagttcaatttgggatcagtgcagctcagaaattggattaagatatcttttttctttctttttaactagcacatgctctcgaatgaagaactcacactctgcagggccgttcttccttttgatgggtgaattttgtctttaatcaaaccaaatacgaaatgaaaaacatctgtggagacaatccaacagggccaggatgagcacgttctctcaggcaaacgaccggtatggattctataggcgacacttttcccctcatgagttataattatcatcatgtaactcttggtgttttcacattgggggattatgtcttccagtttgcagaaaattaggtagacaaatatatctggctaaatgtagcagatgaagacataaacggaataaaaaggggcaatttgttcgctatagtaaaaaacatgtaatactttacatttcactttgccattgaacatttctataaaatgcttttttttttcttaaaaaaaaggttttcctagagccaaatgacctttaaagaaattcactcacactagttctttctttagcttattagtcacctgggaccaccacattactaattaatgcataaagaatgcaatctaaaagcgccggtgctgcaggtactggagaaacgagcacctaagggaaggctgaggccaagacsggacctgagctacggggcaggagcctccgggtcggggcccactggacacaggccaagggctgcagggagcatgccgaggagatgctgggaacagaggcatccaggccatccagagaaatcagacagcatgtgggagcaaatacagaggtacggggtacagccaaagagggtccccaggatcctgtggctcccaggttccagccggatcttcagatcagccccttgcacactctgtccccaagtggaatgtgaccaggactgcggccctcgggcagtaccactgccagaaaaagtcctggccacaatgcgggagccatggcaggcaggggcagctggcacacctggctctcctgagactaaccgtctctgccctagtcccaggcacatcgagaaagggtgacaaattcctcctgccctcaccaaggacatggctccaaatgctgaaattgggaaactcacatcttcacagtgtgtgaccgagaagggtaaatttaccaccacccaaagtacttggagacggccacaccaaggaaagacgtgctcctcgagcaggatccctgtcagaggtggcgattacacagctcactggtaacactgcagtgttccacttccaacatttcatgttcagtaagagccaacccatggatctcttcctcgcaaaaagaacaaaaggacgcaatggtgagggttttctccgttcatgcgcattcctattccaatcaygtaccggcaccttcggaggcatctggaggtaggaccttcactccaccaggagctggctctttctggaagcccaaaggtaagaatagcaccctggccagcaagggctttaggtcacagacctgcacatgtgctcgcgtcctctagcttggcgaagatgaattagaggactggcattgcttccacagagacaccagatttacaacaacacctgctttgcgttgaggttcacaattacgaacgtgcaaagcacaaaagcacctcaaggctgctcaagcccctcccagggcgaggctacccactggtggtctcaaaaccactaggacccgtcatccagggattattcgctagaagcccccaaacactcagaagtaaagaatgagagtctgctctggccacgagccggtgagtgcccttccttttgtttcttgcatgaattaataattattcaataatatcaaaaatatttctcaagtgagaccttttaaggtctacaatgccgatctccacgagaaagggaccctctctagatgctaaagaggaaaaagattaatgcaaagaagaaaaaaaatacaggcagaatgtggagaagataaacagtttaaatatgataattgcttcaayagtgtcggcaaaattcccaattaaataatttgtcctgtttaaaaatgaagacagcatgtcacttaacatctttcctgggtaacttttgctatcttgtattggcacctctattattacatttcttacaggcaaatactgcttcttggagcaacgttagcctaaaatattcctttatttacatcttccagatttataactttgggccctgtagtccatggtctctgaagagtccgtcttaatctctctttctctctctcaacctgaggagattcagcttcaaagtacagatgccaattgtgtctctgatgtgaccaattacatttaatagtttccataaagcagaattatctgccaatatttgctgaactcaagaatgcctcatcgccctaataccactgacaaaatccattatatcttcctcccaacttttattttttaaacaatagctccccctgcactgcccaacccttgattttaaaaacttgcagcaccatttccatcttatttttttttctaagtttgcattaccaygtcgcgggaagatacagcgacacagaatgtacatcaatcacaaaaagtggtccagctaaagccatccactcgacatagttaagggggcagaaagcttgttcccagtcccctgagatgacctggctgcaaaaactcaaacagataacagccgagttcagtcacttgaagtaatcctttagtgactaaaatgactggaatgacaaaacagggggctgtgatttacgcttctggacattaataaaactggatacttggagtgttctattgaagggcagacatggaaaagggttttgaaaaatcccacagccacaggaaaaggcagaggagagccatcaggatggaaagctcgcaagcatgaacacggtggtgccattttccattgtactcaaagctccctccgcccagaccacagatgcttttaactggtcttagcagggcttaagcggtggtgtccactcttcactaatttaagaggtcaaaagtctttaggaagccatagcttcagggatgatattcagagaatctctaagtgctaccttaacatgggagccagtctgaacattattcaacttcttttctggtctaaaggaatatgcaaagataaaagattccaaatcattcaaaatacagatacaaggacagttttatcccctggaacactgcaagaagaaaaaagaaaagaaaaaaagtgaaagaaagaaacttagcggcaaagtsagaatcatttcttttagaaatcaatgttaaactgaactactgaagagaaaaatcatttaatttcttccttgcatatttgttattaagcttctaacagtcactgattctacagacatacatcatacacattttatgaatctggttctgagcacaacttaagcaagaaaggaaattactttcaacataaaaatttgaaatgcaaagtctgaaaattgaattatgggttcatttaaaatggtgtctcggaggaattaagctgtaaaaattacctgcagtaatttggaaacatttagatgctttaaatgaattgttttttatgcatgattttacacagggaaaattgtgctaccttacacactatattcatttgtgtgagaatattgaggtcaaaatctctacagactggagttcgcggtgcaagatgaaatattttcccttgacagcaaaaggtggaaagtgtaataaataaaatattatggagatgtgtttctaatattgtattgtcacaatcaatttcccattacctatctagattttgatatatactatattatttcctccagaaattcactttatgaagcaactgactccagtttacatataaactgctctgtgagctgaaggcttgaaggaaatgaaaagcctatggctatatttatggaatgaaaagggcatttaaattacaattaagttagtatgtaaacagcacagcacatttatgttccttcacagactcgcaggctttatgtaaaagaacatttttgtcattttcagtaaaacactgcagagggaaattgaatcaaatgggctgctagaaagctgatgaaatgaaccgttctgtcaaatcaaaaaccrtaagacgtgattgtcatctgttggtaagagcagaacaaaatcacccaaagacacttgtatttctgttgccgctatttaaattgaacagacacaaatcagaccctataaagggagatgaactgttttttcttcttggatttacaaagattattgttcaaaataggctattattttctattaagccaaaaaatgtttaggatctcttggctggtgaaatagttcttctcaagctccaaacgtatctggccccttattatttcaaatatttggaattttacttttcacaaactaaccaacgcttcgatgggraagctgctgaccccctagcgcatttcctaagtgacacacacagccaagtgcatccaattcccagcacacgccacctggggatcctgcaggccgctgcctttaattttatgcatttaacgtatttcttgatctcccgtggtaaactacacacttgagcgtcgaatgtgcacagaaggggctctgattactgctgaacacagcagcccctgaatccctccccagctgcctgtaacgctgggcgggtgagcagagctaatgagagcgaccaccattccgcaggcgcctccgcagagcaggtgaagtgcctattagagccgtcaccagcagaaaccctgagtaaatgggacttggcgtgggggctaccggggctgaggagcctcgcagagacacggacttccagagggaggcgtgcaaactgacacacacctggactgagcggctgggaggaaaatggaagggaactgcccctcatttcctcttctcaggtctaatcacagactcccaggtgttcagatgcgagacgggccagaggggaaagaggacggaggggcggccatgcccacactcaccatacagcctgccacgccygtccttcacccgctgcccaaacaagaggaaagccgccgctctcacctcctgattcaccttggcccagcagacaagacgcctgacaagcatctacttctccactgttctctaccattycctgaaaaaaaaaaaaatatatatatatatatatatatatatatatatatatatatatatatatatatatatatatatttctgatgggcagcaggcttctggaaggagacaagtccttattttgcattccccataatgctgtaagaccagtgaggatgccacgtgttaagctgccacgggatggaaacgtctagctaaggtaagctctggtgcttccaatgccccagtactaactgccaccgtgccccgacactaaccaattttccaagatctttgagacgatttgtgcaggatcacaggcataatcatgtcgagactttagagtgtacccagttgggataaaaggtcttttatttggcttcagttagttaaaaatgtaaatttgagtcttaggtgccatgtaggctccctaaaacaagggtgacagtaaagtctcagctctctacaagtgaaggttctacatacttactcttccttcataggccaacgtaaatccccctctgctctgagccaggagaaatgtctcggctacttcttccaacttccccaggcgatctgtcttcacttctaccaaggcacaaggtggggcctcagagtcctggggactggactcctatctgccttcccttccgccatctgaacactgggaggctcttagtgtgactttgccaacattagtcaaacgcagtgtctggcttataaatgtcatatctgtacttcacataccgggatcatgcatgttgaacaaatgctattagtaagtgccaagcagattctgagaccaaggaaggaaacgacttggtcacaaacatagagatgcaaacaagccacacctctaggaggccagcgttgccttctgcagtggtctgctggttagcaagacactgggctgccatcagaggacacttccccatgagcagacaggccctcggccgactggccactggatggatgctagagtaccttcaccacttgcccactggagattagacatcacgccataaagtcatccccaggctggaaagtaacaccgccgctggcctggaacagatgctctaaggagaaagaacgygtccacaagaagtggcagggggagccactggtggtcccacaatgctgagtccggattggagacccagtggaaaaccaccgacacgcacaaatccaccggctttccatgcttctgcctcaaggcagagcatctcatccaaaggatgaaaggtacagtcccaacggtcagacatctccatgaagcacaggcctgaccacagaacccttcccccttccagccatcaacctgcaaagagaggccaaacacaacctcaccgtggatgaggccccaaggctgccagccaccctgccaaacgtgggcttttggccaggtacagtggttcatgcctgtaatcccagcactttgggaggctgaggtgggtggatcacctgaggtcaggagttcgagaccagcctgattaacatggtaaaacctcatctctaccaaaaaaatacaaaaatcagctaggcatggtggtgggcgcctataatcccagctgctcaggaggctgaggcagcagaatcgcttgaacccaggaggcggaggttgcagtgagccaagatcatgctactgcactccagcatgggtgacagagcaagactccatctcaaaaaaaaaaaaaaaaaaagggctttcaggcttgatttagtacatgaacactgttgatcctcaagactaaaagcaaaaaggagcgtgggagaatttctatgtaaagaaaaccctgacttgagcttagtgcattcattcactcacttcaggttcattatctggacgtccactccctgcccatccttctgcctggactgggaacaaagtggacaaaacagacccaagctctgcctccacaggacctgccacgcagtgaagagatgtgcaaaaagtaagacccacacaaatgaaataattacaagctgtcgtgagccctacaaacacaggcaagaagctggaggatgaggaaaggctccatccactaaccacggtccaggagcaccgggcaaggccaataacagctatagctttattttttttcctaatttaatcctcacaaccaagctatctgggaggttttatttcccttctgataaagagttaaggatgaatgcgtgtctgaaagggaagcaggaattgaggcctcggtgtgagctccccaggctcggcccttccacgggctctcaccaggcctcagggggggaacccaagcactctggatgggctcatggggccctttgcagtgggaccccttcaatcgagtcctctcacccctgtccccaactagtttccttccagcctcttgctgtgtcctcttgaatttcacatcctcaggctgcctggccccgacsccagcctaggggagcctccctgccatgaggccacccagcaccctggacttcattttccagcacatgccgcagtgtwctgccattgtcactttttaaattgtgtggcctcactgtactcaatgtacttcaatgtactcactcactcaccaagcatctaggatttgctagagagttacaggtgctgggtgtaccgggagtaagacagacctggctcccctaaagcactgctctgggagaggggagcaatggaatagaccataaccccctaaaatgaatgcatgagtaatataatgatgtctgctaggaagaacactcaacagcatgatgggttagaccggggctggctgggaaggtctctctgtagagaggctgggctgggcatacagtaggcatctgcagatattcgcatcatcaaagtattgaagagtgaaaccaagtgctcaagctacttaaaatgccgatggaaagaacaggtagtttgggaaagagatgaaaaaaaacctcaagccaggttaccatcatatccatgaaaggtcaagatttgggtttcagaactctgtcgaatttctcaaaagtcaatgtaaaaagcatagctttgatgcctcaatttgtagcatgccacaaaattcacgttgggttgttaagaccaaagagaggactgctgtaaacacaggctcaaagatgcaccacgaagaggtggttaacagactactgtgaacattgaagaaatcgttgtttctgggtgaacggaagaaatcagtgcactggtgcccttttcactggcacgaacagtcacaggcttgagggtccctgctcgcttagcatgtgtgggtccttgtcccgccccgctggaaagagcctgaagaaggtggagctcgactctcaagcccaggctctgctgccgtccacgtcttctgagcaagcctctgtgccctggcccagctcaaacaggctctctgcctttgaaccttccccctggatttgtcagcccccagggagttactggcacatcaagatcaggaaactcaaaaccactgcaactcaaagttacatttcttttcatgttttaaacatctgacttctccaaactgcttactccagtttttctccttgaatcaaactttctattctcttgtagatctctaatctgctatctcccagccctcctcccaccccacagcctcacctgccatgggggacgcttaacctcagggtactcctcagttggccacagcatgggcccaaggatgaaggtgaaggggaagcgcacgagacaaaaacatgacagcggcatttggttttctaacagttttcactcagctacaaaactcccttttccatccgtaagtcatcactaacaatggagccgcagaaaccactacacattcgctcgcccagccttctctacatgggaggtgcatyacctatgcttcctggtgctcttttattacctttttttcttttttttttcttaagagacaggttcttattctgcagcccaggctggaatgccttggtgggatcgcggctcactgcagtcttgaacttcggggctcaggtggtcttcccgcctcagcctcccaagtagctgtgactacagacgtgagccacaatagccggcccctttgattactttcaggagttactggtctatcctgaatcaggccaggaacatacacctgtggaatgcttagaaaacgtggaagcatttttggctgccacagtgactaagagatgctaatagcatttagtaagaaggacagtcagttcaaagacttgtgtaatgcaatggcaaagggtgccccctccacacacacccctgaggccagacatgttgactcacacagggtcacataaggtcacaccagggtagttaaaaattagccacaatcccaccttcagagataatcactatttttaaaagcatattcctttgtctattgttcttaatgatctattttttttttggaaaaattcaggtggaatgtttacagtaaggattctccttggttataaagattcctgggaacatcattttcaaaaaatgcagaatattcccaaatgcagataaacctggatttacttaraagctcccccactgtttctggggcaatgggactgtccatttttacatttcataatgatgaagttcatagggataagccatttatgccccctacgcccgcccgcccgcccaggtgcggggttgtgtgaggaacctcatgtagggagtgaagaggcrcttttcaacgcacaactctgcactgtaggaaatgcccactgagcggaggggatgtcgggtctcactgtgagcaagttctgttgctgtccaacaagggttctctgtgtctgytgaaggtactattcttcaaaagtggccctactagaattatgagcagagagcctaggagaaaataagctttcatttgtcttgcaaattaaactctattaaccccagaggctgctccttgaacatgcttctaatattagctatgccgcatacattatgtggatttcatgttttcagcattacattagatacaaaatattttaaaattctaggatgtttcttcaaccaaccaaaagaattctaatgttccaatatgcagggaagttaggaggaagactatgttagttaattctgagtacgtatgacacaggctataactgtcataacacagactataattgtcagccgagtatcaaaaaatcaaaaataattccaatgagtcattttgtctcagtattttccccaagatgtagcatgcacaaaggtgaaaactaccttaatctgaaaaatgtaaagcttctatcttgtgaaatacgaactaaaagaaactgtgaaatccagaatttaatgaccattcttgaaggaattatatgatcagttactttaacattctctagtgatgggttgtcaaaaataattttggaaaacttgtacaactgtaaatttccacatagatttcagaatggcttatcagtttctaggaaaagacctgctgtgattttgactggaatcatgttaaatccatcagtttggggagaatattgagtcttccaatctaagaacacagtatatctctccatttctttaaatgttattttatttaaggttttgtagttttcagtatatatatcctgcaaatatcattggacatgaactactgcacattttcatctattataaatggaactatatttaaaattttagtatccaatattcattgctagtatatagaaaggcaattggtttttgtatgttgcgtagttttgtaggtttttgggaattttctgtatagacaatcatgccttctataaataaagttttatttcttacttttccaaaatcattttttcccttgatgtactggactggctaggaccttccactgaatagctgtaggaagagtggacagacatctttgtcttatttctgattttaggaggaaaacattcaatcttttatcattaggaattatgtcagcaataagtatttgatagattcctttttatcaaatcaggaaatttcttcgagattaacacaggtttatcttcatttttcctattgatatggtaaactgattaattgtgaaatactgaacagtcttacattcataagataaactcaagttggtcatgttccatcatcctttatrtatttcctggtttcaagttggtaatattcctgaggacttttgcattttatgtacattaggaatattggtctgtaattttcttctaatccctttatttggttgtggtatcaaggtaatgctgccatcataaaaagagttggaaagtatttcctcctcgtgtattttctggaagaattttctagaacagacattatttcttccataaatgttttgtagaattccccaatgaagacaactacgtctgaaattttcattatggaaaggcttaaattataaattcaattattatgatagatttaagactatttcttcttgaatgagcttggtagtctgtgcctttcaaaaaagttattcaggctgggcacagtggctcacgcctataatctcagcattttgggaggccgaggtgggtggatgatgaggccaggagtttgagaccagcctggccaatatggtaaaatcctgtctctactaaaaatacaaaaattaggtgggcatggtggtgctcacctgtagtcccagctactcaggaggctgaggcagaagaatcacttgaacccgggaggagaaggatgcagtgagccaagatcgtgcctctgaactccaggctgggagaaagagctagactctgtctccaaaaaaaaaaaaaaaaagttattcatttatctaagcagtcaaacatatgggtagcgaaactgtcctgctatgcactttttttttcagtgtcagtatgttttgtagcaatggcccctctcatcataacattgttaatatatgacttcactctctttttttttttttttggtcagtctagccaccgatttatcagtttaattaatatttttccaaagaaccagttctttgactcattgatattttccactgtttttctgttttccatgtttattcatctttgtttttatctttattatctccttccttctgtttgtcttgggtttgacttgctcttacttttctgttttcttaaagcagcagcttagatcattgttttgagaccttttgctattataaaaacttaatgttataaatttccctcaaagcacacttttagccgcaacccacagcttttgataggttgtgctttcatgttcatttaattcaaaacattttctaagtttccctgtgacttctttgaatgatgggttactaagaactttcaaatattctggattttccacatcttggcctttgttaagtgtattccagaaatgttaattacatcaagttagtagataatgctgttcaaattgtctatatccttactgattttaggatctgttgatcagtaagaaatggtgaaatctccatttataattgtggacttatctatttctcctttccgtttttgcttcatgtattttggaattctgttgtcaggtacatagccatttaagactgttaggtctttttggtgaactgaatactttatcgctatgtaacatctctctttaaccctagtaactttttttgtagaatatacatcatctaatgctaatatagccatttcagatatcttacctttaatctatttttttctcttaaacaaacaattcatggttttttaagatctttgtattttttccactaatttccaatgatcttttcttctgctttttaaaaggtttattctgttcattttctaacttaaaatgtatacttccatggctatatattttcaagaatacaaattatttttgtcatttatgttttactctgttaatctattttacttgttttgttattgtgtattcaccttttctatctctaacaaggctgttagtcttagaatctattttacatatcattatagctatgccagttttctttgggtattttcctgacatgcttctttccatccatttaccctcaaagtttgaaagtccttatactttggataacctttgagtggcrtatatttggattttatattttattccatttttcagtctttttcttactggtgagtttagttcatttacatttattataattgttaaggtgtaacttttgaggccttgtgagaatagttttgccaagccctcatattttaaagttttagctgcatataaaactctgttctaagttattttcctttaatacgctgaaaacatgcctccattctcttcttacattcaatattgctgttgacaaatctgaagccaatatgaccactggttctttatatgtgttgtttgttcttgctaatgttttagatttttctctctattcttaaatttcactgtgctcttctagatagacgtcagttatttttcttttttttttcttttttttttttttttgcctctttggtcctctcttggacttcttattcttaagtctttcatgtgttcttaattcaaggaaatttatatccattatttcttcaactayttcttcctggagggaatgtaagatgggagacatccatctgttttttgaaccattgttctttagttctcatgggactcatacaagataagtagcccacctctccacttcaggaaagctgtataaccaccgggttgagttctaaaccgttacagattggtgtgtctaggaaatttagatgaagttaagtgaaacatgtcacatgtctccttttgaagtacataaagcaggaatcctgagcatatgttccccttcagcatgagccagcacctgccaactgggaaaatgtgcatctacctagaatttcagcctgagaccagactgagcactgcaggaggcactcactctcccgcgagtgcaaggctggcacttgctgaatgaatttgctcaggctgccataacaaaataccatagaccgggtggtttaaagaacagacatttattttctcacagctctggatgctgcaagtctaggttcaaggtgttggcagagttgattttctctgacgcctctcttcttggcttgcggacggccaccccttgctgccacttcacatggtcatctctgtgcacagaagcctatggtatatctgtgccctaatctcctcttcttataaggacactagtcaggctgaattagggcctattctaacaaccccaatttaactttaagtacctgcttaaaggccccatctccaaatacagtcacgctccgacgtactgagggctagggctccaacatgtgaatttggggaacacaagtcacttgcacaaatctgagagtgacagcctccttcgatcctgccccctaggcagatctcttacctcatctactctcagccctcctaaaatcgtaatgaaaattcattttcaagtggttcattctgccagaaattaaaaacagaaaccagcctgtgttgagcacctacatatatcctgaagcatgatcccaagtcgtctccattactctggatgtaggaattctaagaaggagaagagccccatcgcacaagagggccttggctttgaggaaggccctaaagtcagaggacagggtgggcccatctgcacttacaccaggctcctaagacacatcctttttccatttacagcagttttctattcaaggggcactagttctccctgggaatgacaaaaacactcttgaaggcactcattaagaggtgtgaactccacttacacccagtggagcttttcagatacgcattatgttacttgtcacaccacactaattagtgacaaaaggtgcttctgcctaaacaggtcattgaaaatgtaaaatatgtgagaaacaaaaacacctttattcaagagaagcaacccttggaaaatccaacaggtttataaagcctctgacttagacaactcgagtgtggctgctcttgtcaatttaaactcggctctataattagaaaacagaactttcaatgttcatttaatgagtttaaaatctaaagatacttgaatatcattaattgtagactatttttcaattgtataattctgattgactcaaaagattatataatttatgttcacatacttttttaaacattttctcataaatgcaaatatgaaaatggcctcattaaagaaagaataatataatttcaaaaagatctttcattctgggggaaaatgggtatccacaaaacaatctatagagttcacaggaaatcaacagtggaatgctgaaagcttttcctctaaatttagtaacaagacaagaatgcccattatcacgacttctattcaaaaytgtattaaaggcctagccagagagccaagacaaagaaataaaaagtaaaactgaaacaatgactatcagcattaaggccttctttcaatgacagttgcttagaggtatgattcaccccaaactgggctataagcatcattgcaaagaccccttttcaatgatgcaaatgagaagaatctcttcagagccaacatttattgagtgcttactgaatactaacctctgtgctggttatacgtgaatgtgttccactcttacagcagtcctgagggggtgtctacccacttcttcaggaatggttcagaggtgacgatctagaccaaggtcagtatctccggctggactcgggtgagaaaatacgaggcactttgggggtttctacaccacaaaaatttgtaaccagagcaaagtgttgtgaaggtgaacgttgtacttcatccatgaatttctgagtaagcaccttataaatcttaactaacttgagaaaaaagaaaaagaagataactcagaaaaccacattctatcttttttcagttcaaacatattggccaagagcatgcatattttaaactaaaaatatgtaaattttccagtgcctgttttttgccatagagaacacacatccactcttgatatatattctggagtgattacagcaggagctccttgcagcttgattaggagaatctgtcttattctcatctctgacagatgcaggcctggtcttcccgtaccagcttgtaagagggtcctcagtttacactgtgagagtcctttggaagtaacagacatgtctgtctattgctaacagacataggtgaccactagtggctccctgcctcaaaaagtgctatcgatgatcagaaagtttaggggaagcaaatttctttttaaaacttcatgtaaatactataatagcacagctttaaattatgtatcttacaattattttttaaaaaacaccccagcacttctgtttccaggcaagataaaataagtaagagacaagattgaccctctcaccaaaaagaaccaaaaagaaaaaataaattaaatagaacacacttttcaagaaactggagagcaaagtacagagacagatgagtgacagaaaaccaaggaagaaaaggctgcgactgccctgagagttccgggcacccggaggggcacacaggaagggcctggccagctcccaaactgaggggatggagctgtgagcccggaaaccaggacaggcagagtttgcaggacagaactggagggacagagacacatctcagaaagaggaatcctgagatctgcaacaggtcaccctcacatattcatcagagtactgatgggcaccgccatgtcaggaagctcccccaggcaggaaaagagctatctgtgaggatgacagggtggtaaccgctgctcttgcagggctgggagcatgacttttcctgacagccacactggaatgcctcctattcacagaccatccggggcgagctgaaaagggggctggcctcagtacactgctctggttctacctaacgaatcttaaaagcaagacccaaaagagtcaaactattcccaagtaatttaactgtgactgtatcccagaacaaagctcaaggaaatctatcagaatgcagaaataaccagaactcaacaaggtaaaattcacaatactggacatgcaatcaaagattaccaggcacacaaagaagcaggaaaatatgatccattacgaagaaatacaccagtcaattgaaatggacctaaaactaactcagatgttaagattagcagacgaggatgcaaaaagttaatgtaactgtattccagacattcaaaaagttaattagaattatagaatatagtaaaaaaaagatccaaagagaactttcagaattaaaaactaaaaaaacctacaatggaaaaatacatcaaatgaaaataatagattagacactgcaaaagaaaaaattagtgaacttgaatatattcctatagaaactacacaaaatgaggacagagaaaggaaatcaaaaggaaggaagaaaggaaggaaggattatcagtgaggttttgaaaaacttcaggaaatcgtacatatctgtagttggagtttctgaaaggaaaaggaaaaaaatatatttgaagaaatagccaaaatattttccaatttgatgcaaactgcaaatgcacagatacaagatggacagtgaaaccaagtaaaagacacatgaagaactgcaccaagatgcatcacaataaaattgttcaaaaaattgataaggggccttacaacctaccagaggaaaaaatcatgtcacacagaggcacaaaaagatgaggatgacagcagaattcttaatggaaacaatgcatgcaagagggcagtgtagcaaaatctgtaaagtattgggaggaaaaaaaccctgtcaatctagaattctacacccagtgaaaatacctttcaacaatcaagaagcaawaaagacattttgggcactaaaaaactgtaagaagtcacctgcagtagaccagtgcaatgagaaagggtgaaggaaactgtcaggaagaagaaaatgatgccaggtggaaatggatctaaacagaatgaagascaataaaactttattggaacacggctgcattaattcatttacattttgtctatgattgctgtcacaaaacggcagaataactgagacagagactaatatatttactatctggttctttacagacaatatttaagaaccttgtattaaacaaaactattgtcatttgaaaatatttgtcgttttayctgtgtttatgttactgtcttttatgcatataaccacatgtttatgcaagcaaagagtgacttttacaaggaggctcaccaagtatcagcactacttatctgggggctgtgagatgggaggtaattgttatttcttttgctttcctgtattgcttaaattttaaaaataagtaaaagtcattttataaaatgaagtcgctagttttaaaaagtaatataactatactataaaaaatttgaaatacagacaagaaaaaacaggaaattccttgatcttcatccctaaaacagccattatcatcatttgagagtattcacttcaagctttttctcacatggcacarttgtaactctaatgtgcctgctctttagcactctgctttttcacttaacggaagcatttatccctgactacgcagtctcataggcattagatgctgactcggtttggtgagagcatgtgtcagtattatctaaacgatctcactagtgttggacgtctaggttggtttcctttccaccatgataagagaagctgcaaggtataacgttttttctataatttagatatttttctagagtatactttttcaaagtgggagtactgagaagggttttaacatttttatgtctgtatgtatatggtcacaagactgatagcaacttactgttatcagcagcatcatacaaaaacatccccatttccggcccatccttcaaaacaccaaatattttgtatttacattttttcctaatacaatgatgaaaaacagcattttgttttaatttacataaaatttttgtccagaaaatattttaagatacaagagatatgaagcagttattttcagatgatatatttaagtaatactttaccctttacttaactcattccgtcgtayctaagtattcctctgcatgagacatggaatcaaatatcattaaatgagaatcttcygaacttgacttttaaagacacccagtcactcccagaataaagatgagactttgaacccactgtggtatgtgactgggtccacaaccctccctctctcccccaaactccagcaggtgcacaagccttccagagttaccaaagaatcgggccgrcatcccccggagcagcaggcagggtctgctctattcaccagaaccaaggacagtgcctgacacgtacgcagcatttaaatatttgtgggataaatgaaggaatcactattgttgggacaaaaaccagcttggtcttcaatcagggtgatttcaaaatcctctaccgtgtgcttttgcccgtactggcgaagtctcacgtgaaaatacccgcttcagtctcgctgggccycagttcttcccttgtgacccggatcactactcagtggcctcactgcctcatggagcacttgtgctaatgactgagatacagtttaagaaagtgctctatcaagtacaaggcgcccacatgcaatccacttccaggatggcatgacagcacaatttggtacagttaaaaatgaaagtaagctaaataaccaatcacagggtgttaaataaattatgaaacatccrtaagccaggctactgcatatccaataaaagtcatgtctaaggatgtggcacaatgcatacgctggtgcataaaaaggcatatcccactacaacacatgcagtgtgacgcaatccaaactttagtaacatttgtacgctgtaggcataaaaacaaactagaaagctgggcgcggtggcttacgcctgcaatcccagcacttcaggaggccaaggtgggaggactgctacagcccaggagttcaagaccaacctgggcaacatagggagcccctgtctcctaagaaaaaaagaaattagaaggactgataaaacataaataatagttaattatgcaatagaaatatacattttttattttatttatttattaaattgagacagggtctcactctgtcatccaggctgsggtacagtgctgtgatctcagctcattgcagcctccaactcccaggctcaagagattttcctacctcagcctcctgagcagctgggaccacaggtgcacaccatctcacccagctaattttttgtatttttggtggagacggggttttgccttgttgcccaggctggtcctgaactcctgcactcaagcgatctgcccaccttggcctaccaaagtgttgggattaccggcgtgagccaccacgccgtccaaatttttaatttctttatactttattttcaacactgaccatgtataccttttataatctcaaaaaattataaaaccatacatacatgtaagccatcattgttattaatgtaaacaaccctgaaacagtatgatttccagaagtttacattgtaagagtmcttcattcttctgtctcatcatttgaacaacatatggcaggacagataatacattcggtcaacaaattactatttggctctttaacacagctatgaaaacagagagctaagccctccctctattttctacccttaacggggactgtgtaaatctcaggctacgttgtcacagctgagttacaaattcctaakaaatgggatcttagtcatcaaaaataacaaaaaaaaaaagcagactggtttcattaacataaataaaagttgagaaacaaaatacataacctggaaacatggatgggaaacacgagcagcaaattccttttcctgcctttacttttatgatcctattgataccgatgagatttgggatttcgagatatttttccttccctttttcattaaacacaaaacaagtgtacatctagatttctggacagcaatgcacttttctaaaacatttacaaaataaagcaactatttttaacgtgagccatttttctttaagtgaactgtatcggaagcagcctggccatgtttttcagtasragcacgttagtgcaatgaaataattcacaaaaagtggctttaccttctcatggcactttactcagtaattggtatttagcagcctttgccagttcaccattaaaaatggattcttttactgatcacaacaccttgagagayggcgtctcggctctgcccacaaaaatcttccttctgttttctttttctatcagttcgaagcatctcacccatccacaggccttcagtctcacacacactaacaaagtaaaggcaatagggtctcaggacaaattttaaacactgcaatgagtttatcttcaagggccaagagcattatgagaaagaaaatattttcttttctaaaagcagaggagaaaggtagctggcaagttcagcctgtgagacagtttgtttcaaaggaagggttaatatctttcctcacatccagccatgagccacaccaaagagctcctcacggcgtgagatgggaagacatttcacttgatgttgctcaaatccaacttttaaattgcccttcagaggaatctctaggcagacaagccgaccttctacagggagatcaaagagaagtgcaatcagagtggccaggccctttcatctggacggacaacaccagcaccgggtacctgttgctcctaagggggagatgttgagagagctgcatattaaccaagcaccttgggtgcccggagcacgcaggtggacgcggctggccagccacagactggagacgcacgcgattaaccagacaaagaacacasctgcagaacaactgtccaggccctctcaccgcttccacctgacgttcttttacaagttcatcactccacgggcagatccgtgtgtgtgagggccttggcggctgacatgctatttaccttctctgtgaaaagaacaaatcactttgcatatttgttccaataaactgtgttttccttttcaactttctgggtaattctgtgctcactaggagggatgggttgggttattccggaaaagtccaggaaacacacctccacccagcttgccataccttccctatgtcccatcagtgaaaacctgcactgtggttttgatggatggggaaacatcctcttgggattaagctgagatcatgaatgtgttttatctgtgagcaatggcagaaacgtggagcaacccttacacaggtttatgcatgcaaagaatgattaattctcagtgatcctaaagatcctaaagatgatcaacgcgaaggtgccgaggtggcatcactcacacacagtgccagtcaccaggtacgctgcttaactgttccatccttccaaagtgagctaagacyccatcccacgcttcaccagaataaagcttgagggaaaattcaaatgtctaaggtttaaragtagccacagacagcctatgatgtgaaatgtactaccacggacaatgaaatattmtatgatacactcatacaatacacacagcacatccccagtgtgtctgtttgtgtagaggtagcactgaaatttctagtacagagatatcgcarccaatactcatgcagatatttccgtaatctgaaatcatgcagtactaagggtttataaggcatgtttcatatagaagcatcaagtggtccatatgatgccaaattatttacagtatcttgaaaagaatacgagccactcacaagggaagacctaatgccacagacctggggaaggtaaaatggcggtgtagaccatygccgcctggcagggcgctggtgggacctgctccagctgggaaggctgcatgcagggcaaggctgacgtgtgctgtgtgctgcaggagaggtgtcaggaagagcccttcccacatgggttcccccgggagtggcgctgggagtgggcgggaagagagctcttgctgtctttgagtttcaatggctgttgctgctgcttgcaaggaaggaaggaaggggataagctcctggttccacccttttttctgtctcgtgaaaaaccagaatcttcagaagcaagggaagargggtgaagtcagcttaaatctgactttgaattcaagttcaagtattttaacagccccgtgagggccagctttattccagccaacgctcccagcagtctgagctctacttgtctcttggcacccacagttmcagatgcgtttgagcccaacacgcagtgcctccttcatcgacacgaactgtggactcattgagttctttccccatgtaaaacccactggtttttgtactgggatgttttgccaaatgattctgttcaggggctgtgttccagaaaggtgagcacggagatgcacagaaagyaccacggggtcaatgccagggcagacacaggtaccaggactcaagaccagctcaaccaaagaaaggcagtgaccagcactgcccagcgaccgagcgatccaccagccctaccttccacaaaacgccctgcttcaaaccagagcaaaacgtgaaacatgtcgggaaacatttgctcactggaacttcttcctagtgtttttccactttttccaaaacatgtatgataaactcataaagcttttggaaaaataatttacatttagttcattccacagaagcaagttccatgaagttatggtttttgatgaacagaccagtgtaaaaaatgaaaagsaaggcggtatttctacaaaagcatcttcggtagaaaacaccccaaagcatctgaagctgcttttaggatgccgctcatctgcatggatgttaaaattcttcattaataggactaaaatgttacaattcttcattaataggactaaaatatatttatcaccagctagagttttaaacaccagccagacgcttccaaagtggcgtcattatcaagccacctctggttaataacttggaacaacaaaggctaactcaggacacaacagggaagacaatatcaacacaataaagcaggaatataatttactctcagctccttctcagaacataactcctggcccacaatcacactcacattacaaaattatttttgtatttttcttctagctatgggaataaaataagccacttagatgacagtcgagtgtctrtaaaatatataacagcaataattcccagtggaaacgtggcagatatttatacaagagccaaatatgaagcatggtggaaaaaggctaacatgagggtgtttatttttagaggccgcttccggatgaaatcatacggctgtgaggaaggaagtgttggtgaggaccctcagtgcacaggtctcatattcatcatgaagagtggagggcgaggggccagatgaagacatcacaaaaaaatacaggtctgcaccaggaacaccaaagtcactaccatcatacactcgggggcgaaaaactgaattcttcattgcaaaagctgcttttttctttctttcttttttttgagtagaggagggaagcagggaagagagggaggcatattctgttttctccttcaagtttctgtttttgttagactggttccagaaatcctagtctctccctggggaatcccagcttagtttagcctgtcaccatcttcaattaccagagtcacatatgttagactgatccacgtgagaaaaasagtmactggatacttttcaacccacgccctcatcccccagcacacccatcttcagcaactgaaggcttcctttgatatctcactttcaagttgagcttctaattacattaaaactgagccatagccaagggagacacacggcccacagcttttcttcttgcctgtgagcccacttgcgtgaagccttctgaaagccagcgtgagggacacggcgggtggcagctgcctccgtcccctcagaggcgggcagcacccatcactctccttgatctctgggtgcgctgggagcctgcccacgcttcttgcactatgtactctgctacygactcagatgagaagccttccctgcatctccttacaccagctccatagtcagtttataaaacaattcagttttgacttcactgggttaatattattggttctgaaaagagtaattatagtgcatcttaaaacaaaaaatctgttgctttacgtaaggcgcttcaccacggtgttawcagaggcagaaaatggcactgtccagyggaagtcaggctggtgtagcyggaaccggagcctgtcgtctccaacatagatttccacggagagcacggccctgggcatgcagaacagccaaggggatcctcccaaagagcacagcagagcaccctgccaaccctcagaaccttcccagctcaggcgtctccctgcaggtaggcggcagcaggcagaacaygccgcggggctcgggctggagccagctccagggcatcaggcctccctccagggagaaacattccaatcacccccgaaactcacacgtgctgccggaagctcaaggaagtctcaaaaagaactccmcaggcttcaccaatgctgttcacacgggtggtgttctgccagtgcttacgagacacgaataaattaatcccccaatgacccaaaatgcgggtgggatggagaaggwgaggcatgcgggtgggtggggactgatcacctggagcacggactattctactaaatgttcctgatcccccttcccacatgcttacacgcaggctgataaactccagtggctcttcccaagcgcggagcagttcctcaggatgaaaaagagcctagtccacctgtccataagtaacagtggctgcccygtyggcccagtacaaatcgccactctgcccaggaaggcagcctcaggttcccctaactggcaagcaaacatattctgcgccatcacgagctgaagggacatgtgggaatcagaaggaaaacttgtcttttctgggaagattctaatcaagactaaaatattggtggtaagttgaaaakaactgcaaatatcaaaaagggatttagagaaagaaatgggaaagatttagctggggaaaacttgaaggtagagcacttgaaaactcctgaaaacaagcaaccctgatcagtactggaagaaacatggagagaaaaccacaggtgcacaygtgtacacacacatacatgcatgmacacgcacacacacgtgtgcacactcgtatacacgctgtcatgtaagagaatttcctttatattcttactttgcagtgcattttcatcgtgaatggatgttgaaatttgtcaaatgctttttttggttactatgatcattatcatcataaagttcttttcttttcctctgtgaatgtggagaattacaccgattgatttttgaatggaataaaccccactggaaatatacatatttttctatattgtaaaattgacattctaatattttattaggattttaaaatttgggttcatgagagacattggtctgtggttaccatttctcaaacatccttgacacatcttggcatcttggtgtcatggttgtgttggtcttatgaaacaagctaggaattattctctcttctgctattccttgaaagggctaatataagattggaattacttcttccttaactatttgataaaactgaacagtgaagctgtatgggcctagatttttctttgagggaagatttttaattttcaatttttgatttctttagattaaattgttaagctctgacaaaaacttagctcattgtatctaaactgtcaaatttgtcaacataaagttttaaataacatcctcattatctttgaatatttgtagattctgtagtgatctttccttttcatttatattatttgtcatttcatttttcttcatcaggtttggctgggaattttraaaatttttacgactctttccaaggacataatttctgcctttgttaacatctctgtaataccattttctgctttgctgatatctgatcttatytttactgttccttcctacttttcttaatatctactttgtcacgtttacatagccrcttcatgtgggtgcctgccctgcacggtgcatctcttaggctatgtttaaggtgtgccgccttagtctatggttgcacaccatgttcccacagtgagaccatctctgattttcatctgagtctccactgggtccactgacttccgaagtcctcgccgccgcrctgggcatgctgaccatcctacgagttatgtcctgcttgcctcacctgttattcatcctttcgtttccctcctctgccttcycttggataaatcaggtatgtttgctatttcgtgtcttccctgtgtaggtttcttggccctccatttctgttttgttttcatggattggggatgtagagattacaatctattcccytaatgtatccctatttcgagtatgaatacataatccctttacagcaggaaagcctccccaccctttctcatctgactttattttactgtaggccaatgtctctgtcctccaaagacacacggcccggggtccaacaggctgcaggaacttcagtgcctgctatctgcttttcttcagtgggccccactcccaaagctayaccatgagatggaaactgtccccgggggagcaggaccatccccaggkctgccaggaaatctgccgtgagtgaggtgcacaaaccctgggcacagtccayaaacccagtcaatcttaaaactgattaataattgttggcacaaaatgtcccagtgtgtgaaatcctggataaaaggaaaaggaactgatgggcaagaagattcgcgcaggcgctgagcgtgttgcctcaccaaggcagggggcctggaggccccatcgaactcagacaggtggacggtgctgcagggtacacatgggaagacccctgcacggggctagcagggagagggtgtctccaagcccttgggaagggcacaggcaatcgccttggctgagatggcagaatggcatgcgttcaagttgtttcttgaggaagagggtgtggggtctacattctcccctagtatacaaatgsagatacctgtttgaaaggttatatagattaggctgggcacagtggcttatgcctgtaatcctaactcctttggaggccaaggcaggaagactgcttgagaccaggagttggtgactagtctgggcaacatagcaagacttgtcctttcaaaaaaattagccaggcgtggtggtgcacgtatgtagtcccagctacttgggaggctgaggtgggagggatcacttgaggctacagcaagctatgattgcaccactgtactccatcctgggcaaaacagcgagactctataactaaagttatatatatacatacatatatatatacttaaaaaggttatatatatgttagaaactgaaaagaaagcaatgcatgccaggcacgggctgatctacttcctaattctggatggtggctggtccagtgcattgggaactggccatatccccccaactccaaactccatcagctggcatgtgcagaccagagccccagcctccttcctaccacttggcatcttccccaacttggtatccccrctgaactgctgctcagcgcggctcagggagcaccaggtctgaacagactcctggcaaacttgtctgttcacagtgatgtgactgggtgttttgtgtcttctcttcataactagactgtatgctcctaagcgcaagggcttcattgtaaactttgcttatatctgcaaggcactaatcagttatgcaccctacagcaccctacactacgcagagtaatcagccactaaggagtagtgaaggatctgacamccagagagctcggtaaggacgatgccatccggctggctcctctgcaggtggccacagattgagcagcagagattaggaacagaattcagagacataagtcattcatctagggctgtatgctcggcccacgtagatcctgccagccaacgaaacggggctccatgcattccacaagtcagagtcactcaacattccaggggctactcaaatctcctttagccatgtgacgaagcccctcaactcactaactctaaatactttctttttttttttacaggccatttattgaaagtcaggattacatttattcacaatatcatattcttaatgagagcatatcaaaccttatttggatgcaatccagaacttatttaaacagttaagcacatatacacaaaacataaaacaaagaaagaaagccatgtaatgttattggacactaaagataaattagctttctgagatcagcaattgataactgaagtctgctgatagttaaccatacctctgtgtacacttaaaagctaacctcacctatgtgaagtcatactgaattcaaagaggaaagatgagatacttacatgattcartaccgtgtaaactagaccgcatcaggttccagcacagatcatkccactgacagcttacaataccacaatttaatttcaagacaaacactccagatttcaaatttgagatgaatatatgtgatctgagaattacttccagagctttcaaagtggaaycgtatctctgcttaaacaccaaaacatggctaaaaactgatgcgaagrtragaaaatctctcacactgtggggagatcagagtaagggcaacatactgctaatcattcgattcaggtcataccaatcagcatcttatccttgagatcaggtattccgtctcaaagcaaaattaatgaataaaccagaaatcttttatcgccttctgttgtgaaacagttatccactccagaggaagaaacaggaggaaattaagcaagtctatgccataaaccactgctcctaatcaaaagatgtaaaacaaacaccrttctgtgatacaatcaattgctactctttagatggataatgaataaataaaatgactcataaatagtcatctctatattaccttctgtcttcctctcttaatagttaacaaattctaagagttagatggatagctctacttacatgcaggatgactcaccaaattcacagtgattcaacattttctaattgaaattaggcacatggggatggctttttaatgtccacactatttttgaaaagcaaattcgataggaaaggyggcaaggatgttcaacaaacaatcaaagtacatttcacttacagctctgctgataacagctggagcatcatacttccaaagagatcccaaattcaaccacttcttaacacctccgctccttcctgttccaagcaaycatgcactgctcaccatggaaccatttcaacagcctcgcattcatctacccactcgtgcgtccctgttccccatcctttccaattactgtccacaaggtagcayagatctgatgaagggcattaaacccccctgcgccctttcaacatatttagaacatcaaaatgcgtacrtgaaaagagtactttctcactttcaatttcaattctaaatgattatttctcgacaaatgactgtttaaaggaaaaagtcacaaccatgtatttgagagtctataacatgtagaagtaagatcaatggccgtgtacatgggacttcaaggggcaaatggaagttcactgtggtgaaggtcttgcattgcatgtgacgtcacagaacaccattttcaatgtagatcatgagaagttaacaataatattagaaaccctacagtcaccctgcccagtgtggtagcaggtatccccaagtggctatttatatttaaattatttaaaattaaacgtaattgcatacccagttccttcagttgcccgagtcacatgtcaagtgctcaacagctacaggtggccagtgcctgccatactggacagtgtggatacagcgcattccatcatttctggaatttctaacaaaaagtactgtactaaacaaactacttaaaaaaaggtagcactaataacgcaatagtaattataaaatgaaatcaaaaaaggattcaatccaaaagaaggcagggaattaggaaaacaggaatgaagaataaaaagtacaaatgaaaaaatcagcaaaacggcagactaaacccatacctattgatgagtacattaactaaaacatttcaaataaaaagtacagacttgcatactggatcactatatccyggttccaagaaacacactataaatataaagaaatagatcaaaagcaaaaggatggaaaagagtataacacatgcataggcaaatcacaagaaagctagcaatattaatatcaaagtaacttcagagtaagaaaaatggctggagataaagagtacatttcatactgttaaggagccagcacatcaggaggacgtcatgatctcatgtgattaggcacctactagcaaatgtacagaaggcacaaggcaagagttgacagaaccaaaggggaaaagagacaaatccataattcgagttgcagacttcgacactcctttctcgactgattgaacagggagacaaagtcagaagatagggaagacctgcacaacacgccaaaacaacctgacccaacgtacatttatagaagactgcacacaatggcagggtatattctcgcaaatgcacatggaacagtgtaatcaccatttacaataattacagtacataaatatttaacagagtgatattaaaaaacaatccctatcaaaacatgtagaatgctgcttaagcactgcttagaagttaatgtctagttttgaatacttatattacttaacaaacaaagtttcctatcaatgaccaatcttagaaaggatcatgaacggcctccaatgtctctgtcctccaaagacacacagcctggggtctgtcaggctgacatagttaaccctacagggaaatttagtgcctgctatctgcttttcttcagtgggacccactgcttctatcttagaaagtagaaagagagtaaaatacacaaaataacaaaaaaataaaaatcaataaaatacagaactgagaaaatgaataaacctgtaacaagactgatttagaaggtgggaagtaccattccaggaatggaaaaaagggcagtggaatagcatcatcatggcgtgccctagagacctgagagggataactggataagagaagattacgaacaattaatgccaataaactcaaccacttagataaaacaaactctttgaaagacagataaccaaaactgagtcatgaagaaattcaaaatcttaatagtattgcatatattttttaaattaagtaataaccttcccacaaagaaaattccaggcccagatgtttttaaacacttaaataaaaaaaataccaatcctaaacaattttaaaaagcagtacaagagagaatacatcagttcattttatgaagccagcattaccccgataataaagcctaaaaaagacaaaatgtgaaaactgcagaccagtatcccgtaattcgtaaaatattagcaaatataaccagcattatttgtatatttattatttctatgtatatagaaataatgctggaattatacacatatatatacagagagatgtatgcatgcrtttctcaaagcaagtggcacttatcaaagacaagcaaggtttgttgagcattagaaaatcaattactgcatttctccatatgatcagaataaaagacagaaaccacataaacattacaacagatgcaaaaaggcacctgacaaaatgacacacccttcygtaataaaactctcagcctacaagaatagaacttcaatgggaatttacaagaatgtgtatttatatttaacaktaaaatactgagtgcttcacccctaagattaggaacagaggatgtttacttccccaactcctgttgaatgcagtatggagaccctagccagtacaataaagtaagaaaaagaaactaacagcatacatagtataaaggaagaaacaaaactgtcttcattctcaaacaagatattcacgtacatggaagatactaaagaatccttgggcaactagaactagaataaatttgttcagcaaactcacagcatactagacaaatttacagaaagctcctgtaattctcatcattagcaaagaaatactgggaattgaaactwwraatatagcatttttaaaggacaaaacaaaaacacatgaaaaacttatggataaatttatgtggaatatatttaaaagatttgtataccaaaaaattacaaaaccatgttgagatgtatcaaagaaaacaaatatggagctatacgccacaatcaaagatcaagactcaaaactgtgaaatatctctgcaaatagatctatagattgaatgcagttgaatgaaaatcacaggtttttctatactaattaatccacttattctacatggaaatgcaaaggactaagaagagccaaaacaattgtggaaaaaacaacgaaatttggagaacttctacaagacaccaagacttactacagagccacagcaatgaagtcggggccatgttggcatgargacaagcagaaaaatggatagaacagagtccagaaacagagctgtgcatacatggtcatttgtcaaaaggtacaacatctatcgtaaggcttggcacttgccagcactctaaactttgatcagctgaaattatgtctcaggtaaataatggatagaaatccaacttaaaaagaaaatcctttttaaaaaaagttttctagggataccaaagaagttctagaaactttaaaaagtaaatctagtttcttttccttttccatcccaaggggcctggctctatctctggtgcaaattgggcattctgagaaatttcagagatgcctccaggccaagaatcccggagacagtggtgcagcccacacaggaggcctcttcacacccaggagggtatatggcaggaggggtcctcacagcaagttcatgggctggagggggtaaactctcccatcctttggctcctcccatgtggcccgtcccagtgccggaaggctgggtgcttgcataagaagcacactttgcagactatgcatcccccaaaggtctaatacccagaaaccataaagaacttaaacaaattaacaagcaaaaaacaatcaactctgtaaaaaaaaagtgggcaaaggacatgaacaaacacttttcaaaagaagacatacatatggccaacaagcatatgaaaaaaatgctcaacatcactaatcattagagaaatgcaaatcaaaaccacartgagacaccatctcacactagtcagaatggtttttattaaaaagtcaaaaaataacagatgccggtgaggctgtagagaaaacggaatgcttatacgctcttggtgggaatgtaaattagttcagccactgtggaaagcagtttggtgacttctcaaagaacttaaaacacaattactgttcaatccacaatcctattattgggcacacacccaaaggaatataaacggttctaccataaagatacatgcacgcgtatattcactgcagcactattcataatagtaaagacatggactaaacctaaaggcccatcaataggagactggataaagaacatgtggtaaatatacaccacagaatactatgcagccataataaaagaatgagatcatttgcatccatgttgtcctttgcagcaacatggatgtgttctcacttagaggtgggtgctaaccactgagtacacatggccacaaagaagggaacagcagacaacggtgcctacttgagggtgggaggagggtgaggattgaagacctacctattgggtactatgcttatcatgtgcttatcatgtggatgaagaaataatccacacacaaaacccctgtgataggcaagttacctatacaacaaacatgcacatgtacccctgaatctaaaaaacaagttacataataaaagagcatggttgactttatgaatttgctcaataaaggggcagaagctcagagtctgggctcgtcaagcgagtgaccatgaccacctcctcgggggaggaggtggagaatgaagagcacactcccaggcccctctcccacctcaccgctatctgcaagtagaaaggagacagtggggcatgttctttcctggaacactcactagagaatatcacaaagaaaacagaggttccccaggctctaacctgtagagatccacttctgtctagttaacaaggtgactctcgaagatgtctcaaacaggattctagatgtctcctggtttagtgttacctggttaaggagggcaaaggtgccagtgagggcccttagaggagagcatggaggaggacagggcaccagagaggtaatccaggggcctggccggccaatggggggcctgggaggatggcgggaggaggattccagtgagcccttgttgggaatttgcaggccctggcactaagaaagccctgtctaccattccagctccagggcacagcttctatgccctcgcttccccttcagcaccacatggctgcctcctgctctgggatcctgagaccacctggaggcgaccagcactggccttcctgcctgggcggcctctccggctctgcatcttcacgatgagcatcgcagctcccctgagcctgcagctttcaagattcctaagcaccgtggcatgcgtgtggcatgtatgtaggagtatgtgagccaggtgggagcctccgytctccaatccaatcgccgctccctctgctcagtgctcttgtttgcagggctgaycctgtggtgcccacaccctgcctttcagagaacacgtctgtgccctggcttgctttcctaactgccaaagaactccaccacagtctgcccttcatgttgcaaacttctacacatacgatcagaggatgggcaaagacccaccccacccccatctgcaaaccaaagattcctcttcaacacccaacagcagaagcctcccttgctccccagcttggggaaggagccacattactgagacccattcwtcctggtcccactgccacaccccctgccgtgggcagctcttcttatacctggacccttcctgtctctcccctcagtccctttatggttgaggcctccctcacactaaggatcctatcctctaatgcccaggccatgttctcacagggatgagtgccacttggtatatggtgcccagagacacagatgcacccagcccacacccgcacggcagcctcagcagagatgctctcatccacgccaaccaaaaccttaaaaattccaccacgctgcatccctgagatgtggacaccgcctgcactggggcagagggtgaggaatgttccggatgaggcaggaatatgcttggttgaagcagattcagaagtcctaaggagaggagctggggacagctcccaacatacagacttctgcccggcgccgtcagatgactctggagatgatctgcagaagatccactttaaggctcagagatctgagtraaataaccaccctcacccctacccaagaggaaaacacagtgagaaggaaaagaacgaggccgtggtcctgggtgctgtccagcgcagcccacacctcaccagggaggcgtctgcccaagcaggggcacgtcaggggaggcggcggcaagggctcttcctcacccacagtcccttcctttgacaattaaaatcaaaacaaacctaatttctagacattagaaacaactggaaatgactttcacttaaaatcacagctgcccaatataggcatctcactccatatgatggaaaatgtagcttatgctgagagccaagaaacaaccattttcccccttttctccactgcacctccccacccctcaaaattccacaaatccctactcaactgaaagcattaaaaattcacttcaaaaataagctttaagataggaaaaacaaaaaacaaaaaccaatgtgagccaggaatgtaaatacagtactgggaatatgcaaaatgctttgcaaaagctgacgagggagckctcggcacccacacattttaaagatgggagcctacagtgctgggcctgaaatgaacaacatactgaagtctggtgtcaatttaaatgcattgaacaccasaaaaatgcccccaaccaaggcttcaaacttgtacagcacatttccactcaagccaactagattgcctgtcacatctgacatggctcgtcaaaagtcatccttcactgctcatgggcaacatcgaggtcaagagaccaagtgcaatggtccagcccatccccgtttcttccttcagagcagcagatattgaactctaaaatgacaagacggagcagcttgaaacggctgccaaagaagcgaaagctgtccaaggccgctgatctgaaggagaaaaaccagccgccgagcacgtgtcagggccaggarcacactctgayagtctcacacaaagaagtcatagcgagcacagggacgtccgcggacctcaggttgtggcagcaaaaccagcgcaggctsggaaagcccacagacgatcactagcaaaccctagaccacgtgtcttagacggcatgtgacgatcaggtgtgggggaaacgggttttgctctaagaaaataggcttttaaagagcccatatccagcctgaggaaggaaggaccttttgacacgtgctacaacacggatggaccttgaggacatgatactccatgaaataagccagtcacaaaagacaatggctgtaccacttatgtgatgtagtcagactcatagagacagtagaagggtgggtgccagggctggggaagggggagtctgtgctcaatggggatggagtttccctgtgggaagatgaggggctctgaggatgggtggtggtgatggctgcacgacggtgtgaatgcactgacagctgctgagctggactcttaaaaatggtgaaggtgggaaattttatgtatattttaccataattttaaaaaccaaaatgcatgtccaccatgaattagccaagccatggcactgaccggccctttcagttgtgttccataggcacaaaaggcatccaggttgcaggtgggaggggggacctcaggcagacctgcgcttgcactgaggggtctcatgacactgcgtgacgctgggcagaggcgcccaaggcacagagggacaggacccatcagcctgcgccaccagcctcccgccaagactcctgtgtgcatcccaggaagggaggctcatttaaatggtaaatgttttagacctttttattaaaacactggtattttatcaagttgcgttaaaaaacagaccagatagatgatgaacctttgatgacacagcatattttgagggtcagcccaactacaccccagactccagggaggggtggggacagagacctcccgacagactagggtcctacagggcaagtcagatgagggcttcccctgtctgtgacaaaacaatctagaaactcgaggaaaggggcaccatttccttccggcccaaatcactgaagcccacctaagtgcccggaccaagcatgtgatattcaaatcacaggcaaaatgtggatcaaggacgcttcccgtctttgctttcattttaatcactggacagcaaagagcacttgcatctcttggattccttcacagtgactctcttggttttattctgcatagcaggcctcagagaccatctcttccctggtggatccaagatactaaagaagattctacttgtacttgaattttccaaaacagaccctttaggccctggctaattaccctggacctgatattccaatacagcttggagcatggcttccctatcccagagtgaacaggaatgaataatggaaataatgttttagacaggccagcaccttaggaggtctgtgtagtgggtctgaactcggctataacatggtgagtaactgatttaagcaaggaccaaacaatgttacaggatgtcaccgcagctgtgaccagaagcacatggggacagagtctcactgctcaggaaggacgggcagagtccacattgggcgagggggacggaagaggcagagcctgtttaaagaaataaaaatacctctttaaatattttacagagatgccgaaacgaagacctcccttaacaagatgacatgtttcgtttttctctggaaccacctgtaacatcctatcaaacagtgccctggttaagtgctgcctcgcctatggttcaaaggtggaagtcactagctaggctttaggaggagcacagtttcttccggtaattgttcctatttatatggggtcactgccagcaaggctgtggggaaagaagacactggacggcccaagccctgcattaactcacttcatgtcctcacgtgcaacaactaacattcccgggtataaaactaggtaatgataaaatattttaattcaagactttgtaaaccaaatataaaattctaaccccaaccatcaaatggacttcctccgcagccagggctctttcaaaatgtaacctgagagactgtttcaggcatgacgggaagtgggggttggatatgcttcgctatacctctccggcactaacatccacacagacttgaagtctgataagaaacattttacaagttattctctctgaagcctgctacctgaaggcttcctccacaaataagaacttgcatctccacaatcctttatcttaacccagacattcctttctattgatctcaggtctttagagaaactcaaccaattatcaaccaggagatttttaaatctacctataagctggaagtcccctggacttcaaggtgtcccgcctttctggaccaaaccaatgtatttcttaatgtatttgattgatgtctcatgtctccctaaatgtataaaaccaagctgcaccccgaccaccttaggcacatgttctcaggatctcctgagggctgtgtcactggccatggtcactcatatttggctcagaataaatccctataagtattttacagagtttgactctttccattgacaactgaaattctgggtacttgcccaggccttgtttcaggaccagtgcatcacaccccagctctaggagctcagaggcaggtgcatacttcaccgctgctctcgagggaggagcatctcatccaaggttatggcccccccagagcgcacccgggagccaagacttaggcccccggcctcaatttgggatgactctacaggtcattctctctccagagttccctgcaggacaggatgagacctcaactgcaactaggtcataatgcaagcccctgcttctcccttgcccgatcctgcagtatgcacttccttacagagtgtatcctgggaatactccctgatatggtttggctctgtgtccacacccaaactgcatgttgacttgtgatcttcagtcttggagaagggtcctggtaggaggtgactggatcacaggggcagatttcccccttgctattctcatgatagtgagtgagttctcaagagatctggttgtttgaaagtgtgtggcacctcccccttcactctctctcttcttcctgctccatccatgaggatgtgtttgcttccccctttgctttcggccatgattgtaagtttcctgaggcctctccagaagcagaagtctgtccagcccagataactctgagttaattaaacctctttctttcataaattacccagtctcagatgctaatagcagtgtgagaatgaatgaatacactccccaacagccacctgcacacaattctgcttctgagtctatttccaggcctcctctactccctaggagttgatgtgttctttcatcctgtgcaccataaaaactgcaaaatagaacatacataaaggctgaaataccaaagtttaagccagaattagaggcatagttaactactgcccatcatcctgttggctggaactttcacttttgttcatttattcattcaagtatctcacgagaacatactttgtgctagacactgttgtaggctctagggatacagcagtgggccaaacagagataggctctgtcttaagggagggtgcattccagtcagggacagaggcaaatgaatgcactatatcctagatgagggctttgcaaacttttgcctaatgagccagatattacacacattttagatttgcaggtcagactttattgcaactattcaactctgccatcatagggaaaacagccataagaaatcaagtctttataagtgtgttccaataaaattgtatttgcaaaacaggtggccagcctgagagccatggttggccaacccctgttttagttggtaaaaaatagagcaaggaaaaagtccagaagtgctatgaggggcatgaggaatcgctattgcatatggacggagagctgaagaaaacaaggggccagccatgtgcagggtgggggctcaagtgttccaggcacatgccaaggccctggggtggggcatacttggcaagttccagaacagcaaggagggcagcatggctggagcacagtggtttggcaaactggaggagaggagtttagagagaaagggttgagggttgacttgcagatgacatgggcctgacaggctattttgaagcctttgccattaatacaatgacagtgataccgccaaagaataaggtgcaattgttagaatatgatagtgtctcaaaaaatcaataaattctaatgataaaaatattttcaaatattctaagtatttgaaaaatcctaactcaaatattgaatatctgctatctttgactgggatatttaataatagaccaaagcatactccaaaataatccaaacaatagtttaccatatatcaaaatacctccaaagcaaaaactctcagtgtctgcctaaagctttctattcatctcctttgcttttcaacagcaaaatccaaactgcacagacgtcactgggcatctcgatgcttctgcacttccaccctcctttctgctgccaagctcccgggcctttttctaaaggccctgctcagccaacgcctccaccattgccgcctgcctcccgtggtggtgtccccccaggtgaaatctccgcactgctcctcctcctctgcaccattcctcctcctgctcttccgctctcctgcaacacttcctacagtgttcagggaagcgcttccagcctcccacctcagagagctctgagcaaagaagcaccaggtcttactcatcctgctcccgaatggaagtatcagctttaagtcccaaacctaatgtaccaggtgctcatttcatcatctcccagcaccagagtttgcaaagaagtgggttatgccccacagagctgctaagccagcgctgctgtgagttcctcttcaccttgggtggcaacacctaccgcctagggttaccccagcaaacctccaccatccagcctccagggactccagatggggccagagatttcacttctaccatccagcctccaggggctccagatggggccagagattccacctctatcatccggatggggccagagattccacctccatcatccggatggggccagagactccacttctaccacccagcctccaggggctccagatcgggccaacgattccagttctaccatccagcctccagggactccagatggggccagagattccactgaggagggaaaggtgtggtgagaaaggctgtagacaacctcctttcctgtgctacagcccccactggactctcaggatcatgtccacctgtgccatcactgtggccacaggcactgcccctccctgcatcacctgttcaagccactgagcccggacctgcccaggagaggcccagcagcagtaagagaggagagaaggctttgtctccatgccaccgccggcaggtgacatgagagagcaggccccgacagggacacagtgtactgcgtaagcatgctttacttcacttaaatcaactgctacatctcattctaaaccaatagcaaaggaaaaaataaaagtcaccacactccgcattcagcccgggagatgaaagggagtggccaaggcggacggggcctcagctggggagcacgcgctgggcctcctgcccctgggcagaaagttcctggactgtcactccacatctcccctcccaaagaaatcaccaaaagcagctgagacaattattgtacttagaaattattttttaaggaataacataaagaaatgggcaagaaggtgaaggaatagactattaaatagaaaaactaaatcgaagagcgtataattatacgcagagagattatgccttattttaatataaataaaactttttaagcgtaagataaaaagccatgcctcaatacaccagttttccaacagaatacattcaattcaaatgattctcataatctcaaaacaaggttgtttgctttattttagaagcctgattacttatagatttacagtgggtgaaagtggaaaggttcagtacatcttgtaatgagaaatctggccccaccgacgcagctgc

SEQ ID NO: 96654 - DNA, 17116 bp, Homo sapiens
gctcatggccaccccaccctcaagaagccttgtgcgacatacggcctcatgagacaggtgagccccagcgcaggtgccatgcccatgtgtgacgccgtgacacccttcctcccgtgaacagtaaagcagactggcgatccagcactgggcagccaaaaggtaaaccgaggtagagaaagttgccagagccatcaaatgagccccaagcacgtgtcagtcatgtggcaactgaggacacaggaggggcacagtgcagggaggccacagaacagaggtgaggtggggcagggaggcgacagaaagattcacgatgtgctctggggagcctgtgctgggctgcgtgtttcctcctaacacccacccatcccattactagaaatgagctaagggggcccgtgccctctggccaaagaggaccacaggacctctgaggtccattcagaagactgcccctcgctgtccaggagccatgggcggagcaccagaaacccccaagcggagctccagctatgacctctcctcccattctaaggtgtccctaaggccttcttctaccctctgtgctcacatggccagtcttacctggagaagctggagtgggagggacggatgcgcagacagctgactgctggacaccagtttgtttccattggagccccaccaccaaccgcactcggggtagaactgtcgacattgctaaccccaatattctataagagttggtatttacattttgatgctgcataaattctcaaaggtctccactttcaccgatggcggatttccatttctgctatgagtgcacataacattagcgacccataagctaacgacaaaaacctggctgagtttccaaagggaaggagatgagcaggtgccaagaataccgctccttccatctcattagaaacaagaaatactgggcctgaatctgtaaaatgttattggtggtgggggctggggtgggggaaagctgttttcccaagctgcttcgtattgattcagctttttattaaaattaatctgataaaagtttgaagtagatttccattgaagaggaattctttacagtattgggaaagggaaggcaacgtgctacacggttttgattctgcttctatagcagctcacctgggtccagccagtgtctcacctgttcatcacacagctctcccatctgctttctggaaacaccatgccgggtaagaggagggacacacctgtatcccttcaccccaccccacgccactgtgatatcagcacgcccccggccccactaactcttccttgctctgctcagccatgcacgtttcactgaggcagccactgcctctagaaagaattccctatttggtgatttcaattatgaatgtgctcctctgtggcaacacgtttctaacagcaaagctgatgtgggtcgtgatgagatcttgcccaccatacagacatcaaagacagaaagggcctgggctattggctggaacttcaaatggagcaataaaaatagcaagaggggctgggaagagacgaacttacaataaaatatttaaagaactaatataaaaactgtcatgagctcttccttggacgtttaagctgggaaccagcacagagtgaggctgctcacacccaaacctgtagacaccacatacagagttcaagttcaaagactgcgtttagatcctgttccctggatgatcaccgtctcattaattaaaataaaataaaataaaaaataaaacagacccttcacagaaagactgttttgctcttttcccttgctgtggatttctcagtagcaggcagagacatttaaatgtgaatttgaagactgcacctctgttagaggctgtcatcaacatgggtaactactcccgctaagtaaacctgcttttacagtccacaggcccacctgtatgcaggccacgctagctttcttcccttgaggtcataccacttacaggatgcctcaagacgtcaaggtcacaaactctggcatggccacattcaaaggtccataacccagagccagagcccaaatctgcaggcagaaactgccccgcgctcagccaggaagggataaatatccgcaatacactctgtatctaggggactggagcttccactaaagcaccaactttcccattaaagagccagctgaaacatgtgctatcaagtaatgagacaggacacgtgctatcaagtaatgagacaggaccctcaccccaaggactctgcactgtatctaaggagcactgcccttcaacggggccttgcggaaatcccccaaatctgggaacaccacaagtggagtccccaaccccacactccgccctgtgctcaccacctcctggctggactgtgggctcccagggccgcagctgctgctcctgacggggccttggcgagtggggaagcagcagctgtgggtcccgcctgtcctgcacacgtgtcctctcagacgagacaccaggctgcactgtgcctgcaggtggatctgctgctgctggacagtcagcacacgtctctcaatcccctgaactgtgccctccttcctgcccccagccactgcaggaagctgaggagcggagaaggggcagaccccaaccctttctctcaggtcccatctgtctgctgggtactggttagagtccaatgacccccaatacctgacacagcttccggaaaatctgcatgggcccagcttctgtcagtcctgatgctgacagcaagaggggcaaggccatctccgggtggggcatgctcactgtgttaggccatctgagctgccataacaaaatcctatagactgcgtggctcataaacaacagacatttctttctcacagttgtggaggccaggaagtctaagaccaaggcgccggcagattcagtgcctggtgaggccccacttcctcgcagatggcgccttcctgctgcatcctcaatcgtcgagggctctacctctttggagtctctttcataagggcactaacctaatctccccccaaaggccccaactcttaataccaacaacttacgggcgaggtttcaacatgaattttgtgggagaacaaacatttggaccatagtactcactgtatgcaaaaaagcaagaaggaatcagactgaactaggagaaattatagtggtttaaatgaaaatataatgtttaatatagaaaaatcatttggccaaattatttgatttgaaatacttctaatatacacggggaaagatatacataaaatccacatttatacatggaatctatgtttcaataaaaacaaaagactacaataaaaataaatgacacaatgacaaagtattgtgcattgttcttccttggaaataggaattattacaaaattatatgtaaacaatacccaatctttgttcaaataattgattgatataattgtatctctctcatattgatatattctcactatcacgaggaaaacctctattgtatatttcaaacacgaacaaaaatataaaactttgtgaatgttattacaaaattcagcaggtacattttatctaaattgcagcagaatgaattcttcaaacaacattcacagatgaaaatctcagagatctgcagtgttcatttcaaaggtagcctgaattagaggaaaaatgctggttgtcaagaatgaaaaagctttgataattaactacttctttaaactctaagaacctaacctattagcaagcaaactcacattaagtatctgtttgtaaacgttttttagagaaaagatactgccattttctccacttctacgactacccacaggacttactgcacactgactgtaactggggctcagccgtggagtttggaagcctctgtccgcaatgaagaaaagacgctccaacatcctcatgaaggtcacagcaagagtgtgataaaactcactgcatcatggccttcccttgttttacaacaacctttagaaagtcaagacattctagttctccttgttttccgatgctgaacaccaaggccaggataaagtgtcaagaactgccttggtggtccccgaggctctgaagaggagccgcggggtcacgtttcctgccacacccctgcactcctagacctggcactgtggattctgggcctcctgctctgagctgctgctccagacacctgccagcagccaggggtcgccggtggtgccaaataaccaggtgtgtcagaggtaacgtcccagacactccttttgtttaaatgttaggaaatatatttttattgtggcaaaatgcaatatttatgttaactattttgtaagtgtgtaattcagtggcattaaatacattcacaaagttgtgtatccatcacctctatctatagccaaaattttctcattaacctcagcaaaagctatgtccccatttaacaatagctctccccaccccccagcacccactattctacttgatctctgaatctgcctgttctgggtgcctcatgtctgtggacccatatagtacttgtccttttgtgactggcttatatcactcagcgtaatgtctttaaagtttgtccatgttgcagcatgtgccagaattcccaccctttctaaggctgaataatgttccattgcatggataggccacatttaatgtatctgttcactcacagatagacgtttgtgtgtgttctccttttggccactgtgaatgatgctgctatgaacaccagtgtacaaatatctactcaagaccctgctttcaattttggggggtatgtccttaggggtagaattgctgggccacatgggaattctatgcttcatgttttcaggaacctccagaagtgtcccacagcagctgctccatttcacattcccaccagcaacacacagggttccaatttctccacatcctcaccaacacttatcataaacgttatcaaatatacttatattcaaggcactgaacggcacagactacaattcaacaactgcttcacgcatcgctaagccacaactcaactcagaaacacttaatagtaagagttgtttagtgacattgatggtacttccttcatgccaggcactcactttcctcttctctaatccttacaagagccctgcaaatgagacacggtccattcctctgatgatgaaagacccgaagctcaaaggcatgagaacgacccttccagagacctggtgtggggaagtcacagggaggctgtggtctgactctagggtgttgaacacgcctcaggtggtgagattagttgagacactagtttattaactatagatttaaattaacgtgtaacagaataaacaaaatgagcatagcaaacacttgttctcactgcaattccttaggaagaagttaaagcgggtgtttaaaaataagttgatataaagaaaacaagaagcaagcagtactacaggcagtccgcaaacaggtgaaactgatcgctgagggaatgacaactcaggtcaattaaagcagggatggctgccaacacctcgccgcctctaccccaccacgtgcgagggcagaatcagggcctgtttctttctgcgccccccatctccagcatcctgcatctgcagagcagacacttagcaaattgaattcactgccctttcttggccagccacacacccaggactgagccctgagctaggcggctttaaatcctcgacctggaaagaggacagccagactcagacctaaggaagagcagcagccagccttggggagaaggtaccacgagacagcgccattccctccacagcggccagtgctgggagcttgtgcaatgcggattccgatacagcaggagtgggtaggcccaggtgatgctgccagcccagacgccactttgcataggggggctctaggcctgcacagataaaactagtcccagctctaatgggatctagggctcttgttaacctattcagagctctgcccttagtatatgctaggcccctcatctgatccccaatagccctgggaaggtctcctcactaaaaaactgatggccaggtgaatatggctgtgttaaacaaaacacacaacccagaaccttggtgctggcttaacgcaactactttgggtgccatcagtgttctgaccatcaagaagctcactgcttaattcctggcatattcmaagatgtttcccattacaagaagcaygtggctgcrtctggtatacggggttcccatcacatgaagcaygtggctgcrtctggtatatggggttctcatcatgggaagcaccagrctgcatctggtatacgggttcccattacaggaagcacrtgtctgtgtctggctgcagatggtatacggggttctcatcacagaaagcacgtggctgcatctggtataccaggttcccatcacaggaagaatgtgcctgtgtctggtatacggggttcccatcacaggaagcacgtggctgcatctgatatacagggttcctactgcatgaagcacrtgcctgcatctaatataccgggttcccatcacatgaagcacgtgcctgcatctagtataccgggttcccatcacatgaagcacgtggctgagtctggtatatggggttcccatcatgggaagcaccaggctgcatctggtatacgggttcccattacaggaagcacgtgtctgtgtctggctgcggayggtatacagggttctcatcacggaaagcacgtggcrgcatctggtataccaggttcccatcacaggaagaatgtgcctgtgtctggtatayggggttcccatcacaggaagcacrtggctgcatccgatatatggggttcctactgcatgaagcacgtgcctgcgtctagtataccgggttcccatcacaggaagcacrtggctgcatctggctgcgtctggtatctggggttcccatcatgggaagcacatgcctgcatctggtatactggtttcatttattttcctgcccttattctgtacctgaacccatcatctatttcttacgaatttttattttcatcaatatgtacacttctatcaacttcctaaaactctttgacacatatctgttacagatcaatgaaattactaaactgaaataaccagcaagcccccaatgcatgacagagcttcagatctgtcagcsataatttccaatagagccaataatgtatccattctcactcatcaattccagtgttttccccaagacacgtggttcctatcatatttgtcatccaccaaaacccttcctcaagggcacccgcaggccctcaacgtgctcccaccaccaggtgtggctctgcaccgattcagtcctctcacctgttcaacatcttccaacatttcacccattctcasgtgtcaattccagcgttttccccaaggtatgtaacttcctacaaaaccacatatttctaacaactatgttatattttagcctctatgaaagaccggaaaatattctccgagggatcatctctgtggcgcatcccatgaacatttcctttccttagatgcccccacctggcaactcctggmgtcctggtactggtgttctccsgaggagacagggaacaggacttgtcaggcagaggacagcaccctgcgggaagaacccaggccgctccaggaccccagatggacactgtgcatcctggcayggcaaccttgccatgctcccacctccaatctggccttaaggccctccaaccctgaccccaggattctgcccagcactaggaaacagcccccaggtgggtgccccaagtctctgctgctcttccttttcattctggtgctggagccatttggtgtcatccaatttaygggacctttctcaaaagctgtggacaggagatgctttctaaaacccagragttaggtttgattaaaaacaaaattacatatatagatttcaatggaccaagcaactctgtatcccagaatcccatgaaaaagctaaattgacaatacttagagaaataaattggcagaacagaattacttgtctaaagtcacctctggttaaactggaaaatacacgtaaacacagcatgtctttcttagtcatcctagagtagaattttaactcaagatttaggaattcgatcaattctaaacaacttggaactccaaaataattaactaccattactgtaagctattttccacttgataaaacacacctttttctatagaaatcgcacaaggacacaaggaaatccgaatgtgccaggcacacacacagagaaggagcccaaccacactaatgcacacaggaaccgtgtgcagggcctggtgtgtgctgggcgtggaaggtgcaatcctgcatgtcgtctcgaggggcgggactatcatgggcatcctgtgaacggcggcaacgctctatgcgaacgcaataaaaattaaaccatcatgaaaggaaacttcatcccacaccttaaagcaatatagattccaggcacttctgagtagcaataataaacatctcatgcagctaaaagggaaaatttcaacccaaaaggaaaacacacagagaaccctggtggagccaggtgatggcaagggctcttggcttcacccggaaatgacgcaactgctcctcaaagtcgcagcccagcagaaaagagccgcttccttcaaataactgccaasttatttgattttactgaatttcattttattatttctttcaaataagtaattagcaatatccacaaaccttgttcatgacagaaaatattacctttgcctttttttcaaccaagtaagcaatctgatctgagctatttaatggggttttccaaattaactaaatctggccaggcctggtggctcatgcctgtaatcccagcactttgggaggccgagacgggtggatcacctgcgatcaggagctcaagaccagcctggccaacatggtgaaaaccccgtctctactaaaaatacaaaaagtcagccgggcatgtggcaggcgcctataatcccagccacttgggaggctgaggcaggagaatcacttgaacccgggaggcagaggttgcagtgagccragatcgcaccactgcactccagcctgggcaacaagagcaaaactccatctcaaaagaaataaaaaaacaaacaaaaaacaaaaaaaaaaaaagaaagaaagaaaaattaaatctgttgtataccagagaggtcagcacccatttacctcgatatactccacctttaacttctaagtgtaaaaccagttttctcaactgacaaacacactgttttaggtgaagatcaacttttttctccttttccagccctacgactcctctcttcctccttcccctgccaacccctggtacacaccaccttcacccataccttctrggacctgccacgtatcaccaggtatgtgaaagctatctctatgrcggcttccaggcrggctggastgstgtggccatcagaaccaccygcaaaagggctttttactccacaaaagggctggccctgccccacagcatctgtctacctacgggctaggacctacaggctgagaactgctactgggctgtaccagaggtccctaagaattagggagccccacccaagacagaaaactaacttggtgagagaaggaaatgggagaytcctcaaaaacaaaaatgtcacagaacaaagggcgtcacctccctgcaaaggacttagtatcccacccagaatccagtggcttggtacatgttttatctgggattcaaactctacaaacctgtggtggaatgagaacaaaagctttcggcttgtttgctagctgctgaagtttaacagctaaaacattttgaaagcagatccatatttattttgggagacggaaaggtttctccatctcacaagtaactaatacaatcaaaaccctggcaaacacagcagtgcgcgaagaaatacagtgtgaggctggacaataaaaagttgcacagaatccatttgtcattttggcccactcaccagaggctctgcaagcctgcttcccacagctcagctcataaatccccatctcctccggcccactctcaggacgttcctcccccagcaccggaactaggacttcctacatactgcagagctcactcctggggcacccctgtccccaattcagcaggaccctctgtgaacagggactgaaagccagatctcctccagcagggccattgctcccagtgagcctggccctgcctccacagcctgctctgatgctgtaggacagctgtgcacagggcggcccgcaccaaactgggaaatgtctgtgtgccaccagacaagaccactgcgatgtctccaggccacccctgccccagaggccttgtcctccatctacatgctccagaggggagattcacatccgtctggaagccaaacccaaggacatgggataaatgcagagactgcagcaccacgcacaccaccctggagaggctggctccaacgtcacctgcctgacggctcacagagacctttcaacactagatcagtcctgtttcacccggtcctcacaggaactggtcgtcgcaggaacattttcacctagctctccactgtagcctggcaaagcatcataacatagcactggaacccccactttagacacagggaaactgaggtttggggatctcaagtaacctggtgatggacacatggcccstaagtggcagagtgaagactgggatcctattcagatgggctcagggcccacagccctgactatattgtgttgatctcaaagaaacccagagaagatgccctgaagatgacaacatccaaatccaaggactaagaaaagtttcataggaggaggagttttgaacaatggttaggagtttaaagggggtagattaagaaggtatttgtactatgtacgttgaataaacrgtgtrcaaaggcagagaaaagaaaaatgtgaagtatggagttgtacaaatggcaagtcgactctttcggatagagcggattataggaaygagagatgggaggacagggtagggcagctggggctttgaaagcagtccgagggctcaggacttggacatctacaatagcatcgaggcagccaccagcgctgggcatgagcataaatgccccctggatgcctggagaacaatctggagccagtgagatgactgaacggctacttcaccagccctaagtatgtggctgcaaggggaggtgtgggatgcttggaaaaccacagaaatggaaaactcttttgccatagggtgatgggaaagacacaacagaagaaggggtccaagatggcaccaagagaatcctgcccaagaggatgggatgccatggatgaaccgagggtaggcagggaaatccggggtggggccagggacaagctgggctttaaacaagttctacagagaccaatgaactgtctcaaccacgacagtaccgacattgcaggagagagaattcctctttgttgtggggctagcccatgtgttgtgggatgttcactggcatccctggcctccacccactggatgccggcagcaccccctcagttgtaacaaccacaaatgtctaccatgacaaagttcccctgagggacaaaactgcccccagttgaaaaccactggcctagtgaggaaatgctgcaaaaaaaaaaaaaaaaatagcaactgcagatgagagaccactctgcaggtctcagctcgtggccatctgagcaattcacaaagcctgttggtgtgctcagcacctgaccgaagggatcaaactaccccagggacaagcacaacccctcaggcttcacactgctctcatgaataatgagcaatctctcaaatatgatgcccagtataatcaaagaaacaggaaaacatggaaataagacaccatgagcaagaacaagccaaaaaactttattagcttgttcttgaactttaatttcctttgaaactttacaaaagctgtctaccatcttaggaaaatgatgtcaccaatatccatgctgaccagatgatgaatgtacaataagcaagcaaagacttgagatactggatgtatcagatgcagacagaaagtaactcaaccatttttaaagaaggaaaagaccagcttgctcacacccagagtaagacaaagaaccaccgtgtatctatctgagctccatgataatttaatgacccctaaaattcagccttaagtcaaaatgttggaaaaaatggaatctcagtttttactttacatatttatcacataatattaaattacacaggtatttgatatgttgtcagccccctattttaacatgtaacttcacactagcctaatcataaagcctgtattatactttcatttttacaaaccaagagtcaaagtaggctatcataataatatacagtttatcaatagactagaaaataaaagtggggttgggggactaaaagagatatttatctaccacagaatcttgtttcacttcaattttctcaattccatttattatttctggaaaaaatcctactagttatatttttcctgagcaattctttcccaatacttcattctccttggaaaaacagcataccagtgctgtactcccaaagtcaacagggggaaacacacgctgcaattttaagtctataacactttccaaagttggccttagtttccaaaacttcatctttgttagatatcctacaagtcactaatactacaaactttattaccaagtcagaaaaaaaaaccctaccacattcacacaaacctaggctagacaaaatcaggtcctaaaggtggtggagggcactacagtacaatcaattgccaaggactctcagctttgatgacatctctctccccactcatttggaaatggattcccaggcaacagtgggaaccaaaatctcaggcttcccatggtggcatgtgaggtggcacaggctctctgagcaggagggtgctgggaagctcctgatctaatcacaatctggccaggggaggatgttctggagggcatcctctctagtccttctcaagagggggttattgagaatttgaaagcactttttagttgtcacaatggttgtgggagctatcgacatttaaaaggggggaatcaagaatgtagaatgttctcccatcccaaacaacagtgtcgtcctgcaacctgtgtcactttcaactgtcctgcaacacattcaaatctaaaattcataagaccctaaactagaattctgtttactgcaaacacaaaattttctgcacagtttttctctacacaaagttttctaagaacacaactatcctgtaactcaatggaaaggtgaacttcattttctttgaaactttacaaaagctgtccaccattttggaaaaattatatcaccaatgtcaacgttgaccagatgatgaatgtccaataaacaaaactgtctcaatctccatttgcagctgctgtgttccaggtacatacacctgattgccacgttatgtctgctagcagagtcctgcccaagcattcctgttctgaaggcatgttattttattataaattactgctcctaaagtgtttcatttaaatagtacatgtagatggatattatccaggaatttcatttcaggaatgtaaaaggcagattacgaactatgggtatcagacatggaaccctgatctgatactgttgaaaccatcaggctacaatgagatgttcccagtgcacacaaagacagggaaacaaaacacatttctaaaaccgcctttaaacttaaaaaaacattaactagctataatatttaacctttgatatctaaacaatttaatcaaatgtaggaggaaaaagtctgtaacattaagaccaggggcattgctacaaagagaatacaacatttcagcccctggatccgacagaattccaagtctgcttctacctgagtattagaaaagctgaagccagaaacagctaaataaaaggtgatgcaactaggcataacacaataaaagatattaccttcaaaatgcattctcgttgccaattataagaatcacttcaacttaatttcaaaagcacaatcaccctcaacagaaacagtctcttttttaaatttcaaagagtatcacattaaagcaataactcaccttccagccataatatcactctccctcccttattgcaacaccacatttcataaatacttctcatcgacaagtcaagctaattcaggttaattttattgtattttggtgctatctcacatttgtgtgcaattacctttatcattttattgccaaggcagaaagtaatcagaacaattatttgaaaacggaggtttataaattctaaatcacagttgctggcattttcgataaagcagcagctttatctcgggaagtggcagggacattggataaatcatgcatcagtcaagtgtagctgacccccaagtgcattgcacaatatcagaagtgcttccaaagaaactttcctgcatcatccatcattcttcataatactaaaatagctgcacacctgaagaataggagctggaggataataataaaaaaaaaaatccaagcagtgtgggcgaaaccattaactgctctcccttttaaactgtaagatatggcctggaaactggaccacgcacataaacaaatacgactttacaataactctaaatatctgtattcatattcgtcaactcagttttaaatataaatgaaatacggggtagagccgtaaaaagaaaaagtgcttctctggactacatgcatttttatgctctgtttgggtccggctgcttttaacagctgcctcgctaaggcttgtttgtctcgacatcttgttttctattcctcattttgttctaaagtttattgctcaaaaaaaaatgtaacttgattttaaggaaaagaataaagggagaagcccctgaatccccacgtgtggtttcccctaagttaattacaccaacagggagcacggaaatttaggaagggaggcggccccatccccagtcacccctcttcatgcaggggaaaaaattcacccccaacctcagctgcagccttcctcagggagagacgactcacatatcacacctctggcatatgtgagccacattttttttttactcattttttaaggcaaaataaaacaattatgtgatcatttatttcctttttttaatcaaaaagcaaataccacagagaaaggcagcttctgtacctttttgtaggtgacctgatgccaatggactgttaaaaggtctagctgggtaggaacgcaacgtattaactaaatatgcctggcaccgggccaggtgctttacatgcgttatctcatttactccttacagcaaacctaaggaagatcaaatggtgtgtagatgaagaagcagacagggaggttacggaactagcctaagaacacagcactccagggacaggtgggtattccaggtcaagtcaacattcttcaaagcctggactgcggccaggactctccccaagctccaggacatagacacactccacgctgtactagtcaggatggctgggacgctctgcagtaacaaccaccaccaaacccactacgggtctgggctagccccagcagcggccttgattcatgcaagcttgatgccacaggctgcgcccatcccatcccacagctgtcccagtatcacatggggagaaccaagagctggtgtgcacacacatctaccaagaagcaccacatgccactccagcccacgctcattagccaaaccaagtccatgaccaagccacccttgaaggagtggaacggggcagtcctcctgcacatccagcaaaggggaactgaaaacagaggtgagccctgcctccctggtctaccacagacacgaatgctgctcaattcaggctttgtttcaaattaaagtagtgttggacaagaaacatgtttagagtcctcggaatggtcgtggtgaccatggcagtcataccattaaaatcatcacctgcggcaggtgcttcgatggaagaaaacccacagttgcttatcttgatgataaacagaaacatgaaaaccaaagaatggggaggtaaatgactgacttatcaaataaatgcataaatccacaaggcagataaaaaggagtaagcactataaaaacaaaccaagcccaccaattacaaatctctgtgactctgaaacattctatttagttaactctacagccaccctcagcacattttccaaaccactgcaaaataaaccctcaattttccaaggagttaaatactttctcggtcttgaaagggatgactgctgtccctcatcatggacatatgtggaggtccaacctttggcctagagataataaaggcatcctcccccacccccgcaggaggcagggtagctctgagaggtatcagggcccaagcccagagagggaagagggggcaactttgaacaagtgagtacatggacacctctcacctccagccactgccgtttccaggttcactgagggaactctgcccaggacagctgctactggctaagagcaagaaaggacctgtgtgcaaaggattttgatgcaagagttgccagagcctgtcagtggactctgacaccaggaagtgactgaccccgtcactgagctcaatgttttggctttactttacctctacaagtctgtacaactctgaagctctgtaattctatctagttttaaatttacatgaaagctgtcagtgaaacagaaatcacattaatcagagacactgaactgtttaggcaaagtaaccctgaattttatgtcatacacttaacatttgggctgcgtgcggtggctcatgtctgtaatcccagcactgtgggaggctaaggcgggcggatagtttgagctcagaagtttaagaccagtctgggcaacatggtgaagcactgtctctacaaaaacatacaaaaatcaggaaggtgtggtggtgggtacctgtaatcccagatactcaggaggctgaggtgcgaggattgctcaggaggtggaggttacagtgagctgagatcgcaccactgcacctgggcaacagagccagactctatctcaaaataaataaataataacgttaacattcgaaatatt

SEQ ID NO: 96655 - DNA, 73826 bp, Homo sapiens
gacttgtatgcacattaaaattaaagaagcacaaacatacatgcttatcccacatcaactattacctcagataaattcattatccataatgcatccatactttttaaaacctgatttacttgacaaataaaaattgtatatgtttatggtatacaacatgatgttttgaaatatgtatcccatgtggaatggctacatcaagctaattaatatgcactacctcaaatacgtatttatttgtggtgagaatgtcagaggtgtttgaaccagagcaactccatcttcaataggggctgagtaaaataaggctgagatctactaggctgcattcccaggaggttaaggcattcttagtcacaagataagatagaaggttggcacaagatatgggtaataaagaccttgctgataaaacaggttgcagtagagaagttggctaaaaccccccaaaaccaaaatggccacaagagtgacctctggtcgtcctcactgctatactccctccagcgccatgacagtttaaaaatgccatggcaatgtcagaaagttaccctatatggtctaaaaagaggagtcacgaataatccatgccttgtttagcatatcatcaagaaataaccataaaaatgagaaaccagccaccctcaggactgctccgtctatggagtagccatccttttattcctttactttcttaataaacttgctttcactttactctgtggacttgccctgaattctttcttgcataagacccaagaaccctctcttggggtctggatcaagacccctttctgggaacaagaacacttaaagtctacactctaagtaatcttcaataatacaatacatagctatacatccatacttttatgaaaacaaatccaacaatttcatttccccatttaaggccattaaacaatttcccaaatgccctcggaataaggtcgaaatgcaggtaaccggactctgcatagtattactcaggctcaccattctcagcaaactaacacaggaacagaaaagcaaacaccacacgttctcactcataagtgggagttgaacaatgagaacgcatggacacagggaggggaacatcacacaccggggcctgttgtggggtagagggggaaggggagggagagcattaggacaaatacctaatgcatgcagggcttaaaacctagatgacagattgacaggtgcagcaaaccaccacggcacatgtatacctattaacaaacctgtacattctgtacatgtatcccagaacttaaagtaaaattttaaaaaaatttaaaaaaagaaaaacatatctattactcaggctcacctctgcagccttattctctccacctcctccagccattgattttcataccctaagcacacagaccttctttctgctcatcaaatcccaacatcccctccctccctccctcctgtcctccattgtactaggttcttccctgccgagaatataccctcactcaccccatcagtgcctccctaccagccccatttactgctctcaccagagcagatgcagtgcctggaacagagctaggagcaagataaatgtgctgaataaaaatatgtttaggatactgagggcctccgctgtttcctttgtccttctcctctgctgttgctgtgatcctcattcctgttgctccttccctgttccctgcatcacttcttttcagtaactcacctccttatcgtaacctcatggctattgaagttgtcagctttagaaagaagcactgccacatccccacggtcattgccccaggattactcaccagctggatgacaactgcctcactctaaccctgagcctcctgggataggaccaatcctttctagagatggacagaaggccccactgacagaaacaggctgcttttaaatcaaggatttaatatataggtggaaccatagatcaggggcctctcagcaggcagtaccgagccaaaagcttcactgtctctctgcccacacaagagagtgtcactgtgctgacaagacaggttatcaagagttgtgaggaacttcatattttaaatgtgatgaccaagtgtgctactctaagaaaacaagtggcaaacaaatccttttataatataaatacctgcttaaagttttaaatcttgaggaaatgtgaattttcatatatcaggcttacaataacaaaaataagagctattatatttatctattgactgcaagctgttaagagcctgacaacatgctcaaagctttaaacacactttcttcttcatcatcactgtgaggtagaaatgcttattatccctattttaagagagaaaaccaagggctaagtaacctgtctaaaaggcacagctgggaattaaatcatgggtccccagacaacccctctactgcttctctgctatgtcttactatatagatcactttctcatctgagaagtcacagatatggacattcccaaagagacaaccccttggagaatgatctcaaaggctgagatttttctctgcaatgtacatgttgaaagcaaagtaacctcctacatcttatatttcaaagctgcacttctgcattaaaagagtaaacagattcaatgaagagatgtgggaacagggtgcttatgaatgcaatgccacaagtactttttcagtgtctactggtggtcaggcactgtggtggaagctgaatgatcagactatcagttgggagagcgtgggggtgggggcatgggggtgatgaggagaacttctcaaatagactgtttcaggaatgtttagccaataattcataaaactgttactttattacctaactatatggaaatcatctttcagaagagaccagagttacctgccttattatctgtgaatacataattgaaagggccaatatgtcttccaaaatgaaagtcacaacttgatagatttctgagagttcatattagagggtcagattttaacatgtgaatgcaaacatagtgtcagaatttgttctcaagtgtctgaaagaacaaaagagaaaagagtaatgggagccaaaaccagactaacttccaaaatagaaacagagcatgttgaagttgcataaacacacaaataaagatggggacacaaaaacatttcctaaagcattctatcaaaggctgcaggaaaaaggccaagacaaggataccaaatagaaaagcataagcctaaaaaggttatccacactactgtgaggactccagaaacctgccttcttgcagaaacgggatacttttgacatgagggcatgagatgaagattgcagactacttcgtaacacactctcctcatttataaaataagagttagattagattatttataaggtccttccagtctgaatgcattaagtccttatcatctatgtggtccttgcaccttaagagagatgaccatataaagaagctcaaaaaacatttgttgaattcatgaagtattacaaccttaccaataataaataagataatttataacaattggtcctggtctgtggccttgaaagagcaaattagaggagaaaccattatctaaagagctacacatctggtgttcctgctagctgactgctggtggaatgaaaataaccctggacttgaaaataagatgcttggttctagtctaatctctgacacaaaccaactgtgtgaccttgggcaaactgctttaccacctgggccagtttcctaatctctaaaataaaggtattctaaaactatatacatatatatatggaatctttattataggccaagaagtgttccaagatctttgcattagaattaaatgatctcaaaggtttttgcagctcaaatgtttagtatctaagtacagaggcagcatggtataattaaaagattccaaattctgtagccagaaaggttggactcctcctcagctctgtaaggtaaggtctttctctaagcagagactgttaagcagaagggcttacagtctcagtccttttattcaccagtgttttaacttgaacaagttacttaactttcctagccttagttttctaatctgtaaagttgatataaaaatggttctcactctcatatagcttttaagaggattaaattataacacatatattttattgaatatatattatattgctagctgtgtaatcatgggctatcttctcaagttttttctcatatacaaatgggaaatgtagtattaaaaagagatcatgtgaacaggttctaaatggtcaagtgttagtggttttggaagcatgtacgttaatacttggaacaccgtatacaacaatcccatatctaacacttagaacagcatatgcaatcaataacaacacacacacacacacacacacacacacacacacacacacacacaaccctagacttctttctttactaaatatttctagtccaggttgcagcaggtggacacaggccggcagccatgaacgcaggtccacatgggagttgtagttccgagtcaagcggctgctctacagaacggctagaagcgagacttcgtctcccaggagacatctcgccgtgcaaaatggcacgccacgaggtggagtacctgcccgacgagaaacaagaggcgggactgcaactcccagaagcctccgcggccaaggcctcaggccgcaggctgaagccaaggagggagagttcaggtagatccggcttaacatcaggtgcgagtagggaccacccttggtagtctgggcccggcccaggtcagaaccttactaaaacaaccactgtgagtattttctattggtcccagcacatttctgagagaccagaataataatagcagtaaatctgcaagtggtaaactttcacaagcataacctcaatttagatttcggcttcaggcaacatcctttggccacttgacctgggagcattgagctccttgtttcccagataagcgctgtgagtggctgttccaaggtaacacagcgagggcagaatgtgagcctacagagaaatctgcagatgcatctcaagttccactaacctgcctccttaccccccaccaccaccaacttggatatacctttaaaattcccccctttgacgctaaaaataaaaacaacaaccataaaataagtgtaagaaagtccgaccaagtaccgatgagttctcccacaacaataaattcgatgcctctttgcctgtttttgaagtagtaatgtaaaattatctcccaaaatgctgccttctctatactccggtttgctcctgtcctgggcacgtgttcagcaaccccttaggggaatccagagctgcgtgtttaacacagacctgttgggacggattttcgctacttgtctatgaaactgacgaaccatcccaaaacggcgggtgccgactacacccccagagccaagagctgtggcgtccccggacccgctggcgtggccccgtgcctcagtttccccaatgtataaacacggtggaggaggaacgggttagggctagggtcggtgcttgggaattggggggcccgagtccccaccctgagaccctcgtggggcggaagagtactcgggacagaagcccaccgccccgtgagcggcgccggccccactgggctccggggtgatgacctgacgcgcgtggaaacccagacccgcgccccagaaacagtattccacttgggcttgcctccccgcccctaccttccaggatgttgacagctgggaatgaaaggcagagggagggagcgcggggccggagcgccgcctgggagtgtgcccactgggtggccgcctgagggacccgggaacagagggcaaaaagtcctgtgaccggacagagcagagcggggactgcaattcccagaagaccccacggtaggggcgggacccaagatggccgcttgtctggggacaggagcggaggccaatacgcgcagagcatgcgcctacgccgggccaattgaaagccatagtgacagtaaccctgattcaggggcgggaaacactgaccacagaagacaagttgaggtgagaatccccttacaagggggtttggggcataaatcgcacaatctttggctttttctaactagaaaaagaaacatgattcttttcacgtgtaacgaaaggctgtaccgcacttttgcttttttctttcctcccaaaacgcgtttaactatcccttcacgacttcccactggctggatttcttttcgtttcatttccccactctggatctttctggattccttaagccttcttttctttatgtgtctctcagaaacacagacttgcagtccctggcttgatccatcaaataatgtggtcatttacgactacgctcagccctccctggcatcctaacaaaattgcaccacatgcgccccttctcttttcctttctgtcttttctgtgctgtttttctccttagcatttgtcgttacgaagcattgtataaaatttacgtatttatcttttttaccatcttactttctcactagaatgcaagatccctgcagatgtggatttttgttttggtcactgtagtctttctagcacctagaaaagtgcccagcacatagtaaatacaccgtattttcaataattgaacgaaatctagagtgacctttctcccctagtctccctttctctggtgcagatcaacccgtttctgaccaccatggttccttgtgcttgttcccctgtttaatccaaaatcattattgatgtattctgtgccaaatgccatgtgggtgctggagaaatcattgattcagacccaattcctaacctcaaaatgctctgtctagtgacgtatgaaaagtaaaattaattttacaataaatgcaattacaaattgcagaacacctacgtaattttcacaaggtcatgcagctcctaagcaaggactagattcctggctgcagactcttgccattacatcrggaaaaacaaagagcagttttctctcagacaaacactaagataggtccccattttccttarcaccatttcctttctctgtctctcacttttttatttggcctgattcattacatgcaggcaattacatcaagtcttagatctctcattatttctaatatttgaatcccatggagagtagcaaggtgtcctacaaagtgtcctggtgtgaaaatctgatgtccttggaagcttgactctcagagaatgtcacattggattatagttcatcacacagacaccatggccacataaaatattatcaaattgtgaataacaaagtgaaattgaaaaaaaawatatagttaaaacagcaggaatgtgagcaatatatgtacagactgattttgtgcatagagattaaaacacctgttcaggcttcctagcctaatcttctgtcaatttggggtcatttcctgtaatacaattctttgttgcttttatgagcacagacttagctcagcagtcccagctattctcaagctgatcgacatgagagatttyaacacatgtgtcagcagccagactaaacgtggaagaaaatcagaagcatttgaaactgtaaagctcaataactttcctcctcctgagaaagcatcagcctataatcattacatcttctacttagcagtcaaaaggcaaatgtcatgaacatactcagggtctaaacagtggtgtctaatgattattgcactgttgtcagatagcctaatatgagcacataggtattacttcagctgtggataatgctgactgctgggctcaaggtcacccacgaccttgagcaacagatacattcacaaagagcatgaagacatagaacttgcattggattcaggaccttcaagtgccaagacaatcagtgggaggttactgtctgatctgcaacttgactgaattaataaccaccttagtatgggttctcccagaagcagatctggagacaggtattcamgagcaagtattttatttaggaggttatcgcaggaaacaccagtaagagactaagaaagtgaaatagggaagagaagaccaaaaagatgccttatctagcacattaccgctagaggcacccagaacttaatcctcctagaaatctctgggaaacaatatggaacatgtaccttagactgagtgattccaccaagaggacaagataactgggttgtttaaacaccaactaccgtcagtcaatgattgggggcagctttcagggattattaagaccctggcttgtctgcaatgctccaagagtagacagagttgcctcagtggccacagaaagccagagatagaagaattaagagtcacattggtatacgctgaaatagtaagggaatatagcatactggcggggcaccaataatatctgctacaggtggctttggtttaccacaagctcatgtcactgaaactaacagaataagaataagtcagaaactaagtagataaatacaaaaagcccaagcagcctaccaccttctatcactcatcaacaattaagatagattgtactttctaaatcctcactaagacatacaaaccaaacaatagcagaagcctcatttacactggggaataggaactctttgggcatttaaggagggtgctttgggagctttggggcatggtagtgcaaggagaaagaagattaagaamaggggaaaaggacatttaaagaaacgtgttaaaaacattgtgtttttcattttatggtcttgaaacatgagtaaagggtgtggatattttaagaaggtagcatcaagatctgggtgacttttagacccagaagacaattttgtgaaagacttctgtggattgtgccattatagtacttcttcatagcaaatatctttacttgaaattatacccacatttatttgtccttttgtttatcatctgtctccttcaaacaaaaggtaaactccatgaaggtaagaactttgttttcaggccaggcacggtggctcatgcctgtaatcccagcactttgggaggccgaggtgggcagatcacgaggtcaggagtttgaaaccagcctggccaacatggtgaaaacccatctctaccaaaaatacaaaaattagccaggcatggtggctcacacctgtagtcccagctacttgggaggctgaggcaaggaatcacttgagcctgggaggcagaggctgcagtgagccaagattgtgccactgcactccagcccaagtgacasagcgagactccatctcaaaaaaaaaaaaaaaacaaactttatttttgtgttattcattagtcrgcactcaataaatatgtggttaacaaatgactatattatggctacaaaaagtaaacagggtaagtactagaagagcctgacatttgtaccatttgtatcattcaactaaatcataaaggtaagaggcamtggtaactacaccataaccccccattatcacgaagcttggggccatccttgtgtgtagaaaaactggaggtcacataatgttctctggctttagtcaaacacttccaacagcatcctcttcaagcacacatggcctacaaggaaatctttaccatggaaacagaatttcaaaactaaaaagtccgtagaggtcaaagagttcaaccctctgcataattcatcttagccatatgttacaggtcataattcagaccttcagacaagaatctttatttatttgtaatttattacaaatttatttgaaaaartaatatctaatacaaaaatattatattagaaaaaaggagaaacartgcattatttttgtaatacaaagtatagaaagyttgggaaactcagtcgtacccaaatgctctagtctgcttcacacatttcttaacctgtgatcattaagctttttggctaccattggagaattctggttgccagtaagagccatcttatgatgtgctgaaaattttctaaatttttcacctatgttttttttttctgtcatcttatttctccctttgttgttctgtgttaaatgtattccttgggtagatttgttcatcagatatttagagatctgtctattccctatagcttgtgaacatatgcatgctgtctgcttttaactgtgcctcataaataatcacacttaatccttcttagtgccatcttttgcaatcatcttccagttacctagaacataaggtgcataaaactaagctcagtgtccaagctgtgatctcagtagggtggctcagaattaagcgatgatttttcatcactctctttcaagaaattatggctctaaacttattgccctggtttcactgcagctttaaagacatttcatcattctagaagataagacccattaaaagcattttctaaaaactaaaaaatatagtagaggagagtgcagtttcaattcagttccgtgttttatatattgagggttactctgcgagccattgtgttagaggctgtaattcacaagtgaataagacacagtctctggagtggtacggtagtgaatactgtaagcatgtaaacagatgagcaaatcaatgtgattccccatatgagccaatgccaatgccagaatgagtggattctgccmcctatagtgaaggagagacaggggttctgggcagaggcaacagtacatggcaagcaccagagttcaggcaggtaaacgaatcagtctacaacctaaattggaagtaggatagcagtgaaagaaaccagaagagtctcaagaaccagctcatgagggtttcctaggtaactccctagtttgctgtaaaagtaattgaaagccttgtaactataaaataaatagcttaatttggaggcaaaatggggaaaatcattcaacaaatatttattgagcatttactatatgccagggatgcaatggtgagtaaatcattgaaaaaaaaaaaatccctacccttgtgggacctctagaagagtagacaagccatactctaatatacaaatgtatagtctatcataggtgttgataaatgctagcggtaaaaaagcagagtgaaaggctagaaagtgataggtggtcttcttttacatagggggtcagggaaggcctctttgaagagatgtcatctgaacaaagatctcagtgaagtggggtgggaggcagccatgaggaaatctatgcaagaaagttccaaacaggcggtacagtaagtgcaaagtccttaagacacaagtccttaagatacaaacaagtccttaagakacaccatgctggcgtggtagaagaatagccagaaagccatgtggctggagaagagtgaacgagaagaaaagtaatggaaaggaggtcaaaggcaatcagaggccggatcatgaagggtttggtaggccatggtaagatctccaggacaaatgttaaactggtccataaatgtagccatcagacagtatatacagtatgacccattcgtgtgaacataaaaagattgtgtgttacacacacacataattattgaggctcataatcactttgaggacagatgtgttttagaaattaataatttgttgttttttagaaaggtatatgtctataccatttggtatataacacgtctagagaagtcttatgacagcaccctgtcatcaaacatattgatatgtctgcaacaaaacatatatgggataagcaaacactaaatatagtcttacaccaggttaatcttttggttttcaagctttttggatttcaaaatttcagatccagaattgtgaatctctatttgtacatgtgtggaaaacttccaggagtgtcccattgttcattgttgtgaacaaaggttggaggagtgagatggctttggtggctgaagtatcttttattctactttttatcatgccgaatacacttctttaccatgtattatttatgtcattgaaataacacaagtttaaaaatattttttaatgtagatatcagtgtttttattcatgtagtctttgggtattaacaatatgaatggaaatcagggaaaatattttaaacaaaaaaagtaatagagaagattttgaatattcattatataattgcttctatatttgagttcttagtaatgaaatattcaacttttactgtgtctctgtatgcttttcaaatttttgtcttgtaaatacttttgtggactatagggtcatagtataaagataattttgtaaggagtaggaaattcatatctaaaattcagtaaaatatatttttaaattttatggtaaatcatatttcctaatgttccaagaagtttcttcggtttccttatagaacatggtccattctcaggacctgcggtgtactgttttgttttgttttcaaggcaaatctgtggggttttatttccatgttttgayaacagaatgtcatgcttgtgataaatacttgcctgaaagatatttataatgtacaagccctaaaatatttagacattttttaattgcaattttcaacctccctatttcctaccactctcccccaacaaaaattcagagagatgtatttaacagacaccacatttcatggtgaatgttattggctgtgtggctgaaaactgtaattagccatgcctcactgattcatacatgaatcgttttgaggtttattattccactggaatgttaatgaacatgaatacaaaaatactcttgagagattttctttttatcttggtaaagtacatatggtacggggaaaaaaaaccttgaaaataattagtgraaaaatacttagtgtatataactagacccttgattttttttttttaattattatactttaagttcggggatacatgtgcagaacatgcaggtttgttacataggtatacacgtgccatggtggtttgctgcacccatcagcccatcatcaacattaggtagttctcctaatgctatccctccccagaccccaacccctgacaggcccctgtgtgtgatgttcctctccctgtgtgcatgtgttctgattgttcaactcccacttatgagtgagaacatgcggtgtttggttctgttcctgtgttagtttgctgagaatgatggtttctggaaaccatccatgtccctccaaaggacatgaactcatccttctttatggctgcaaagtattccatagtgtatatatgccacatttccgttatccagtctatcattgatgggtgtttgggttggttccaagtctttgctattgtgaacagagctgcaataaacatgtatgcatgtgacttaataatagaatgatttataatcctttgggtatatacccaggatttgcccatgcctatgtcctgaatggtattacctaggttttcttctagggtttttatggttttatgtcttttgtataagatgtaaggaagtggccagtttatgttttctgcatatggctagcatatgcagaaatggtgctttcccaacaccatttattaaatagggaatcctttccccattgattgtttttgtcaggtttgtcaaagatcaaatggttgtagatgtgtggcattatttctgaggcctgtgttctgttccattggtctatatatctgttttggtaccagtaccatgctgtttttggttactgcagccatctagtctagtttgaagtcaggtagcctaatgcctccagctttgttctttttaaataggattgtcttggctattgcttctcagtyttttggctaagatcaaatgtagtattgtcttggctatacaagctcttttttggttccatatgaactttaaagtagttttttctaattctgtgaagaaagtcaatggtagcttgatggggatagcattgaatctataaattaccttgggcattatggccattttcatgatattgattcttcctatccacgagcatggaatgtttttccatttgtttgggtcctctcttattcccttgagcagtggtttgtagttctccttgaagaggtccttcacaacccttgtaagttgtattcccaggtattttattctgtctgtagcaattgtgaatgggagttcacacatgatttggctctctgtttgtccattattagtgtataggaaagcttgtgatttttgcacattgattttktatcctgagaatttgctgaagttgcttatcaacttaaggagattttgggctgagacaatggggttttctaaatatacaatcatgtcatctgcaaacagagacaattggacttcctstcttcctatttgaataycctttatttctatctcttgcctgattgccctggccagaacttccaatactatgtggaataggagtggtgagagagggcatccttgtcttgtgccggttttccaagggaatgcttccagcttttgcccattcagtatgatattggctgtgggtttgtcataaatagctcttattattttgagatacattccgtcaacaccgagtttattaagagtaaaatttttagcatgaagcggtgttgaattttatcgaaggccttttctgcatctattgagataatcgtggtttttgacattggttctgtttctgtgagggattacgtttattgatttgcgtatgttgaatcagccttgcatcccagggatgaagctgacttcatcgtggtggataagctctttgatgtgctgctggattcggtttgccagtattttattgaggattttcttatcaatgttcatcagggatattggcctgaaattttctttttttgttgttgtgtctttgccaggttttggtatcagaatgatgctggtctcataaaatgagttagggaggagtccctctttttgtatttattgtttggaataatttcagaaggaatggtaccagctcttctttgtacctctggtagaattcggctgtgaatctgtctggtcctggactttttttggttggtaggctattaattactgcctcaatttcagaacttgttattggtctattcagggatttgacttcttcctggtttagtcttgggagggtgtatgtgtccaggaatttatccatttcttctagattatccagtttatttgcgtagaggtatttgtggtattctctgatggtagtttgtatttctgtgggatcagtggtgatatcccctttatcattttttattgtgtctatttgattcttctctcttttcttctttattagtctagctagcagtctatctattttgttaatctattcaaaaaaccagctcctggattcattgattttttgaagggttttctgtgtgtctatctccttcatttctgctctgaccttagttctttcttgttttccgctagcttttgaatttgtttgttcttgcttctctagttcttttaatcgtgatgttagagtgtcaattttcgatctttcctgctttcttttgtgggcatttagtgctataaatttccctctaaatactgctttaactgtgtcccagagattctggtacgttgtgtcttggttctcattggtttcaaagaacttgtttatttctgccttaatttcattatttacccagtagtcattcaggagcaggttgttcagtttccaagtagttgtgcagttttgagtgagtttcttaatcctgcattctaatttgattgcactgtagtctgagagactgtttgttatgatttccgttcttttgcacttgctgaggagtgctttacttccaattttgtggtcaattttagaataagtgtgatgtggtgctgagaagaatgtatattctgttgatttggggtggagagttatrtagatccatattaggtctgctttgtccaagctgagttcaagtcctgaatatccttgttaattttctgtctcgttgatttgtctaatattgacagtggggtattaaagtctcccactattattgtgtgggagtctaagtctctttgtaggtctctaagaacttgctttatgaatctggttcctcctgtatttggtgcatgtatatttaggatagttagctcttcttgttgtgttgatccctttaccattatgtaatgcccttctttgtcttttttgatctttgttggtttaaagtctgttttatcagagactaggattgcaacccctgcttttttgtgtgtgtgtgctttccatttgcttggtaaatattactccgtccctttattgtgagcctatatgtgtctttgcacgtgagatgggtctcctgaatacagcacaccaatgggtcttgaccctatscaatttgccagtctgtgtcttttaactggagcatttagcccatttacatttaaggttaatattgttatgtattaatttgatcctgtcattacgatgctagctggttattttgcccattagttgatgtggtttcttcatagtgtcaatggtctttacaatttgttatgtttttgcaatggctgatatcagtttttcctttccatatttagtgcttccttcaggagctcttgtaaggcaggcctggtagtgacagaatctctcagcatttgcttgtctgtaaaggatttttttttctccttcgctcatgaagcattgtttggctggatattaaattctgggttgaaaattattttaagaatgttgaatattggcccccactctcttctggcttgtagggtttctggagagacatccactgttagtccctttgtaggtaacccgacctttctctctggctgcccttaacattttttccttcatttcaaccttgatgaatctgatgattatgtgtcttggggttgctcttctggagaagtatctttgtgttgttctctgtatttcctgaatttgaatgttggcctctcttgctaggttggggaagttctcctggataatatcctgaagagtgttttccaacttggttccattctccctgtcactttcaggtactccaatcaaatgtaggtttggtcttttcacatagtcccatatttcttgggggctttgttcatttcttttcattcttttttctctaatcttgtcttcacactttatttcattaatttgatcttcagtctctgatatccttttttccacttgattgatccagctattgatacttgtgtatgctttacaaaatttttgtgctgtgtttttcagctccctcaggtcatttatgttcttctctaaactggttattctagttagcgattcctctaaccttttgtcaaggttcttagcttccttgcactgggttagaacatgctcctttagctcagagtagtttgttattacccaccttgttatttcccaccttctgaagcctacttctttcaatttgtcaaactcattctctttccagttgtgttcccttgctagcraggagttgtgatcctttggaggagaagagtcattccagtttttggaattttcagcctttttgcactagttttctctcatcttcatggatttttctacctttggtgtttgatgttggtgacctttggatggggtttctgtgtggacgtcctttttgttgatattgatgctattcctttctgttcactcgttttccttctaacagtcagccccctctgctgccaatctgctggagtttgctggaggtccattccagaccctctttgcctgggtatcaccagtggaggctgcagaacagcaaaaattgctgcctgttccttcctctggaagcttcatcccaaagtggcacccgccagatgccagctgaagctctcctgtatgaggtgtctgtcgacccctgctgggagttgtctcccagtcaggaggcatgggggtcagggacccacttgaggaggcagtctgtcccttagcagagctcyagcgctgtgctgggagatccgctgctctcttcagggtcagcaggcaggaatgtttaagtctgctgaagctgcactcacagccacgccttcccccaggtgctctgtcccagggtgatgggagttttatctataagcccctgactgaagctgctgcctttctttcagagatgccctacccagagtggaggaatctaaagaggcaggtgtgctctacccagttcaaactttcccaaggctttgtttacactgtgaggggaaaaccacccactcaagcctcagtaatggcggacacccctccccccaccaagcttaagcgtcccaggccgacttgagactgctgtgctggcagtgagaatttcaagccagtggatcttagcttgctgggctccatgagggtgggatccactgagctagaccacttggctccctggcttcatccccctttccaggggagtgaatggttctgtctcgctggtgttctaggcaccactggggtatgaaaaaaataaaaaaactcctgcagctagctcagtgtctgcccaaatggctgcccagttatgtgcttgaaacccagggccctgctggcacaggcacccgagggaatctcctggtctgcaggttgcaaagaccatgggaaaagcatagtatctgggccagagtgcactattcctcaaggcacattccctcacagcttcccttgactaggggagggaattccccaaccccttgcacttcccgggtgaggagacgccccaccctgcttcatctcaccctccgtggggtgcatccactgtgtaaccagtcccaatgagatgggtacctcagttggaaatgcagaaattacctgcctttttccttgatcttgctgggagctgcacaccagagctgttcctattctgccaaattgcccgcctccctaatttttttgaatagtaaataagactgtataatttactggagtctcttctctacgaagcgcacagtgattttacaaacattaattaataaagcttcaggatccctaccaggtaaatgttaataaaacccaggagtcctaacttttttgacctttgcctcaattttcagataagaaactagctgactaagatgcttccacagctttgaaaacaaaatgggcatgaaaccaacattcagagttcagatgtcacttatgagtagcattctcttatgaacctagttggagatagaagtaatttagggaaaatgatatttcagcactgccttaatctagcagggattttcttcatgggaaaattaaacmaaacacaaactgaagtatgacttaactgggcctgcttctgcatttagggtcaccaaagcatactgtaaatggaaatcagattgctttagaatccaagaacaaactctacttttgacctttagraagctcatgatgtatatgcccaccaaataaacaaaataatttcaaagtaaattcgttgagtgcacctgacctttgaaacagagcagatgatgttaatcagatttgtacagcgttaatctagctcagcctctgtctctccatgtatttttaaaatatcataaggaagagtctcacaacagggaatctttcaaatcggaatagatttagaaatggaacagaatgtatgacctggcttcaaacaatgaagtatataactcaaacatgtaagcaaatgaattttatgactataaaccaacataccacacccctcaggaaaagcaacttttaaaaaataatataagcctgtgttattttctcaataaaatatagttcaagttctgatactgtgttagttaccattaggtaaactttgagttgaaaatggcctacatatcataaaaaggtgttctgtctgaccattgcatctgacttttgtcaagccatatcatttctgcattttggacattgaatgtttgagccatggcctttccagaatagcctgttaagtaacttgatggacatatgcttcttttcccaggatcacttcctttggataaccagccctgaccccattccatagtaatctctgtcaatcttggtggctctgaccacacatttgttctggcttaaattggggaggactatggggtgtggaggacggtaatggagcaggagtagtcacagaaaacaaacttgaccaaagcactccatactacttggccactggttggttggggatgggcacatgacccaagctgagccagtatcctcagatgttttgtcagagagattttttaaaaagcccctctttctctgtgatcacaagccataatgatgatacaagtgtggggctgcaggctattttgcccacccaggaattaagtcaaaagggcaagcagagaggagaaatgaggagaggaacagagcccagctggcattgcatcccagaatccaattttgcctgaagctacctcttagatttgccagttacatgagccttttcttgtttaagttggtttgaattaggtttttgctactggcagccaaaggagtcctgactaatccacaaagttcaactgacagataagctactcagaatgcgacggtgaaatgaaagggataatactctcccattctcttgtaatttggaaattctccggacctaaagccagatcagcctctgctctaccagcaccaaaactgtgcacgaggcacactgtagtcatctaaggaactggagatgttagcctgagaacgagaagacaagatgtgcttgctgggctcaaacgtgtgaaggtctactttgtgagaaagggattggattcactctttggagttaaaagtcagaccaacaagtccttatcactgaggggaattttctgtacaacatgaaggataacttttctaacaatgaaagccatcctagctgacataatgtgaccctcaaacacttcctttattgagtgagaggctggacaaaatgacatctaagatcccacccaactctgtgattacttgattcaatcaaagtttggtcatggtgaccgtatctgtacagtcatgcattgattaaaaatggggatatatcctgagaaatgtgtccttatgtgattccatcattgtgcaaacatcatagrgtgcacttacataaatctagatggcaatgccttctgcacacctaggttttgtggtatagtctaatgcttctaggctgtaaacctgtacagcagatgactgtcctgaatactgtaggcaactgtaacaccatagtaggtatttgtgtatctaaacatatctaaatatagaaaaggtatggtagaactacagtactaaataagcttataggaccactcagatatgtggtctgttgctgacaaagtgtcattatgcagtgcatgactgtaatttattatagtcacctcaaccattcagcaaatcaaaaatcaatataaatcaatcatatataaggaggcccagaggaaattaagtgtcrgaagagatttcctagaggggatgataacttgcacagttttaaatacaaataggacttagtttctatcacacataccatgttgaacaatgctctattcagcactgattcttcaagaagctatttatctctaccatagtttctttaaaaatatgcaaatacatatgtaataatgatctatttcagtgtattataaattaaaattttccaaattcttgagtgttttgtaggcatatagctaataaacattaacagtttggtgtagtgtacctgtaaccagccctgtatacctgtataccagctgctctcagccaatgaatgggagtcccctattactgcattctaccattcactacactctgagttgagagtgttctacaatacatgtttttgcttatctttctgccattattttgtgtactggcaatttattttgtgtcctcaaaagcagttttgacatgaaatgcttaaccacagttatgaaaatgatacatccatactagatctacccatagcaaagtgacagcactacattagacatcaaaatgcaagtcctatagaggttcagggtgccttcaggaaatgtttgagaagacagaatcaggtaaatagggactgaaagataatttttggcattatgaagagcagcataaataccactgcaggcagggaaaataaacaaaaattgttagaaagctgtttggaagaaatgactrtaagaagacacatcatgatgtaaggagtttggaagaagacagttgtgtggttgccatgtgaaggactggaacacttctccatggggacagtgataggaagacccagtataatgctgatcacagcagcacccccatttccaggaatggagcacttcatccatctcctgccttctctctcaacagactttgtgagtgctcaaaccaagtggggaaagacagtcaagagagagggaacagcatgtgaaaagaaaaattgtaaaacatggcagtttagaaactgtaagtggtttaacattactggaggagagaatayaggagagaggttaacaacgagactggaactgtagacaaaagccatgttatgaaagagctgatgaaaccttctctagacctagkacttaatgtgacaagcagtggggagcaaataattggctttaacagggcaagcaatgtgatcaagttcgaattttagagaaaaatctggaagcactatggaggcttgactggagtgggatatgactccagaaagatcagtgaggaggtcattgttagcaatcagacacatttttttttggcctattaaattaccatttttttaaaaaaagaaaaagaatatcctggtggtaagctataaattggtaaatttgtaaaaagctacttgcaataatgtaagtcaagtaagaaatttagaaataatactgaaaargtttacgccctttgatccagtaattctatgtgtaggaatctacagtaaaagtacagagatgcagacaaaagtgtatgttcagtgatgttccttctttcagtcttatttctgaaaaactagaaaccactttcatgtccaatcaaaaaagcaacaaataaatgaaatatgtcactgctatttaaaatttttttttaaatattcactgacatggaaaattgcccaaggattaatgttaattgaaaaagcagaatacaaaattaaatatatggtaaaactgccttcttcagaaaggtgtatgcatttaaaaactggaaaatacaaaaatatatatatatataatcagagcttatctctaggtggtgaaattgagtgattttgattttcatctttttaagctttttttattttttcattcactgtcatgaacatgtactacttttgcagacaactgttaggttgaaccatttgaaattgcctgctgcagactgaattgtgttcccaccttctccccaaaatgtgtatgttgaaaccstaactcccagtgtgatggtatttaaagatgagaccttgggaaataagtaggtgtagatgaggtcatgagggtggagcattcatgatgggattagtgttcttataaaaagaggaagaggtcatgtgagcacacagggagatagcagccatctacacacggggaagagagccctcaccagaacttgaccatgctgatgccctgatcttggacttccagtctccagagccttgagaaaataaatctctgttgtttaagccagtctatgatattttgttatggcagcccaagctgactaatacactgccaaaattgacttcaaaaatgacaattccatatgaatcagcctacataaaagtgaaataaaataaaaagcaacagtcattgaaaatgccctgacaatagatgctaagagccagaaccaaagcaacagtaataagataagaataacaaagatgcaaatgacattaagttggtagattctgtaacttggtgatggataggattgataaaacagtactggtgaataaggaacagcatctaaaacatgaatccaaagtttttacactaagaaatcgagggatggtagaggtactagtcaagacaagggataatcagaaaaatctgtttggtagctagcctctgagatggcctcaataatccccacctcctggcattcgcagccttgaatactccccttcctggtctacaggtggtcagtattctgcctcatttataatactgccgaagttatgtctcactgctacagagatgaacattcaccctgggaaaaaagccaactgctgtgttcggacacttaaagcctatggacaggcctatgtgttgaggaactgagatatccagccaacagccagcaaggaactgaggtctgacaacaacctcatgagagagattggaagcagatcctgcagccccagtcaagcctttcagttgctgacaccttgacagcaacctcatgagagacgctgagccacrtgatgaggctaagctgcgcccagacttctgtctcataacagctatgagataataaatgtttgttttaagccactatttcgggaggtaatttgttacagataattagataacttcacttgtctctcggtaaccatgggagattggttccgggaccccctgcagataccaaactccatgaatactcaagactcttatataaaatggtgtagtatttgcatataacctacacacatccttctgtatactttaaatcacttctagattacttataatacctaatgcaatgcctatgcatcacttcattcacatggattcagcacagtatttggcacagagcaaattcaaggtttgttttctggaacttggtggaatttttttttttttttttttttttttgatacaaggtctcaccccattgcccaggctggagtgcagttgcacaatcatggctcattgcagcctcgacctcccaggtccaagtgaccctcctgcctcagcctcctgagtagctaggaccacagcatgtgctaccatgcccagctaagtttttaattttttgtagagagaaggtctcactatgttgcccaggctggtcctgaactgggctcaatcaatccacccacctcggctttccaaagtgttgggattacaggcatgagacaccgcgcccagccttttttttccaaatattttgtatctgtagttggttgaatctatggatgcagaacccacagacatggaggaccaactgcaatacaaccggttttgattaatttgcttatctgaagagttgaatattcctgaaggcagaaatcatgtcttaatatttaaggcctcttgctgtatgtggcacatgatctatattcaatgaatatgtattacagtctggaaaggtagaaaaggagactgtaaaccctagcaaagtagtttggacactttctggtggggacccactaatggctcataaggttgttcaggataaagatttgtttgaaaagaaatgtggtgaatgatttttgtacttgacacttcttcaaggacttgtattgcttgtaaatgtactttaawaatcttatatgctttagaagcccatatatcccaaaatactccaaattgtagagttctaaacctgcaacttattttcttttataaaacaaactttggaaaagtgtggtctttaacttttttttttttttccggacaaattctcactttgtcgcccaggctagagtgcagtggcacaatcttggctcactgcaacctctgcctcccgggttgaagcgattctcttgcctcagcctcccgagtagctaggattacaggtgcccaccaccacacccagctaatttttgtatttttagtagagatggggtttcaccatgttggccaggctggtctcaaactcctgacctcaggagatccacccaccttggcctcccaaagtgctgggattatagtcttcaacatttttaactacagaaaggtttagcaagatttttgtttctaaattcattttcatatcttagataatttgtagctagcaattttgtaccagctttcctttttattttggactattgctgacccagatttaaagcctagagttgacgaaatttaaacttttacagtacattttatcaattatataatgcaatagtcaatccaagaaaattctgtcttctgagcttcatccataactgttctttattgttctataaacaactgattgatgccattaatgcttggacacatgttagaaccgaggagaagtagaacatgtaataaaaaagcatcagtccacttaaacttgagtgtactgataatgatgcctggtctctatgatgtagtttgttgctgaaatactcccataaatacatacacgcacacacaccacttcaggtttcacaaaagcaactcatagcctttatatcctaatggactcaatgaaaattagagggaattcatgagactctggaaacagtgtatacctggtgagaatgaaatcagaaaagtctggggtgctcttcagagttcttaytaaaagcaataaaggaaaatcttgcatttttgccaaatgtaagcaaagttcacatgaaacatttatgtcttcagatagaaccacaaaagctcaagaagaggcaggaaggcyaaggagctaatccattgcacatctgagaagagattggaccttgcaactctttctcatttgctgtagagtctagtttccttgatatgccctcagccacccaactctcataactcttgcttcagattctcctaattagatacagcaaataagagtttccctcccagaaggtgagtggtttttccttactttatatcatttcataattcactttgatactcttcagactgcttctgtgtaatttgcaactttcaaacattggaagctagttagctttgccatgtagatttcatttaactaaatcatattcagatcgttttacctcctttaaaaagaagcagcaagaaaatctttgatgttatatcttaactgtaattaagatatcatctccaatattttactgtagaaaatgcaataaataaaatatgaatttatgcaacacagttattcacactgaaaagcaattaacaggctattcctcatctttctgttgcagttacatagaaggactccttgctgtgtgacctttagaaaaacattgaacttttctgtgccttgttttcctaatctacaataggataatagttcctacctttaggattaactgggattagtttaagattaactgagattatctgactctctcatgaaaacataggtgacattattttgtaatatttcccaggcatgaatagaatcattttgatttcctttttcaaaaagatttcatatttcttatttcatttgtgcctaatcacaaaaaaagaattataaaagggttgtgttgaattgttctttataaatatttttattctttatgtttactttttaaaacatttttaacktttgtgggtacacagtagatgtatatatttatggggtacatagtatgttttgatataggcatgcaatgtgaaataagcaagtcatggagaatggggtatccatgtcctaaagcttctctcctttgagttacaaacaatcaattacactctttaagttattttaaaatgtgcaattaagtttttattgactatagtcgccctgttgtgctatcaaatagcaggtcttattcattctttctaacaatttttgtacccattaaccattccctcttcccctctcagccccccactgcccttcccagcctctggtaaccatccttctactctttgtctccatgagttcaattgttctgatttttagattccacaaataagtgagaatatgaagtatttgtctttctgtgtctggtttatttcacttaacatgatgatctccagttccatctgtgttgttgcaaatgactgagtctcttttttttttaatggctaaatagtagtccattctgtatatgtaccacattttctttttccatttatctgttgatggacacttaggttgcttccaaatcttggctattgtaaacagtgctgcaacaaacacaggagtgcagatatctttacaatatactgatttccattatttggggcatatacccaccagtgggattgctggatcatatggaagctcaatttttagtgttttgaggaacctccaaactgttctccatagtgtctgtgctactttacattcccaccaacagtatatacaggttcccttttttccacatccttgccagcacttgttattgcctgtcttttggatataagtaattttaattggggtgagatgatacctaattgtagatttgacttgcatttctctgatgatcaataatgtttatctctttttcatatgcctgtttcccatttatatgtcttcttttgagaaatgtctattcaaaattttgcccattttttgatcagattattagatttttttcctatagagttgtttgagcttcttatatatcctggttattaatcccttgtcagatggatagtttgcaaatattttctctcattctgtgggttgtctcttcactttgttgattgttgatttgcggtgcagaagctttttaacttgatgtgattccatttgtccatgtttgctttggtggcctgtccttgtggggtattgctcaagaaatttttgtccacaccaatgtcctggagatattccccagtgttttcttgtagtagtttcatagtttgaggtctcggatttaagtcttttatctactttgatttgatttttgtatatggtgagaaataggggtatagtttcattcttctgcatatggatatcgagtttccctaccaccatttatcgaagaaactgtcttttctccagtgtatgttcttggcatctttgtcaaaagtaagttcactgtaggcatgtggatttgtttccgggttctctattctgttccattggcgtatatgtctgtttttatgctagyaccatgctgtttcagctactataactctgcagtgtaatttgaagtcaggtaatgtgattcctccagttttgttctttttgatacctttggctactctgagccttttgtggctccaaaaaattttaaggttgttttttctatttcygtaaagaatatcattggtattttgataggaattgcactgaatctgtagattgctttgggtagtgtggacattttaacaatattgattcttccaatccatgaacatggaatattttttcattttttggtgtcctcttcaatttctttcattactgtttaatagttttcattataatgatctttcacttctttggttaagttaattcctgggtatttcattttatgcgtggctattataaattagagtaatttttaaatatatttttcagattgttcactgttgacttatagaaatgctactgatttttgtatgttgattttgtatcctgcaactttactgaatgtgtttatcagttctaatagttttcctgtggagtgaattgtttttagattttgaattataagcagttactgagttgcagtattcctagatgcaacaggcaacaccatgagaggtgatgtacaggcatacacgtgtatgcacacatgtgaatatatatattttgatatccacatctatatatatggaaaataccagcaacagtatgtgataaagaaaggcaaagatatttacattgaggcagattacttgtaaatttatgtattttgttgttctggtttgaaaaagacatgattattcatatatgcaaaccatggctaagaaaaaaacattgtgcatcttaggacccgtgagctgcccttcagtgccaaagcagttattgctggaagttattcctctgtctcctctccttacaggcttacttcctacttccctgaaagaaagtttgagctgtattcatgtaggcagaaaaaggaactcaaagagttcaggctctcaaacctctttgacttgccttcaaatccaaactaaaccatggctaagttgccatctctaaggtcagtttaccttctggcaaaataggaatcttgagagcacctgttgtaatgaggatcgaatgagataacatatgtaaagcacagagcctagcacatagtaggcacttaaaatgttgttggtgttttttttttttttaagagttgaaatttcatgctgtcacccaggctggagtgcagtggcacaatcacaggtcactgcagcttcaaactcctgggctcacacaatcctcccacctcagcctcacaagtagctggtacacgccmccatgactggttagtttttttttctttctttcttttttttttttttttagagatggggtctcactttgtcacccatgctgctctgaagcgatcttcccaccttggcctcccaaagtgttggggccaggtgcacaacatcacacctggcaaattattatttttaaaacttttagcagaaacagagtcttactatgttgcccaagctggtcttcaactcctggcttcaagtgatcctcttgccttggcctcccaaagtgctgggattataggcatgagccatcacgcctggccaaaatattgatgattcttgtgtgagacaggatataggctctagctgctgcagtgaataacaaacacccaaatatttaaaaggcataaacaaaacagaatgtcatttcttctcactcagaactgatacggaagctctatggtgttagacactcaagctcctcttgttactttgccataatctactggtagcttcctgtgactctaagatggctgctccagcttctgccatcttattcacacctcggcaatgggcaggtggaaacagggagggtagttattcattcattcttttctggctatctatttttgtgtaataaatcaaaaaatttagtgacctaaaacaattaatcatctctcatggtttctgtggaacaggaatttggaaagggcactcctaggaaggcttgtctctgcttcacaatgtcaggggtctcgtctgggaagatttgaaagttggaggtgaatcaatggctgagggctatygccatctgtaagcttccttaactcacatgtctgatggttgatgctggctaccatctttgacttcagctggggttgttagccagaacacctacctgtggcctctccatgtggctacttgggcttcctaactgaatgatgtctrggttctaagagagagccacctaaagagaaccaagtgaaagcttcagcacctttttatgacatagcctcagaagtcaaacagggtccctctactgctcacaaacctgcccaaayccagaagggtcataaacctcacctctcaataggtggagtggcaaagtcacagtgtaaaaaaaatcatgtggtatggaagattgtaggggttatttctggaaagtacaatctgtgcgaatttcacctgtgactgatatagcaacttcgttgtrggagttatttgttcagtcatggttggaacagatattttttgagtgttattatatgctaggcaccattctaggctctagggatacagtagtggggaaaacaaagtccctgccctcatcatagttgtattctagtaggggagacagataatraatagatgttacatacaccactggatagcgatgagtgctgtgaagaaattcaggcagagtaagggtgcagaaaatgacacagtgtagatgttatttagatagcatggtaaaacaaacaaacaaacaaaaaagacttttctaaggagatgacataggaacagagacctcagaagttacatgaaccagccatgcaggaactgaaagaagagcatgataggcagagggaactgcttaagtaaagatttgagatggaataggcttgggttgttcacagcacagcaataaaacacatatgaccgaggacaggtgccatggctcactcctgtaatcccagcactttgggagacccaggcaggcggatcacctgaggtcaggagctggagaccagcctggaacatggtgaaaccccatctctactaaaaatacaaaaatcagccaggcatggtggtgggtgcctctactcccagctactcggatggctgaggcaagagaactgcttgaaccygagaggtggaggttgtagtgagccgaaatcatgccactacactccagtttgagtgacagagcaaaaccctgtctcaaaaaaacaaacaaacaaaaatgtgactggagtagaaagattctgtaggcgagtcagagcctactcacagaaacattagaccaagataatgagtcttgatttttttttcaaggaatttttaaagcagtgaaagtgatgaagcatatatatatgttcattctggtcaccatgtggaaaacagattgtgtaagagggtaagaatgaaagtagaggttattcccctatccaggcaaaaggtaacaataactcaaataggagagtaaccctggagatgggaggaagtggccagatctggaatctgtttgaaaggtaggatcaacaggacctgctgatagaytggatgtrtagtgtgaaagaaagaggggcatggaggatgactgttaggcttgaggatctggtttgcattggaagtttccttagcaccccaaagctagaggcaatatggtacagtggttcatatcccttgacagagactcagggtcaaagcataaagactgagacactctagcagtgaccttgagctcctcccctccccacagtccaagggcagaactggccctatgcactgaagtttagctggcaggggaggattaagtttctcaggtgaggagagaggaaggaagcaggtgggtgggaagcagaagtgttgaaggttatttttgcagtagcagtggcacaagggaatcaggtactcccagagcaaagcacaatggagtcctgaggaaatcaggcctgataattccctcagaatcacagcttttgcctttttatgctaggcacccagtgggcactccctaaacaccattaaccacaaaaatgatgttgttgactgggcagcactgccactcgtttgaccaattatttatgatcattcagctgatttcccactcttgttaatagtcttcaattttactgcaaacacaattaggacacaccaaasccagtggtttaccaccacaaaattagatctcrtctaccactggatgcctttatgcactaaatttatggctaacagacccactaacaaagttccaggcagggttcccctgcctgcagatgtagacagttgtaagaaaagtctagactggagtcagccctaccagtgaaggatggagttgacatcctctttctcagcaactttagtccacctgcttgcttcttcctcaccattgtattgtaaccttcatatatatatatatatatatatwcacacacacacacacacacgcacacacacacacatatatttatgatcagcttgcattatagcctttatatacacacacacacacacmtatatatatatgtatgtatataatatagtttgaatatatgtccctrccacatctcatggtgaattggaggtgttggaggtggggcctggtaggaggtatttgagtcatgggggcaggtctttcaaatacctggtaggaggcatttgagtcatgaggttaactcagtggtgaggtcttcccaatggtgaggccattctcatgagatctggtcatttaaagtgtgtggcacctccccctcaactctctctcactcatgcttttgccgtgtgaagtacctgctcctacttcgatatccaccatgagtaaaggctcctgaggcctcccaagaagctgagtagatgctggcaccatgcttrtatattctgcagaaccgtgagccaattaaacctcttttctttataaattacccaccctcagatatttcattatagcaatgcaagaatggcctaacgccacacacacacacacacatacacatttcttttcaaatctcaattcattcagaagggcagtcttcttccaatttttgctctctctctttctcccatcaccttatgtttcatattcaagtcaaattgagaaaaaaggtttgaaattacatccttttccaaagtcatacaattgaacttttcctctttaggtctatttttcactttctggattttcccctagggtgtagttcttcagtatagttatggaatgctttttcttgatatcaaaatattttccaacttagagcctacacatgtaactatccttctccaccaaccccaacagatagaaaacaaaaccatggaaagtgcaaatccaaagtgaatattaaggacaggctggcttccctttgtatcacactgtgcccactcacctccaccccaaactccttaactcatgtataacctgggaaagcaatctcctgggaataattccagaacacatttagagcaaaaaaagaatggtgaattctctaaataataatatccagagccaactggaaaaatattttgcataactcaaacacccttgattagtacagctgatcagtatttgacttatatttctttgagacatttaacctacagattttctttcctaccttaacgacctgtcaaacacaattttgtaaaaccatcccatgtgtgacagataatcccaggactttctcctagatgtgatgctctaagccttttttctagggcttcgctaggcttcatttaactgtttctggttttatttttaagtcatcaatgaaggtacactttatcttattaaaatggatttattgtatattttggagtgagtaaacaacttgctgattctctaatcttagagactaaagacttggttattttaacaaattgagactctagtcctcactctcttcttactttcctgatacctaagaagtacctcttactaactctactaaactctcacagtcttttagaccctaagtctcactttatttatcaattgcatgtcaaaataacagtaaactgaaggaaaaaacacacaacatcaaatcacactttctgcagactgattgttgtggttttaaaatgtcccacaatttttatattttttatattcctcctttgcatgtagactggacttagtgacttggttcttctgcagataaaatatgcagaagtacctgcatgtgactttcaggatcaggtcataaaattcattgcagtctcccctttgctctctcgtggaacacttcctctggggtgtgggagaccagaaatgcctccctaaaatttgaaagactgttgagctgaagactattaggaagaaatagatgcaggagagctatctaccctccctctgtttgtctgaaagcaggacatacatttacatagatttccctgctctctaccagggagaacaaaggttaaccactgacatcagctttagacacccaaaagctagatgatactagatagccagatgataccagaggaagacaacagccagataataccagatagccagatgataccagaggaagagaacagccaggtgataccagaggagttaatattaacaagcattattaacaaaattttatctgccatttgattgccttcctcccaagttgctgcctgttaagactcagagtcctctgccttgttacttctctacaaatgtactgttttgttgatgatgctatagaagctggaattcaaagccacctctttgagaactattcattcctggatgtctcccatgcatttgtgaaatatatacattaagaaacttttctttgtttttttcttgttaatctgtcttttgtaacagaggtccattccagttatgaacctatgggtattattattttcccccacaaaagaacaagctatcatgttatgaagacactcaagcagcccattggagaggtccacatgatgaggaactgaggccttctgccaaaaaccatgtaaacaaaccatcttggaagtggatcttccagccccagtcaagattttaaatgactgcaaccctggccaatgtcttgatcacaatatcatgagggaccataaaccagagccacccagttaagcttctccataatcttgcatccacagaaactgagataacaaatgtttgttgttttaagctggtaaattttgggataatttattatgtggtcaggagttcaagaccagcctggccaacatggtgaaactctgtctctaataaaactacaaaaattagacgggcgtggtgttacatgcctgtagtcccagctgctcaagaggctgaggcaggagaattgcgggaacccgggaggcacaggctgcagtgcgccgagatcgcgccactgcactccagcctaggcaacagaatgagactctgtctcaaaaaaaaaaattattacgcagcaatagataactaatacagtgattgcttcacagatgtattaaccttttctctatttggtaactgtatcttacacttayattttttgtaagcccctrtaatcagggcagttggttattacacagaaaayatgtgcaacacttaattgactcaaaaggtagtctgtgtattttttaagtaaaaaaaagtttctgccaggtacagtggctgacacctataatcccaatacttttggaggctgatgtgggaggatcacttgagcccaggagttcaaaatcagcctgggcaacatagggagaccccatctctataaaaattttaaaaatcagtggcgggtggtggtgcatgcctgttgtcccagctactccggaggctgaggtagaaggactgcttgagatcaggaggtcaaggctgcagtaagctatgatcacaccactgcactccagcatgggcaacagagtgaaaccctgtctcaaaaaaaagaacaagttytttaaagtgtcatgtttctgatggaaaattgttataataatatcatttattgaatactcttgtatgtgggacaatgattatattacattcatatataacataaattatattatgtttgtatattacataatctataatcatattaaattgtaaaatctcatttcaaccttatcacaacttttgcagttgatattattatcacaattttatggagtagaaaagtaagtcacagagaagatgagtaactcattaataagtggcaaagttagaactcaaaaccaygtcttagaagactattttctgctctttctgtgaccacaaaagattcatttttaaaaaactttccaccrgaaaatcatccaataaacatgtgtgactttgacttaaattgtgtcttatcagacaaagtatctcacaatcttcccatagtaatcaagatcctaaattattatattattgtcttcatccatttagattgtttttgcatcctttttaacacattagaacatatcaaattgatgtggaaactcttaactcagctgcaccccaaattttcctcctgtggtgaaattcttttacattgtaatgagtttactggtaccactgcttaccaatctcattctctattactctcacataggctataaaaatcttagcaagttgttgggaaaaattaattcaaacatctctatcattaaagttaagacaatgtttctataaaaatctgtctcaatttttgaaataagctatatggaaacacacttaatctcagtctcaatagatgtttttttcaccatcaaaatgatctttcagataatttaggtcaaactcatgcaatacaagtgagataattgttaaaaaattttttctcaaactgttataattttttcatatcaaaagtaacaactaacaatggtttcctgcattcacaggtgaatgattttctccaatttctaaaataaatgacctcaaatgaattatttccagagcactatattatattgtgtttgtttctctaactacacaatgttcttaattcaaagactaaaaggatcttaaaatttcttaacaataggtctcattgtcttaaattttcattggtatgatttttcatagaagcagatttttttcctttctcattttccatttgacactccagactgttcaatttgttgaaagacagaaggcctaagaaacacattaatctgtttttccaaaactgtggagctcctacaggcttcttttaacatttgcataataaaaagtacaactgtagtatttctgagaaataaaaatatttcccaatttagctattaggaaatctttttctatacttttcattacaaaagaacttagtaactgggagatcaagcaaagaaaatccaattattacatagttttctctacccttttacttacaattggtctttgaaggacactttttatcctacatcttgctatggaattgtttgtataaatgccttattttcttccccagtagattataaccagtgataagcagatgtgtttcatcaaatgtttgactcttctttaggtcctaactgaatctcttaatgtaaatatctctcaaattaaaaaggccttttatgggacttttagccccctaagacttcagacacagtgttaacaaaaaaaaaaatggctttggtctccacatgaaaactgaaatttgtcccttatccattctccaaaggcatctatgatagatcatattcattggttccaattcttctctctcctaggctagaatacaagmaattttatgattctctctcagtataagtgaaacacattttctctgccttgttgatataaaacttgttttctgacatgcttgctttggccaatgaaatgttaatggaggccttaaatgtacttgcacagtttgatttgcctctaacattcctgctgttcacatgagatgagcatgctgcagatagctgttagttcaaatgggaatgagagaaatgtggaataaatttggatccaacatgtagggttgattcaagttcagctggtactagccaagcacaacagaaccttagccaaatgtagatttatgagcaaaacaaaattaaatgcttgttattgtaagacattgatgtttgggggtagttcgttacacagcattattgcagtaatggctgtctattaaagtgcccatgtcccttaccccattagttctcctatctttgttgaataacttaaatgagttaagacatttcgggcacttggtaagtgttggttgttgttattctgctgtcttatgaatataggctataaattgagagatacaagaccccaaatgtccaaaaccatgctgccccctactctgtcatagtagtgccatccactcatacttacactatggtacagtacatggcacagttgatttcagagacaaatgaatttcattacaggaaaattggtttctagtacataaaaaaatctgagtccaacctcaactgctgagaagtagatttcttgaaatcacaggcaagcacattctgtaggggaaacaggaaggttaaaaggtagaccgttaatatgactctatttaattattaatctggcttcaaaagtctatctacaaaaaccaaagagttaatttctgtcctagctgtgcacaaaggcttatctctatagctatctcagcattactttggaagtaaaaatgttggaaacaacataaatgcacagtaggaaatcaagtaaattttgatgcagatatacaatgggatagtatggagccatattactttcctgttatagaaaaatattaaataatagggaaagatgtccactatatgttgcttaaatggaaaaaatagagttacaaaatgatatttgcagtttgatcccatcttttttaaagaaaatatgtatttaacaatgtgaaaagatattcaaccacacttatttaatggaaatgcaaattgaaaccacatcaagaaccattttcatgtattagattgtgacagacccagagtttcataacatcgttgggtgagatgctgaggaaaaagacatgctcatccattgctcatgagaaatgtaaattcgtataacttgtatggagaatgatagggcaatagctatcaaaattgcatacgcgtatttttgaatcagcaattctaaattcaaattctagaatttcaaatttcgaattctacaaatatatcccaaaatatttgcacttattatgtgcaaaatacaaggtgttctaggttgcactgcatcccctcaaaattatatgttgaaatcctaagctayggtacctcagaatgtgaacttatttggagataacatctttacagaggtagtcaaggtaaaatgaggtcattagggtggaccctaatccattgtgactrgtatccttgtaaatacaggaaatttggacacagaaacatagtcagagaaagaagacgatgtgagaagacagagcagaaagatggtcatctagaagccaatgagagaggcctggagctagatccttckagttctgagacttctagcctcagaactatgatacaataaatgtctgtggttacagccacctagactaaggaatttcattgggacagccctatccaactaatacacaattctctcatcacagaattgtgaaaagaaaagattggaaacaacctaaataaccattaatggggaactggttaagtaaattaaaggtataatgaatttatatatgtatgtgtttgtgtgtgtgtgtgtgtgtgtgtgtgtgkacatatatattcatttattgaataccatacatcattttaaaaagaaaatgctttttgaattaatatagaaatagctccaagatggatagttaaatgaaaaaacaagacacagaacaatatgaaggcccagttggtggctcactcctgtaatcctagcactttggaggctgaagcgggtagatcacttgaggtcaggagttcaagatcaccctcgctagcatggtgaaattagccaggcatggtggtgggtgcctgtagtcccaggtactcaggaggctgaggcaagggaatagctagaacccgggagccggagcctgcagtgagctgagatcgtgccactgcactctagaaagaacaatttgaatattatgccaacatttaggtggcagaggaagaaaaatatacacacataattatttgaatctacttagaatatctctgcaagatcacagaacattgaaatctctgragagaactggacagctaaggttctgaagaaggaagatttttcactttataacctttttactttttgaattttgaaccataagactgcattacttattcaagaataatttgtgtttatgtggatatgtatatacatatagtagagaaattaactaaaagaatataaacatataatcttagggcagtaagatagaggttattttttattmttatctcctttttgcttaaagtattamctctgcaattagaaaaaccactacacttttaaacatattatataccatttaaggataggaacatagaggcaataaagagaattgtcttgttttgctttgctttttaatcaacatggtaggaagtacattaatagaaggaccttagagagaagcttccagctgagaaccagaaaataaaagcaatattaagtaattttcatggttatcttaacttccacatactaagtcaagaagaattactttatttcaacagatgcgaatgcaacagcctattttaattcactagcttgaaatataaaactcatcattcattgggatgccattaaaataaagcctacatgtgtctactctgagattcagtcttcagtaatagtccaccactataatygtgaagaatcaggtgccttaccttcatatgtagactatcattaactacattatatctgaaagactgtctctcagaggagataaataaaattgaggacaagtatwtgagcccttatcagtttattaatgaactagcaaactcctgtgtataatggataacaccatagggctaacygagctaaagacagcaatgatactattgtatgtggagcaaaaccactcccataggcatgctcgaagataacatgaaaaagagagccctgaataatgtgaattttaatgttgactttgaaaagatttcatttttctataggataatctgggtcagcaatagacctgtacagatttgctagtattaaaggtctatggaaagaaattgcttataaaaaaggctgcacaatttgtattttcttgattttacaaagcagacaacatatcattcatagccccatatttatctttaatatgtggctattccagaatgaggtagttcaaatgggtttttcatttgctggtttaaaaataaaatcttgtcaaactcattagagaatttaaaagcattgggtaagaatggttttgcattacaggtagatttaacatctcaattttttgagtcagatccaaacccttctcagtttttattcttctccccatatagcagttgggataaaattcttggctctgcttcaaaagagaaataatacattggtattttatgatgggccttcaagaggaacactgaagtaaaatcatgtctccataattttcatcattatgaaaaatattaaagtatctcaatggtggatactcccagaaattgccttgggcaacaggaggaaggtattcccaagtacccactgctgacccctttgayaattttaaaatatgastgcaaytcctttaacacttctcccatgagaagtggggcctatgtcccctcccttgaatctggactggtcttagtgaccagtaaccaagaaaatgcagtggaagtgatgctgcataattctaaggctaagtgagaaaagtccatgcagcttctttgttttcttggcatgctcgcatagggggatggccaagcgccatataacacatctgattaccctgagaccaacacgctggaaatgccgtggtagtcacatccgctgcaaccatgtgggtaagccatcctcatataaggatcccctgcctagtcaagcttccaaatgactgcagccctggatgacacctgaccccatgagtgatcccaaatgagagcaggttagctaagccctttcctaattcctgaccgtctaaatggtgagcaaaataaaatgtttattttaagctactcaatttgggtaatttttacatagcagcaatcaataataataatcataaaagagatagataatgttttagccttttaatgtctctaaaatctaagatcacaaccaacctttattccttaaaaagtagcatctttccaacctactctgatacttccaggttctcaatattacgttgatagtcaaatctagattttagactaagctaataaaaattggcctgagacgccaataacttcaagaacaattgttggtctcatttaccatcacatacaatggatcattcatgaaagctgaacaaatgctaccatagcagaaaatcggcacagaggaagccgttgttcaggacatgctgaagggtctgagaccattgtctacatagaaacactttccttgagcacaaacattacactcatgtcttttcttatccctaaacatttttctttctctgtattattcaagcgcaagataaagttttgtttttttatattgtcaccaaagcacagccatttctaaggctagtaacacaggacacatctaaagatggcagagttcatgataaaacttagtgaatggtccacaattcatccacataactgattgttgcaggacagttaaagccccaaacctaaatttattctacataaaaatgggatgattcaatagattcactgagcttcagttctcacttgatttgccaatgaagccaagaacttcctgagatgggtgagcgttttcaaatgataaatgacagagcaccttgaccacatccatttagataacctccatgtggcgttaggatgaactcaagcaaaacagactgactgaattttgcagttctgggtccagttcactcatgacacttgtctcatcataatgacaaattctcaagcagataagcaggggagccatacctgtacctcatctaaggagtgattttaaaactctttcctgagttgtaatattctatatgaataatgtgatgttctgctgcaaagaaaattcaaatttcttccttacagacattttaatgattttcaatcacctaacctcgttctagatcactttctctatatatcaggtgaaattcaagttattgcttataagcaattattcaaaattattcaaaagaagaaatttaatcaaaattataaattagytttagtaattggaggcatttaaataaagagccctgtatgatatcaactgcatgccccataccctccaaatggttgatataagatgggcattcactgtgtttttttgaccagcatccactccctcttattctggaaactgaacccttattttccttgaggaaacttaccttttcctcaccctcgagccctacattttgtgagggctttaggcaaggaagatataagatcatttttgtatttttataaagtaagttgatctacattgtggagaatgagctttaggggccccaagatggaatcaggaatatcagttgaggagattgttgtagaaatcccagcatgtgacaattatgtcctgaaccaaagttgtagtaatgaagatgaggagaagaaataggacgaaggttaaagttattgcagattgactggagagataagtaaagggaaggacaagggagacataggttgcttatttgcaaatcttgtgttctgtcgcaaacatctaggggatagaacccatttctggttcattctagtatctctcacttaaggatgccttggttgaatccaacctagtgtgatggttaagagctcagattccaaagccaaacagcctgagtttgagtcctggctctgacacttactagctgtatgacttaagcaatttatctggttcatttgtgcctcagtttcctaattggcaagatgaaggaaatgattagacctacttcattgggttgttgtgaacattaaatgagctattccatgcataatacccagaatagttctggagaatagcaagagctatataagtggttgatggtatagtctcaataaatattataacattcaactaacactcccccagaaaacatatattccaggggaaaataaaaggatcttttgacataacttatctgggttatttgcttcttggtgctgaaatggagaaaagttacaagctactttctgttaaaaaatattacaacaatattttaaaaagaacccccccaccccgcaaaaaaaccctgacagaataaaaaataactgttaacaggccagaatcaaattgggaaaagcaggatgccagaaggcaaaatctgaagcacatgctatttaatatccttattaatggtctgaagcacaaaataaattgtacattattcttatttgcaaaaaatcataaacagtgaaaaatagatcaacagtacagaataatccagagaccttggagaggcacaccagtttaaatgtgatgagttcaatttacaagaacataaaacaatacactttgggaaaaatactacgaggcacagacataaactgagaattcttctaaaaagcaaaaaggcttaagaggatttggggtgatagtctacaacaaattcatgagagcttccaatgtgctgctagtagaaaaagaaggcagggaggtaaatattctagaagaggagcaatacgaaattactggtactgagagagctgaatactacatgtagtaatggcagttattccaagtcaccttatgattttcccatttctgctttagagaagtacctaatgaaagcagtgtggccattcttcaaagaggtaaaaacagaaataccattcgaaccagcaatcccattactgggtatataaccaaaggaatataagccattctaccataaagacatatgcacatgttatgttaattgcagcactattcactatagtaaagatatggaataaacctaaatgcccatcaatggtagactggataaagaaaatgtggtacayatataccatggaatactatgcagccataaaaagaatgagatcgtgtcctttgcaggaacatggatggagccagaggccatcatccttagcaaactaacgcaggaacagaaaaccaaataccacatgttctcacttacaagtgggagctaaatgatgaggccgcatggacacaaaaaggggaacaacagacacggaggtctacttgagagtggagagtgggtggagggagaggatcagaaaaaataactatcgggtactaagtttagtactcaggtgacaaaataatctgtataacaaaccctcatgacactggtttacctatataacaaacctgcacatgtacctctgatcctaaaataaaagttaaaaaaagaaataaaagtacctagcaatatttccctctctatgaaaatgtacatcttcatctctatacttctgaaatagcaaggaaacataaaaaataagcctgggaaaacataaactgggttttttttttgttttttgttttttgttttttcacagcagaaataggctcccaagtgaggaattcctttaaggaatttggatgaacaataacacattgttggaagctagttagcttcccaaaagatgagttattatagacatcaggttttgccatagttatctgtaaaggaacatcaaggataaacacattgcattcattaaattactcattaagaaaaaatttattgagcaaaatgtaaataataaaggcaggtggtgtgtaatgtctagagacacaaaaatgagtgagatataattctcctgcatgaaacaggcccttcagtrgatcattataacctggtatggaaaatacagcgatggacaaacacacagcaggaacccagaaagtgtaagctctaascccaagcggcggggagagcagtgcagagcagagatgggagatgctctaagcagttttagaggctggaggttcaggctgagaaaggtgagaagtgacaccaaaatttwaaaaaaaaaaaaaatcactgggtccttaaagagtcactgacaagtgttaagtcaggaagggtgagagtcaatttgaggttttataaggatcactctggcagccagtttggaggctgaatttgaaagaacaagtttggaaagaaatggcacctaagagtccaggtgagcaatgctgtaagtgacatctggcttttttgcctgggctgcatccacaggcggcctcatttctacggaaagagcactctgcattggccttggggaagaccctttctgcagggtctacactgcactggctgcatccttggtttagaaagaaataggcaggagacccaagctaggctaattataatcgtatcatcctttctctctccctggaacttaaatcatgtgcccaaaaactaacagacggaaagcaatgaagctactttaccactatggcagtgtccttaggagacctcactattgtctgtcaccaacattccctgaacccccttcttgtccttctataacccttcttgcccttcctgaggcctcagctttttccttggattctgagaccctctcctgccccctcactttttttttttttttgcttaagttagccaaatcccattctgttacttgcaactacagaagtcaaactaataaaggactgagtaatccttaggagatttaataagtttctatacacaaaataactacatacttattaaaaatatataaaataaaattgtttctatatgttgaactatttttaggtaagtatggctaggaatacaatcatattcacacatacaagtttttttaaggcagtatgtaccaaattacaaatatttaaaagtcctgaaactggcaaaaaaaaaaaaaaaaaaaaaaaaaagagcaagcatttataactacagttgacccttgaacaacatgggggttaggagcgcagactcctgcacagtcaaacatccacttataacttttgattcctccaaaacttaactactaatgtcctactgttgaccagaagccttaccagtaacataaagcatgaatacacattatatatgttatataatgtattcttacaataaaataaactagaaaaaagaaaatgttattaagaaaatcttacagaagagaaaacctacttactattcattaagtcaaagtggatcatcataaaggtcttcatctcattgtcttcacattgaggctggagaggaggatggaggggaggggctggtcttgctatctcaggggtaacagaggtagaagaaaattcatgtataagtggacccgtgcagttcaaacccgtgttgtctgagggtcaactgtacttcaaatcaatcttttttaagtttaactgtaaaatttatgtttttaagacacaagtaattttactttccaaaataatgggtttccccaattagtattagaagatgtttaaagctctactccaaatcccttaaaaacttattgaagaggcactaaaataaagtcatgacatcaagagaactattgaacagtaggctccccaggcatttcccctcagggaaaatgggtagagtacttaaaataattttttccattaggtatagcaatgaatcaatttaaaattattgagtggccgacattgtaacacagaggaataatgttctggaagtctcatttaaattactgacatcagatatttgaaaatgaatgactatggaatctgcccataggtaagacaccatgtctgcaattattctttcaatttcaactagggagatatgcttttaaaagcttaaaatgaaaggggttttttttwaattacatttcccattgtatgtataattgtacaatcatggacacagacagggcccttctctttctctaataattggagattttacagtgaaggccaccctgacccaggagttaaataccagctagatacagaaggtcaggtcacactcctgctcaacaatctttaagggttttccatttctgtcaggacaggtacacactgatatgtagctttcaaggacatctgtcatcctttccaatttcaacctgaggcactgacaaaaatatgctcaatttcttgcccttagatcccttcctgatgtattctttccccactgccaccatttctgtctgtctgtccaaatccagccagtgcttaaagatcacctccacttttatctcctctgtgaagatcactgcagccacgcagaccactctggtttattcctcttccaatttccttctaaacttacatccttaccagtcactggcaatcatcaaacatcatctagtatcatgacttttcttgttatcatgttcattactatttccatggctaggacattcattcatccatcaaatattccctgaattcctgctaaatgcagacatggtcctccgaacagagaatccaactacaagcaaagtagacatagatatagtctagttgagagactgtttttttaattattattcaaataatcattcagttgagaatgaaattgttggtgtccagtgagataactcccgctttaagtaatagaaaagcttcacctgaaattggcaaaaacaatatgaacatttgccacctctcgaggaaaatttggtggtaaggtgactccacctgcttgctggtgtctcagagctgccctcctctttctgtgggctccatcttcaggctggcatcagcatgactgcagctgttccaagcagctcatcctggtcagcagacgcagaaatggactgttgccttctgaatcctcttctttttccgagtctcgcactgtcgcccaggctggagtgcagtggcgcgatctcggctcactgcaagctccgcctcccgggttcacgccattctcccgcctcagcctaccgagtagctgggactacaggcgcgcgccagcacgtccggctaatttttttttttttttttttttttttttagtagagacggggtttcaccgtgttagccaggatagtctcgatctcctaacctcgtgatccccccgcctcggcctcccacagtgctgggattacaggcgtgagccaccgcgcccggcctaaatcctcttcttaacagcaagaaatagcatctctaaagtcacctagcacatattcccttttgtttcattggcccaaagtgggttatgtgcccacctcttaaccaatcattgtcaatgggatttacaaggagatggaaataaggtgatccgcccctgagtcgtgcaggaaggagcagatactggagcaaaattcagatttggttattacaggaaaaggtggggatgtatgatgagcaggcaactagctgtgcctgatgcaactacctaacaaccaagtaggggcaataaggggaagaaatgtgwtctcatgagagtaagtacaaagggacttacataacaaaggacacagactggtgtacaatggagagaagtggtcacctatgccagatatttaggaggttaagcttccaggccttaacagtgaagtggatagcacggtgagaaggatggcagcatcggaaatgacttccatttttctggcttgcatctgccttgaatcagtcaactaattgttaggacgattttctgagctaggaaactttggaaagagactaagaggggaaggaaattaaatcacaatcccagttttgtgcatgcacatgtgtgtgtgtgtgtgtgtgtgtgtgtgtgtgtgtgtgtgtgtgtgtgtttaatcctttgagacattcaagaagcaatgtcaatgaggcagttgggtgtatagttctggagctagaggagctatctgggctgaaagtgcaaatttgtgaaacatctgtttattgaagccatgggaatggatgagattttccagatggagaaagtaaagactcagaaaaggagatggctctggactgaatctcgagaaactccagtatttaatgacaagagaaaaaaaaatagctgaaaagagggtggagacagagttgccagaagatagtagattgcaaactaactggggcaagaacttttgtatcctccatctgcccctccaacaatagctagcacatgccgtactcattgcaagcactcctatcatatttcttaattggctacaattactcctttcatttaaactcctttaactaataatcatcataattcatacccttaaaaataccattattaccaaattataatatctttaatatacaatgtagcacttcatttgacacatatggattacagccatgagaactgcacttattcacatacttgtgtttatttccccagccacacagtaaactcatcattggcaatgaccagctcttatattctttttgttctcaaggtcatagcacagtattttacccacagtagccctttagcagatgcttctcgaaggtacttaaatttattctgacatttcccgtatatttataatgtcctttattctaggcaatagaatagacttactgttcttgtattgagtttacagccaggcctaccttatgttgcaataaaaaggcctaagatgaggaaccaactagtctatttctaatccaaacccatcacatttccaaggtcaaaattatcaaaaggcattttttccttaactgtgcctttgccatttaatctgcagctcattatttttctaatagaatggttaataatttaccaagtacaaaaatgaagattgtgccttcgaagaaacatgcccccctcccttttttaaccagataattgctagtaacattagactgctgtcaatcaagcaacaccattctaattttatgctctaaaatgcattaggattcatttattctctgtccctttaatagccaacatttcaaattaattttagaaactcaatagataatgactgtaggctgtcccatttttaagaagctaggtcttaaactcaacctgtggtcatcagtggacatctgtccaccttgggatcgccagtagagatgtgtcaaacccattgtcttctgtgcctctagaatcattttaagtaaaggagcaaataaatgcctgtctgtataggtaacataaaaatgtcactgcatgcattttaaggaagaaatccatcttcaggaaaacaaaagcatggcatggtcaataatgaagaagagagttggtgaacaccgatatttaagtcttaccatgaaaacagccaaaccagaaatttcagaatacttctctccaagactatcggaatttcacagtgcatcaatgacgttttcactaggaaaacacccagctcacacttttaccatttgtgaggacccaaaacgaaagagctgggtatgttataaggtgctttggtgccaacctgtataatttacctgctttgtatcctaaagctttgtgtctaacaggtcatcagttaagctatcaattagtcagtaaaacccatattgagaaccttctgyaagtgcatgtggagaggaagcaaggctgtaccagcgagctttccaatctggcacctttcattaaattctaaagtcacttgtctttgtctctgtattaaaagaaataatttcatgtccagtcccacctttaaaaagtgacagaaatcaaccattcaatattcattagttcttcttggcaaccccatttagctaatggaaaatcaggtacattcatgtgcaattattagatattgaaaaattataaaatgtccaacttctctttttacagcacacacactcccaagttgtactctacagttatgaaataaacacatgcagctgcaacatctcaatagaccttcagataattggcaagttttcagtttgctgcatctacttgtagcatgaaaagcagccagggattagaacttcttcatcaatttaactctgctgtactttttcctgcaaagctatatgcctagttctcacaattgtactcgaactaggtgaaagcttaggagggtgggcagaggtggggaactctgtatcacttctacactctgatggttaatttcaggtgtcaacttgatgggttagggaataccctgatagctgataaagcattattttaggccatgtctgtgacggtgtttccagaagagactggcatttaaatcagtggactgaataaataagaaccactttcatccaatgtgggtgggcactatccagtgttgaggggcttgtatagaacaaaaaagcaaaggaaaggtgaactggagtgcactccctctctctctctcactaagacacccttcttctcttgcccttgtacctcagaactccagattcttgggtctttggagtctgggactgacatcagcggccccccagattctcaggcctttcagccttggactcagaattacaccatctgctgagccacactactggcttccctggctttccagtgtgcagacagcatatcgtgggacttctcagtcttcataatcatgtgagccaattcccctaataaatgccctctcatttatctatctaccaacctacctacctttatcctattagttctgtttctctggagagttctaactaatgcacacattttcttgacatagccactaaaaggccagtgactgggagagaggtccacattggtggttgatgtcattcactctggagtgtctggggtcacctatgtgatttacagcaatctgcctcatgtgtctcagactcagcttctttgtctggaagatagagataatactaaggccagggccagggctagggtgaggcaagtggggcacttgcctcagtagcaaaatatacgagagtgccaaaaactcagtagtcaagattaataatattgtcatgcaatatttcttttaaagtcaaattggtcatctacagcaatctattttcataaagaaagcttcactggagccagggccagttttagggtgatgcaaatgaagtagagtcatgcaagtacaaggttggatcctgtctttagttaaaatgttgacattttgtttagcattaatcgtttttggattaattttgagtttttaaagtgttgtgtgaaaatattatttatctccatgactgagtcttttggtgctcacctacctcactctrgccctgactctgatgagcacctggcattactggaaagattcgatgaaacagtgcatccagatcttggccccttggtgtctcctcactccatatcctcttggaccccctcagctgagtgcacagtgcccatgcatgcttccaacctcatatacccagcctctctctttctcttcttcaaaaatgccaggaatttaatgcctccagggggaaccctcaaccacagaggacagtagttggttaatcaataccctcattcaacatatgaagctttcttctaaaaggctgctgacaagcagggaaataccgggactaggatgaggcaagcaagatgcttacctctggggcaaaattcaaggaggtgccaaaacctaagtcacaaaacatatagtgttttaatgcaatatgttcataaataatgagccatcaagcttaaaaataatgtgaagatccgctttgaaccccagagttggtatacagattgttttaagttgaagacatttgagattcaacagatgcagaaagaagccttcttggggcttcccttatctgactaaaagcacagactcctgggaaatgaggctgccataaattccctcttcagggcagcttttactcccaggaaggagaccaagagtaaacctatgacaaatcccttcttgagggagttttatgacaatgaagaaaatgaaaagaccactcaaacttgcataaacaagtatactacaaactttcttctctcgcatttatttttctagaaatccatttgtctttcctaaagaccttcatctggtcctcccatagaggccttttctccctcctcccttttccctactaagttagatctgtaaatctctaaccttaaccattaatcatttatccagctacttcttttttaagatcatgtgtgcatatgaataaactcttctttcttctgttattctgtcttttgtcagtttaactcacacgcccacgggtaatraatctcagaaggtagaggaaaagttttttctgccccaatcattagaaattatgatggtttgatttgaggaaggtcttatgctgcacgtcatttcatctctatctgagactaaggctagaaacataagagtcttcgaaattaacagaagaaaagggtagggagagataatgagaggaagagtcctgtctaatgttcaaatgaacagaaactttcaacttgccagggactctcttcattttccattttcaacatcataacactttcccctaacaacagattatttattacatatgaaatttatagctacgatgttttttgcaaagcagacaatgagacaaacattgacaaacacatttggccccaaacacattttttttccctttagccaaaaaccactttttactttcttgttaagagaggaaaacaaatccaaataygtgaagcaaagaaagggtctatacgcgtgttttaattaatttgtttctcccatcaacctcgtttttagaagaaagccaagtagagtctgtgaagagcatgtatggtatgtatgtctagttcagtgtctgttggaagagctctctttcctgtttatactcaataccctacaatgtagtaaacctaaacataagatttttctctccataatctcacagcggcacaagattttaaaatctcttgtctttgccagttttacctcactgcttcactgagccaagtgctcaagaaaatgaatatttgctgccaagggggattggagaggctgtctggaacagaggtgcatgggaactgtagtttgttttgtatttagctccaaggcttccataagaagcacgttaccctaaaacaaataatcctggaaggttgggaacatgaaacacatgtctttgctctgtcagaagtacatcttcccttcctttttgattttgtgctatttcctagaggaacctatattctcttgagtagtatctcactgagctgcttctgttcaacatggaacataatcttcctcctgcctcttgattttcaccattgctgcctctgtgattataacatataccagccagcattttttttcacctctgcacatagctaccagacaagcaggcattagcttcatcctatttgcatctaaaatctagagacccattcccagaagagcccatgcagaaaatactgatgaargtcaataataagtaagagtagtagtgacagcccactaaattcagcagcactctggtaaccttcctggaaataaatgcaggctgtaagggggtgttttttcttcaaatatatttcaacatattttattgaaactacatgcacagctcaataagaaattaaaagatgagcaagatttctttttttcccctcagcaaatactatatcctattaagctacattagcttaatgtaaaatgaatcctattttaatctaaattagacattaaaaatacatactttttcctaaggagctaggaaatatcttagccaaagtgctaaccacaccatgtaacacccaagtaagaggatgttgggtagttaaaatgcctaaaagttcaacaagcttacccaagcataaatgttgccccagaagaatatattcaaccattctacacaccttgaaatgcaagccattccagtgtagtttaagttagttgtgggaaaaaaaagcagttggaaaattagtcttaaaaacaagtgataaattagtgctagtagaataaaatctgcaatggaagaaattggccagatttttacaaaattatataaacagagtcataatgtataacttgtgtctgttacttagctcttatgctttcaaaagttgaatttcctttcaacagtctcaaggtcccttaggaatatttttcaaaatatattcagagatagattaaccagattgctccaggaatgacactttctggttaatttaattaaccagaaatccctatacaccagcccttactgctgaaattcttcctagattgcctttttagggagcatgtactggacttcatcttcccttgagaatctaacatgctggatgattgagcatcataaccttttgcttctgaaaatgaagcgaaggtttggttgcattggtacagaaataaggccctatttgaaggcataggaggaaatataggccatactcatatccttcttctcccttgccctattgagatatcaaagcctacctaacttagtcgggatcaggcttttaaaattgggggataggatggcttattagtcagggttctccagagaaacagagccatggggtgtgtacagagagagatttattctaaggaatcggctcatgtaattgcagggactggaaagttcaaaatctgcaaggtaagcctacagactggagaccmrgggaagaggtgatgttgcagagtccaagggcaatctggaggcagaattctcttggggatgtcaatctctttttctcttaagaccttcaattgattgggtgaggccaacccacattacggaaggtaatctgcttttctcaagctctactgatttgaatgtcaaatcttatctaaaagaataccttcccagcaacatttagactattatttgaccacatatctgggtactgcagcctagtcaaattgtcacataaaattaaccatcccaggtggggtgaggcattgttgaagaaggcattgttgaagaaaatcttcaacaagcatgaaaaatacgtggactagaatcagagggcaagttcatctgctttaccctgataggtcaaagcaagagaagggaagggcagaaaggttgattttattcctattagtcaaggtatttttttcttttaatcactagctggtttaaatatctacttatgttctcaaagtgtcaggrtccacattaattgttctaatgttccatagctttgctccaggaaacttgtgaagtgtctgaggtagtagaaagacaccataatggataacaatagggaataacaattgagtactagatattttctatgcattcgtttattttatcctcataacaaccctctgaagtaggtaccaatatgttatcatttcatacatgaggaaactgatgactagaaagctaaagtgaccagctaagatcacccagcaatgaaaagtcagaatagtgactcaaatgtccatagaatcccaaagcccatgttcttacacaacatattaaactgcatccttgttttcttttattaacgctccagtacatatcaactgtgtgctacaaataaattgtgtgctgtttgggctacaaataaataggaaaagataagctgaggatggttgttggtctgctccctgcctttctcttttgccttcccacttaaggaaccaagccatgccacctactgcatgccaatagtgggaatcgcttccttatgtatttccttgaagggttactgaaaaataaaatgaaatcatcattgaggcacagaaaggcaatttaagtatcaacagccaaaacaggcaagggagctaaatgtaacaagtacaacgtgggatactatacatgaaagggtattaaaaaattgccatcacccaaagtctaccctgmaaacaaatgcaaataattctatgcattgagtattcatgtaaggatacaatgcagtctgtatcctcaagaagctcagactcgttggaaaaacaaaattccaaagtaagggcaaaaaaattattcaaacataattaagcaccaacaataagtgtttcaggcacctctgggaggtaagaaaaaaaaatgctggcaaataattggcttctgtcttccagctcctccaagaaaactcaaagaaaattgagacacctgccaagaggcagcgaaaatcagtcagtgccacctttcaaaagtggcatacttcaaccaggaactttcagctcaataaagccctcaaaacaactggctgtgactttccaaatgtttcatcttcacaagctttgcttacataagctgcactcaaggaaataaaagcaaccatgagtttcgacaacattaagtaataatatggtccagttggcaggagctgctgcctctggtctccagcacaggtgggatttcaacacagcctggggtatcctgcctctgtttctagatgtcccacaatggcaaagcctgcctggctcactcctgttccttcagcacccaatgtcttgtctggcatatagtgggtgcccaataaacaagcaaatgaatgaagttaacaatcagatgaaaaactgcagggtaatttggggatggtattcccttctatgggttccttctgtaattttatgatgctcatttcaaacagagaagcaggctttggctttctttgtttcagaagaggtctgaagtcagttgcaatggctatcttgtatggaaatccagagtcactgaaacaactattatggattttctggagctgacagagagagggaagggtaactttaagggctggaggaagaaagagggaaacgtgtctcagggaagttgggaaagaagacagagattgggggacctgctaaatagctaagacttaaggcccgttgtggcagcactctgggggcactcaacttccacctcagccccaattccagcacctcaagctcaagaaagtctgcaggctgacaaaatgggtgtctgcattttacctccatgcacttcttgagaccatttgagacccaagagacttttgcacggcaccctgggtagggggcaagagcaggaaacatagagaagaaatgtatcccaataatggccaaggttgaaattaaacccacccttgcaggatgagaaaacttaaggaaagatttaagaaaactaacaaaggcaattattcttctgactgtgagattataggtagagagtcataactgctacagcagtttacaaattgcaaacaagtgtaaagctctcaactggtgatggatttatcatccagtgaagcctgatgagttagcaaatattgttttgcatagagcacatccatgcaaagttatgctagggtgtgtggatgccaacatcacatccacacacctgtcgaacatggggcaccaatttggagcctcagggcaggattcacatgtggccctatccagcagtttctttagcctgactactcaaattacatgtcaattccctaggatttataaattcatcctagtactaggacttacggttcatctttatggccatcacactgtctaatgattggcactcaactagtgctgttaactagtgttattaaccaacaataataatgatgaaaataacaaaactgaaaatagtgctatcgttatggagttctcactctctgccagggaatgcactgacctctttacgtggatcagtgaggtgaaaaacaggaaaaaaaacaacttcttattttgtcattttacagataagaggattggtgttatcttcattttacagaagaggaaatagagacttagaatggtttttaacttgctcatgtttatggtaaaggcaggattgaaactcaggcaatctgactccagagcccatgatttttaaataaaattttattatggtaagacagattttaaagtgcacaatgcaatattactatctataggtagtattgtacagcaaatctccagaacttattcatcttgcataagtaaaactttatacccgttgattagcaactcactgtttctacttctccccagctctctggcaatcacaattccactctacttccacaaatttgactattttacatacctcctatgagtaaaatcatgcattatttatccttccgtgactagattatttcacttagcataatgtcctccaaggttatccatgttatcacacatggcaggatttctttctttttgaaggctgaataatattccactatatgtatatataccacatttaaaaaaatctatttgtctgttgatggacagttaggttgttgccatattgtagctattgtgaatagtgctgcaatgaacatcaagtactgatatatctttgagatcctgatttcaacacccagaagtgggattgctggatcatatggtaattttatttttacatttttgaggaagtttcatagtgttttccagagcagctacaccattttgcattcccaccaacagtgtgcaaggattccaatttcttcacattctcaccaatgcatgtcttttggctttttcataataaccatcctaagtggtgtgaggtgatatctcattgtggttttgatttccatttttctgatgattcatggcattgaacgtattttcacataacttttgcaggtcttctttggagaaatatctactcaagtcctttggccatttttaaatctgttttttggggggttttttgctattgagtcatagtgaagaacccatgcttttacctattacaaaatattgcctcaatatgcagttattaacaaacaaataagtactaagtgttcaaagatggttccacataatatactgtccaagctacaaagatccagaagttcccaacctcactatgtcttttaatgtcccagttttcctaccactggagaaacagcaacaatgacctaccttgtattccagcattcaggtaaacacccttccagcaaacacccttccagctaaacattattccctgtccaggcatactccccaacataattatgaaggcagcattcttcctgctagacccaaagaactctgccttactgatttccaaggggctgggattggagactccagggaagagatattacatctacaggagcaatagtttgaaataaacatgcacacacacatgcacacacttatgtgtatatatgtatatgcatatatatatacacgtatctgtacatatactatatataatgtttttatttggaggagtataaattacatattattctataatataaacaaccatattcatatatggtttataaaccatataaactatattcatatatggtttataaaccatatataaaccaaatttggttttttattcatattttactatgtgaaatatagtaaaatcatcttggatagtggggaggtcaaaaagattgatgattttcaaagatgaggggagtaagttttgatactgggagctaacttattttatcttcagaacacctctctgaggggagcccttattttagtttgggttcccaaactaagaattcggttgcaagtgttaggaagtgttcccatgactggtggtggtggggaaggaagcaagaaagtacgctggggaagggaaggaaaggaagccaagaaagggtgccttacaagcaaagtcttacctagggaaactgctcagtccctcagggaactctggagacagtgtaggcagtgattctcaaagtgtggtccccagaccagcagcatcagcattacctgggaatttgccagaagggcaaattctcaggtgcctaccccagacttaatgaatgagaaactctggggtggagcccagcaccctgtattttaacaagtcccgctaggactctgatgcacataagagtgtgcatgtagcacacctccaagttgtcgtgatcaggaaagggagccagagtatttaacccacacctatcattggttaagtgctagtgggagagaaagtgcatcagcagctggcatttatgacaattttaagagatccacatggtctggagaggcactgactgtgtctgctagggaactcttactctttcttttccaaagaggtcagtgaggccagtgtgacttgcccaaggccacacagctgatcattgtcagaatcaaaattcaaatctagatctgtctgacttcagaaccaatcttttaaccaaaatactacactgcttcaagatgggcattggtgaaaaaacttgtaacacctacacttctacaacagctcaaggccccttcctcttgccttctctggcttattttgctcaagtaaacattttcactgaatgaaccaatcacttaggtttaaatatcaacgacatgtttgcataacaatcattctgtcagtgacaaatctatttccttcatttagagagcttcaacaccactaacctaaaagatcaattgagggcaggattatttccttcttagaattttatgggaatagtgcattctacagagactatccaaaatagaaaagcttgccttctagtccagtctgtagtggtatctatttatattttcatgaaaggaagtatacataataacgactgtataaatttgttttgcaagtaatccaaaataactgcttggaaagaatcatgattaatggaaaaatttccaagtaatagcctttcttttcatcaacgcagcaacaaccagcaaaacttggagaatagctatttcataagtgtgatgattcaatgcaactgatttacaaactgctatgtaacatagggtagtatactgttcctcagtttgggtttcatagaccccccaagactttatagactgtgcattgcctttcatgagttgtacaagtgttttattattgtcacttaaattataatcttaaaaaaaatttaacggtcataacaagaaaacttctgctgatattttctagttgaaaaagagtctaattatgttaaactacatcatcactgttgtttctgcaattaaagtcttcagatgtatttcaagcagttcacccagtttttcctgtacaaacagcccatataatactcaagtttgagaaccattatatagtgaattggacccttgctactcaaaagtatggtcgctggatcagcaacagcagcatctctcgggagattattagaacagtataatctcaggctccatctacatccactgaatcagaatctgcactggattccagcacaagaggctctgagactggatcccaacgccaacacttactgaatgtgttatttaacctttctgagtttcagggttctcatctgtaaatgaagatgataatgtaaattcctacctcctaggttttccatggagattcaattaaagaatgcacataaaagatgtcaatcatatagtgtaacacaaagcactcaataaatattacctattacaatattttcctcaaaacagcaagaataaaaatatcatataggtggttttctattttagccaataaaattatgcatcttcaaaatgctcayggctgacattgcctttgacatttggggaatatacgctcggatttcctactaatatgttagtgaatgaaagacttaatattgagttgtttaatggcaatgtgtaacctgatagcttatcaaattctctgtgcagaacaagtagatttccagaaacagcatttaagctccacttgagagaaaaatatttgtttgctgcagaaattaggagagtcaattggaaactctcctactgatagacttgcattcagaagaagactcagtccatacaattcacatttacatcttttcttcaaagcccctaaaatattgactcatattttaaaacacaacatcgagcccaattcaaagtgactgaaattaagacacacagcctcatcatgtcgttatggcaacttctcacaaaactgtccttttagtcattgaacaattgctaattttcttgctttgcaaggaagccccagttgcttcctcagaaggctcagcctggtatcaaaagaaattgtatatgatggagatagaagcattcacaacggtcacttttgggaaaataacattttattattagtcacgctttgcatttcaacttgttttcctcctcagcatgccatttgtggtgtctctgatttctgttagtttagcagactgtcacaataaagagactggtggaaactttgctttctttctaaatcgcaggatggtacaaaactccaaaatcatcaaaaactgagagagattttcagatggaagctctctcatctctgtgtccttcgagtctaactaacatgtctactggatgaacagtagagaatcactgaagtcctaacatgtattttaaagttatttacatattttccaaagtgcataagaattattttagtattttacttttgcaggactaaactggaataatttatgaaacaaatcaggtatttgatgagtggtcataactagaaccatccttggaactcaatgaaagtgtttaaaacaaagatctttattcatgaaacattaacaattctgagaaactgttctagattaaaggaaactaaaaagacacgataactaaataaaatgtggtatcctcaactgaattctggagtgaataaaaaagcagtctaaggatattattgggacaattggagaaatttgaatatgagcagtatattagataatgatcttaaggttagacgctcaaatataatcagtgtactgtgattatgcagggtaatttccttgttcttagaaggtgattgctgaaatatttgctacaatgtctgcaattaattttcaaatggtttaaaacatacatatacattcatacatacacatacacacactataaatagattaaaaaagcaaatgtggtaaatgttaacaattgacaaatccaggtgaaaaatataagattgatcatcgtgctattcttagtaataaaaagtggggatgggaagtcttttttgattaaaggattcaaatctgatgggagggaaacggaaaaaaataaagattcgggtaacaaggaaatatgataatctgatagtgtatgaaattttacaaaaattcttttaggatcaaaagcatccaaataagagtcatctccatagagataatatttgacccgaaatacatagatagattttattacacataagaaaatacctttaaaataacagaactagagtgaaattatccaagacagctacagaagtgccagaaatagtcatgaaagcaagcaagcaagaaagaggactagatatcttagacctgtcatctcagatgacaagtctatagacagatgacggacagagcccagaacctcagctttcaaccacatgtgtaagcattgcagccattgcatggcctctttcaaaatgtctaaaaccacacagtcactgaactcatcaactcataagctttcaaaacagcagaaaagatccaataaactagtatagtttctcaaattcatcttagtaatggatataaatctgacaaatattccctttattcaggtctattttttttgtaaactcttttcgtattttaaaaaactgatcaatctaattcttctttcagttacatccttcaaaaatcattaacacacagtatatggactagtaaagtgtgtgagctgtgaagtcagcttgccggaggttgaaatttactagctatccactcttaaccttttggagtctcagagtccttatctgtaaaatggggcaaataaacatcttttttagctcacagatttcctgtgctggtcaaattaggtatgcttttgagatcgagccagacaatattatttgtaactcatttcaatgtatctatatccatttatttctttaaaaaaagagataggaatatttgagagctacacacagcacaataccttgcctacagtaaaaagactagtaaaaatactaacacataatcatgtagggttcctgggaaccccatagagaggaagaaagtatataatagacttcrgtgttttcaaaacctgagtttacatctctaatttcttctctttagctgtatattctttgagatacttgagatctttctggttcatgccctcatctggaaaatggaaataataacatctctgcatggagatgacaaagtgtgggtacaatgcctaccacactgtagctactcaagaaatggaagtcacaatcattctcatgccaccagcctactgagcaggtaagtttgtccaataacgtaaatgtatgcaggtaggtaccaaattttaaaaatgataacatttcagatagcttcagacatagtccatagctaytgaaatgtttaccacttctagcaactgactttgtagacacattgattgcattttcctttggtttactttttaactgaggtataatacatgcagtaaatgagttactttttttttttttttgagacagaatctcacactgtcacccaggctggagtgcaatggcgcgatttcagttcactgcaacctcccgggttcaagcgattctcctgtcttagcctcccaagtagctgggattacaggcgcacattgccacgcccaactaattttctgtattttagtagagatggggtttcaccatgttgcccaggctggtctcaaactcctgagctcaggcaatccacctgcctcagcctcccaagtgttacatttttaaagtgcactaatcacaaggcacagcttgatgaacctgtatatatacacatatgtacactcccatgtacccaccaccttgactaagatgtaaagcatttccagcatcttcaggctgcttgcagtaaatactcatccccggagggaaccactcttctgacctctgtcactataatttcgttttgcctattcttgaactttgaataaatgcaatgatactgtacacactcttttctttctttctctctctctcagtgtgtgtgtgtgtgtgtgtktttgtgtatagtatacagtatgttttcttttgaaaacacattagaatttccagtgtgagctgggcacggtggctcaagcctgtaatcccagtgtattgggaggcagaagtgggaggattgcttgaggccaggagttcaagaccagcctaggcaacagagtgaaacctccatctctacaaaaaacaaacaaacaaacaagcagaaaaaatcccagtgtgtttctgatgaggcagattcctggactcttccaggaatctttttattactaatattttgttgttattggaagtcctttgtcttgcttttacattcatttgttgtktgtttcagatcaatgttctggtgatgttctgcatccagaccatctttcaagaactgaatggttactaccctgggtcttctrccgaaagaaagaacatgrgtgtgggyattcaagtatagcctctaaaaaaagaacacayaagtggttgctgggtgctgttatataatcacacacatacaaggcttaaatcatgaatatttcctttttgaaggggaaaaaaagcaaaaatccaattgtgtagagttttaggacaagaatattatatgaagaaaatatagctccaagagatagtggctgaaagggcagaattagagaagcagaagaagcaagaagttaccgcaaaggcttccaaaaataaaataggatgatacgcccaagaaaacaaaggctacttttgctaagtcaggggtgagagaaaataatgaaagatgcaaagaagaatgactatggagctactattttgtctcagcctttagcacaaagaacgaaggaagcaggagctcagtaagataaatattaatgagtctctgggaatatcaagaaacagaattaataagaggcaggtaaaagaatacttatacaatttaaatatttataaatcagtacagctgggtgagattcatttgaacaaattcaaagaaccagctaaggcaggacatacctgcaatactagtgtttgtcatagagagttatgtaccagggaaatttaagcaggctgatttagtgttggagctaaagcagccaaaagcagatacaggaaaaggtgggctagttagcgcatccaaactaccagtcaaaactctaaatgaaatcataaatcagtccatgagcatcttcagaaaaataacatagtaagtcatagccaaagaggttcataaaaaacagagcctgtcaaagcaacttaatccattttttggaaatgctaagaaatttggattatagacatagtttacagaggccctgcagatgccaccagacaactcaatttgaacccatcttggtgatggaatggctgttactctcactgtttccaacagagaagggcaatttcacctgcacatttaatacacagggatagggttctctgttcattccccatcatagcccaggacagagttaatttagttcttagctaaatagagtcagtgcccagaagtatccaaatgagaatgaaatatattgataattctgttatccaaatgagagtgaaagataatgataattctggagcaaactggactaacatctttcagaaaaaacaatatatatatgtgtatgtgtatgtctgcaattatcaggataattcaaggaaaacaaatactattgctcgaattgatcatataattatggaaaatataagaagatgtgaaaacaaaggccctcttataaaatacaaagacctgaccgggtcaccaggctctgctgaaactgttcaatgacttcccagggttcttaggccagaaccctcagcctcctctcaaggcctgcctagtctgtctgtgctcttctctgcagcatcactggcaccacacccctccttgccctgggcaagccagctcctctgcccttctttcagctcttgcaagacttcctcttgtttttgccactgagcctttgcacatgctgcccttgcttttacttaccctagctacttattctatagttttctactcaaatcccactttgggaggtaaaccttcttttacctcccagaacataatattttcatagtatttggctctaataaaaccaattttcttcccagaagcacttattttagaatgtaattttatactcatttaaaaaaaaattagtgtagtcctcctccactagattacaagctccaccagaaaagggactgagtatgagtacttcacaattgtatctccaggatgtagcacagtccctaggtacagtaaatatttgtaatcagataaaaaaaaaactaggagtatatatatatatatacacacatacacagttgggctcccttcataaaaggttagatggaaaggacatctttctatccagaataatattttcttcagttttcctttcaactacaatcataggaaaaaaaaatttaatgagggtcctgttgacagaggtgtaaaaacatgaggcagctaaaacttgaattgttgaattctacatttgcacattacatttacctgtgatgtgttccaaaatttcatttcatggtgataatgaatctgtgggaaattagcattctatcactcttcatatgggagtgttagtgaaggttttccaagccgtgtatcctgcataaaatgaaacatttttcaggtaaccaagtttgtagcacactctttctatctcaacagtgttcatctttacacctcagaaggacctaagcctagaattagagaaagccatgaagttagagaatattatcttattctaaggtcaatcactgacagggaattttctcccatgatgcttggatgtttatatttttaataggaatttgtaagttaataagtaaccagcccccctgcaagcaaggttttgacatatccaaggtcacaccaaaatttgtgacccacctaggaccaaaactcagacttctagtttcagtccactgatcttttgttagttcattcattcaacaaataaaacctgaatggcccccatgaatctggcactgtgttggtcactggggaaacaaagatggagacactgcccttgtccttgtggaatttattagttgatgaaggagaccaaggaagaatgaataaatacaatacaactgtggcgaatgctatttgaggccaccactcttggtgcccaacgctgcatttcctctgcttgcctctgatttcagctgcagctgtggtggacagctcctgtgcctgctgacagcttccctcctgcccagagattgcccttgggggagtttgctcagactctggccaagcagcacaaaagagtggtgtgaccatccctgagagcaaccttcaatcagaaggggacgtgagtaggtagataaatattccatccttccatcattcagaagaaccattcaagaggcattctacatggttcctgagaggatcccctcacgattgagccccagtgtccacaaaaagaaccagctcactaatgtaactttagaggctttttctccttcccagtctctctcttctccacttcctcactcctgcttcctaaaaccacctctgcccaaagaaacttcctactcctaaaccctgtgtcaggttctgcttgtagaggaagtcacaccaatacacaatatcagtaaatgaattaatgcagagaaggcactggagccacagttgcaaactggagtctcttttgttggctatctacagggtcattgtgtatagtgcaatggttgtttttgttttacctacttgaagatcacgttgttaaatgttgggtgtgggaatgcaggagtggagtttccaggttagagctgaattgcttctctaaagaaatataaatatatgtgtgggaagaaggaaaacattcaggagcagaaaaagccaagctggcacacctaagagaagaaatggtgggcaggagagagggtggaaaagatctgagtgttggggatctgagtcgaaaagatctgagtgttgcttttggaaaatggaatgctggggaggtgtgatctaaaatcccctgagctttccccaggcttacactaggccctgtgtaccttgaagctcttgggaccatacacaaaggagatggcttcagagtcagttctgtgacttcaatctgagcttctactcctgggaactgctgctgctcacaaagattcccaccaaacaaaggacagtgagtgagaagccgaacagcaaagatgtaataaaatgtctagctagggttagcattccttaggcttttctatgaaaaccagtacttatttacaagtcatgccttacagggcaggaatacagattcataatgaggaaaatattctcaatcatcataaatcagatccagtcactctcctgtgatgcttcccactgtattgggatgatgtttgggttacagccccagcccccagcctagtgcctgccatgaagtggcacacggtacatacttattaaagaaaaccgggaagaaagaaaagaagggagggaattagatagctggctattcaatcaatgagtcattaatcaaaagattttaacaatgatgtaaattcaagatcagtgcactgaacccagtacattaaatcttcatgaggatgaaaacaataacataaatcagaatcttcctagatcctttgggttagggatggttatagaggactggggagtgggtggagagaacactatgttgccatggaggaagtgggaaaaggttttcttttttttcctttcattagaaaacatcagtaggtaagaggatgctctcttattagtaatgagatatgggcttccttccagaaagtgacagagatttttccagcaaatccatagcctttgatgtgagcactactgagaaaatatcttcagctatgcaagcacggaagagaaatttgaagaaggcatttcatgttctcctctgttgtatctttgatgtacacaaaggatttagtcctagaagacgaagaccttacccattttctttccccttgaggagagctttgttccacatttccctgttgggccatgatcctggtgagtaggtggcacattaattattggatgttttcattatccaagtatttgttatccaagtccctgtagacaacaggttacaaagaaaagcaaaagtcatcataacagcaaaatatttaccaatgaacttaccacttacaatattacccctgactttaaaattccttgccaattacaaattataattacaaattacctatattacactacaaatctaaagcaaatcaactgctaagacaagtgcaaatcttttaaaggatacagagtttcataaagccaatcgaagtgatctgggagaaatgctctaaatacaagcaaagcttttgacaaatgacagtactgcctagttaaactagttaacagctgaaaaagaaaaaaaaaactcataaaggggatgacataatagcgcttagcaagaaaatgatgtgtatactgaaggaagaaacacgggaaaattgaccaatactgatttttttctcaaaatgacctttattatgaacttgctgctaaacttaaacattaagtgaaagatgccattatcatactaccataaaatttgtgttgaaagattatacctcccaaactcctattcattcttcatcttcaacattagttaataattgtaattataacctgtataattattgataatattaaaataggggttaaaaactaatttagtttaattttttaagctgagttctaatcaagtcttttgtcccactatttacttgaacaagtggcccctgtattaaatggcttcactctcagtgacctttgcataaagaagacttctactcctgaatccatctatttctcccaccagctctgtcactgccgtaattcagaccaccatccttactcacttagattactactacaagggctcctattgcccctgtctcctcatttaccttctccaattcttcctccccactatagccagatgggatcttctcaaatgccaaaatagcaatgtcactctcctacttgcaatcctttcatgaggtccatcttccttcattgtgtgtacttcttagcacaccttacaaagtccttcatgactgaacccctttctatgttcaacttgttctctctccaacatcctcaggcccagctcctatacagctgtcctcttcattccagtttctcatcattccccagtgcactattgtctcacagctctggctgttgcaccagcctaatgcctgctcagctttcagttctcaacttaggaaacttcatccaggaagctttcccagattccctaagttaggtgtccctccttaactgtcccatagcatcctgtacaactgactatactgaaagcacttaatattatatttatggttaggggtgaaggcaaggaccaagtctgacatgtcaagagtctccagcaccttgcttagcccctggcccagagcagatgatctagtaagtgcctaatcaagaaataagtggatggatggatgcaacaccaagcaaaccaaagcaaaataaatattatatcacaaaaggaatgaaaccaagcaattaa

SEQ ID NO: 96656 - DNA, 43154 bp, Homo sapiens
acaggatatgttcttatttgttaatgttctctgtcacttgcataactgtcaaataatatttttcataacggaaaagtttttcttttggcaggtctgaacttcacctttggtggtggtaatgagagccgactgttttttcagttggagaggagcagcgtttcagtccgagagagcaccgctggggactggcacttcctttccactgtcctacaactcacttatccagcctgcctgggtctctgttttcccctctttaagggagaggtgacaaggcatgcctggactgctgcctctgcatgtttagggggcccacttgagatcatgaatttgagcatgctttgtaaataagtgctccatatgtatgtgtcttatcagaaatgcaatttttgtttaagcataaggcatgtaagttatctggaaaaacaggaaatagagcaaatcctgtttttctaaataataatttcacaaacatgagatttaaaaaaattcatttctcagcagcaacatgctaacatgatagctttaaatatataatatgtatatgtaaaatataatatatatagctttaagaagctatctatatgtatatgttatagcacttgaacatgaaatctgcaccatttctgatagcagatgaatcttggtagagttgtttgaaatcagttaaatactatcaacatattttttaaaagttgttagaactgaaacagccctcatcataaaataaacacaaatccagttttcgtttttttgcttatgctcatttctattcaaaacaaggagaaaagctacccagaaaatctattacatgacatgtttttgttcagtagttccacagagatccttcctttcttaccattttaaataatttttaccaaactctgcaacataataagcagttttaaaaaatgttattgtagattcgagagtatgtgtgcaggtttcttacatgggtacattgcacaatgctgggctttgagcttctattgaacctatcaccccaatagtgaacatagtacccaatagagagtctttcaacccttgctctcctccctccctcttcccttttggagttccccgcatctgttgtttccatctttatgttcatgtgtatgagcagctttaaaaagtcaccgcaggccaggtagggtggctcatgcctgtaatcccagcactttgggagaccaaggtgggcggatcacctgaggtcaggagttcgagaccagcctggccaatatggcaaaacccatctctactaaaaacacaaaaattagctgggcatggtgacaggtgcctgtaatcccagctactcaggaggtagaggcaggagaatcgcttgaaccctggaggcaaagtttgcgaagagcccagattgtgccaacgaactccagcctgagtgatagagcaagattcagtctcaaaaaaaaaaaaaaaaaaagaaaagaaaaaaagtcactgcaaatggtcatttttgagcagaatgtgatctcctttcctgttgctcaatccacagggggccacccccaggggatggtgctgcagttgagggtgagttcctgtatcaggtaggactggtccacccacggcccttgcatttggcacgagacctcatcctgatgcaccgccgggtctgagaaatctctctgtaactcatacacccaaaagcatttatacatttcttgtcttctttctcccaatatgaatgatgccaccccttaggcagttggcactcatctgcagccgacaatatcgcaacatgaactgcacaggcaggaaacccttacacacagagtgccggccctggcctcaggagcctgaagacaagctccttgaagacctgctcattggcctgcagtccaggtccctcacacttgctctgtgtgtcacttaattaaaatgccacttcaaatgaaaaatgaagagggcagttttgattacaaagatacaaaatgtctaatttacaatgggtgggattttcccatgtcatcgagccggcctatgtccccagcaattgttagggactgtttttctaaaaaggtgaacctcaccttggattcttggctgtctgacaacccaccaggcccaaacagacaatgcctccatgccatccccagtgcactatcgactgaggcgtggtggactggaaatggtttcctgaagcatagatcccagatttcctgcacagagctggataaaggtaactaagaggcttgccaaattttcatttaacgacgccttcctggtaatattctttagcctgatttttaggtactttagaaattatattagaagcaaccatgacacaaaaccaaagagacaagaaagacccctctgagctccccgttacctcttgtcttcctgggaagacgctgggaaaccatcctggccttggagaatccatgtttccctgacagctgagaaaggatttctagaagaattccaactttgaactgggtctgctgtgaacacggtgacgagacatgagtttatataggaaatctgtgttcctatttcctcttaggggaaactgtgactgattaacgcccatgcctttgctctgtgacaaaggattacctactaggctcttttaggaggcacttcttgaaagaatgtggaaactttccggggggagggaggactggaaatggaaataaatgaaggattaatctgtttgtcatgtcagatccaaaggcattcttccaacttactgtcaacttctaattcagtcaccaggagaataatttgtcgctgtggcttggatagaaacccgtggaatccattggtgctcataaaaaaccccagtataagaagaagaagggaaataggaatcacatgtcttagaaagttttaattttatatgtgctctgcccaccaggcttctcacttgtttctgggattctgaaggccggcccggggcatatagctcctgccctgctggaaacgtcaccccagcggatgcagccagaaaccagcttggggtggtccccctgcctgtcagaaccctgagctttattttaaaacgaacagatttttttttcctgtcatggtagccattcaaatcaacatcaagaaacacaaatgagtcagaagagaaaaaatcacacttcttaaaagtgacagaggaggaaacagagattactaaagaagaacaagcgagtgaagggaagcctaagtacattttaaaattgaaactcacagttgctgaatattcacacgttaattttgttttcttttattccttgggtatttccatgaaccaaagtgaaatagtcaagttacagaatcatttaattttacttactagtggatacccttaggtataacaatataagacctcaaagagtctggagaaaatatttaaaccttaacgatacgtcttttataaattcttaattctgaaattccattgcattaaatactatgcgagagacccacagagttgcaagctttctccagttgaaggaactttggtcatattggatcactgatacgaactacagtgttattttcataaatctattgttaaagacaaacaaaaaggaaaggaaaacatgggaatgggtgactccactcaagagacccttcctaatccagcttaacaggaaaaaagacttgactcatttttttggatgtcaatttttttttaatttttgagacagagtcttgctctttcacccaggctggagtgcagtggtgtgatcttggctcgctgcaacctccgcctccaaggtttaagcaattctcatgcctcagcctctcaagtagctgggattacaggcacccgccaccacactcagctaatttttttatttttagtagatacaagctttcaccatgttggccaggctggtcttgaactcctggccccaggtgatcctcccacctcggcctcccaaagtgctgggattacaggtgtgagccaccgcacccggcctagatgtcaaatattaatatagtttttttaagtgaaaaattggaatactgctagtaaagggaactccttttgatacccactatagtaccagcatatatgttacaatccacttaaatgccttccttaaaagttggaaacagttgccatgattctgcgatgatgatcataataagagtagcagtgataaccacagctagcttttatttatttttatttttattttttgagacagggtctcactctgtcatggaggctggagtgcagtggcacaatcctggctcactgcaacctccacctcccagactcaagcgattctcctgcctcagcctcccaagtagctgggattacaggtgtgtgccactaccacccggctaatttttgtatttttagtagagacggggtttcaccatgttggccaggctggtcttgaactcctgatctcaaatgatccacctgccttggcctcccaaagttctgggattacaggcgtgagccaccacgcccagcccatagctagcttttattaaatgcttactttgggccatctcacttaaatgtcacatcacatcctaggaagtgatggatagatgagagaaaagaaggcttgcacaggctgatgtgttcatccagcacgtgtgactaggttcctctgcagtcagctgcccagtgtgggcggtggctgtggcaccatctccagccttagtgggcttagccgccctgcccaaggtggactatctttttagttctaactgactcaaaagcacgtctctgaatcccacaagtgagcaataagttcccttccattaatagatatcctgaagctctgtacacgtctcaaatgcttagcagtgaaaatgcaacaggctaatagatcagtctggtattctaccttggcagctgtgatagtccattttcatgatgctgataaagacatacccaagactgggcaatttacaaaagaaagaggcctatcggactcacagttccacatggctggggaggcctcacaatcatggctgaaggtgaaaggcacgtctcacatggcacagacaagagaagagaatgaggaagaagttaagtggaaaccccttaaaaaaccatcagatctcgtgagacttattcactaccacgagaacagtatgggggaaccgcccccatgattcaattatctcccacaacacgtgggaattaggggagtacaattcaagatgagatttgggtggggacacagagccaaaccatatcagtggcccagtgggcaggtcccaaacaaaggcagcagacaaggcagcacagataggagacccaggcttcaaataccctttcctcgtgtcaagagaaagatttctggaatcagaagtacccttaatctaggaactcaggatcttcctgaagcagagctttactttcccactgaaatggaggcagggccaggcgcggtggctcatgcttgtaatcccagcgctgtgggaggctgaggtgggcagatcacctgaggtcgggagttcgagaccagcctgaccaatatgcagaaaccccgtctctactaaaaatacaaaattagccagacatggtggtgcttgtctgtaatcccagctactcgggaggctgaggcaggagaatcgcttgaacccgggaggcagaggttgcagtgagccgagatcacgccatcacacgtcagcctgggtaacaagaggaaaactctgtctcaaaaaaaaaaaaaaaaaaaagaaagaaagaaatggaggcaaaggaagggtggggccaggaaaagggaggtgccccctgaagcggctctggccgccaactacccgtggtggatgcagggaggacaggaagtcagctcctgcacacacgttcagtgaccttcgggtggggcacctacttctgaatctcttgccggttttgagacaaggccgggaggtggaggagccccggaagcacctgtcacaggatcactcagctgcgggagctgctgactcactgatggggagcaggtcaacttgctgggaggaataggaaattttggaagcggcagaaggcaaaatggggtgcggaggggccagtactgagtggagagacaaggggtgcaaaggtcacacacttgtaacaaatcataatctgagccctgtatttcaaaaggagctatatctgtgggatctgacactcaaatatttcattctagcacggtaggcacatttgcattcgataaagcacgcagctgcattgcttttgaagaaagccacatttaataagcgttcaaaccagtatcgaccagccaacaccccttgtataggattctgaggctatcagggattgtagatttcatatagttaatcctccatcccataatatgattccagtaaygatccttctctttgatcccaccgctgacatttacccaagaagagttccccattcagaatcaacaacgtcttataatgatgcaatgragaacatagacaacaaaattaacttggtaggtggcaaacgaaggcatccctcttctctagcttaatcaatcattacttttatttaacattccttatcaagaaagaaagaaacaatccacacagtcaaaatgcatttcatcacaccaagaacgaccataagcatttatgcccagatggaacagtgccacaaagggcaccctgcctaaaaaagagggccagccagggaacaataattgatccattgacctgaaaatgatttcagaacggagtcagtgcctttcaaacaaggcaatacatttaggaaatacagcttcctggtgaccggtatcatggtgcccgctaaaagcaagcacacccagaagtccacgtgccactcacctgcacgctgcagacactgcgaaagctcttagattttcttccttcgatttgtttaggaaatttaacagcattaaattgattaagtagactgcaaaagggctctgttgtttaaagttttctttttctaaggacatcaaggtcatggaattttgccattgcctggacccaaaaggcataaaattatgcgacaccactgacactgcttttactgagcatgcaatccggagaagctccttttcagcagttttctctagagcagatcaatttaagaagcagttaccatcaatgcaattatgtgcccctgcgctcctgaacgctggtcagatgtgtgccattgagataaggctaggcccttttaaaagcaacgacacgtcagtgaaaggaaagcatgtagaaattgtgtcctcaacaatacatttcaggagaccaagcagctgagccaaatttcacacacacacacacacacacacacacacacacacacacacgcaaatgatgtaacaaaaaggtgtgatatgagcctgctcaagcaaggtaaggcataaaattcawatataacacactgaccatatggctttctttctcaagaaaacaatgctcttctaataattaaatcccacatattattttaaactagttatctgtacatcaaaaataatttttaaaaagttttgtactcaccgagggaaagtgaaggctatagtctgaagaagaaagaagaaaaaaaaagtcagttttctggttaacaggagttggctgctaattctagccatttccttctgtacagcactagtcgactatcccatttttgcttaattgttcagggtcttctggagacctctttatctagatgatacttcttttggctgcaatcatcagcttttaaccatgtcctaccccacactttaatacaacctctaatgatcagttgatggtggggtgtggccactgacctagcccccaagatgctccatcagtcagctgcctctgctgtggcctatagggttccctccccttcaagtagttcctttagcccatcctccccccagaagagccttttacaacctggtctggggcagctcactttctccagctttctagcttaatctttatctagcctgatcaattccattaattaattaattttttttttttttgagacggagtgagtcttgctctgtcgcccaggctggagtgcaatggagtgatctcagctcactgcaaacttcgcctcccagttcaagcgattctcctgcctcagcctcctgagtagccaggactacaggtatgtgccaccacgccctgctaatttttatatttttagtagagacagggtttcaccatgttggccaggctagtctcgaactcctggcctcaagtgatctgctcgcctcgggctcacaaagtgctgggattacaggcatgagcctccatgcccagcctcccattaaattagctctcatgttattttattttttaaaaaaaaacagttttattgagacataattttcatacgataaagttcacttgtttaaagtgtgcagttcaatggtttttagtatattcacccagcttgaaaccatcaatgtaatctaatattagaacattttcatcattcaaaaagaaaccccacacccactattagctcactagctcccaagctccatcctgtccccagcccctggcaacaccaatctactttctgtctttatggattggcctattctgagtatttcatataaatggactcacactatacgtggccttctgtgactgggttctttcacttataatagtattattttttgagatttatccctattgtagcatgtaccagtacttcattccttttaatggctgaataatattccattgcatggatataccacattttgttgacccattcttcagtggatgaatttagctcgcttgttttgttctgagtggtcagcatggcagcctcacactgggattattgattaggctgctatctacctgtgaatgagaccttgctcagtcgtcactgcacgtctgcactggtgaagggtggaagcatgttttgattgttactatttttaaatagtgaatgcagtacatgatgttttccactaaaatagactacttgctatcttagtcctgacaaaactagatattttaaatcatatcaaataaagactctacagcacacaattaaaagttgttataaattgttatatttttaaaaaattgtttaaatgtatattgttatacatttaaaagctgacccatgaggtgtgtttgaagcccaagaagcagaaaaaatacttctggtaactaaggaattttaagtctatttgggcaaatctacagctcaaattattcttaatggtgaaagacttaatacctctccccagcactgggaacaaagcaaggatttgtcccactcctatttaacattatcctggaaatcatagccaatgcaataagttaggaaaaagaattaaaagacataagcattgaaaagaaaaaaataaaactttattctcaaatgacataatagtctatgtagaaaatcccaaaggattcaaaaatagccactagaggcaatatatgagttaaggtcacaaggtataaagttactaatacaaaaaaaaaaaaaaggatttgtatatggaaacaacaattataaataaaatttaaaagatagtctatataatgccaaagcacctactggggcagctatataaaacaaccggggaaaatctgttgagtaacatattaaagcacagagggtttccagggtgcagtggaacccagtattacatagagcaygatggcaggggactgagagggcattggtttttgggcaagaaatgattacttgaggatcactgcagataggggaactgcttttttgtaggaataacttattacaagagtccatcctttccactccccaaaatgaaccagaaaagatgctaaaaagagtgactcgtgatgtttgactggggcyaagcaagggaagaagccaggaatggaagttatacctccaatatctcaagaggattgatagaaatgatcaatcttccaatgcaatgctgatttattttaatgtaaaataaaacccaatgccatgcagaagtttctggagcagggctgcagacagtggcagcaggcttgagtcaaaccagactaaaaccacatgggaaaagaccaattttggtagaacctgttggcactttgccaatggttgcacgattgacaaccccaatcaaacacaaatcataacttgaaattaaacttgcagctgatttttaaaaaataaggcaagaatacactgaactcttgccttattgtgcagcggtgcaatcatggctcactgcagcctcaacctcctgggctcaagcagtcctcttgcctcagcctcccaagtagctgggactacaggtgtgcactaccacattccgctaatttttgtactacaaatagatcaggtattttattggtttgtggctcacacatgatagtaggaaaccacaactatcagtttcttaaagaattagagcaaaaaccaatcataatgttctctaaagtaaacctttaccaagtgaagacttccattaggccaacactgcgacgctgatggctactgtaatattgagcaacaagttggaaactgtgaaagaggcacatttaaaagctgggggttggggaggttggtttgagcagacagatccgtgaagtggggtcagtgagaagctgacacaacatccttccactcatgggaaagcttcctgttgttctcttgaacgttgttgtcctccagcaaggggaaggagagatgagcttagatttctcgggctgtggagtgccctgggcactgcttatggcatctctcccacatctaacaactatcctagtaggtaaggcaagacccactttattatttttaaatttttatttgtttatttattttttgagatggagtctcgctctgtaacccaggctggagtgcagtagcgggatcttggctcactgcagcccctgcctcctgggttcaagtgattctcctgcctcagcctcctgagtagctgggattacaggcacacaccaccacacctggctaatttttgtatatttagtaaagatggagtttcaccatgttggccaggctggtcttcaactcctgacctcaagtgatccaccctcctcggcctcccaaagagctgggattacaggcatgagttaccaagcccggccggtgagacccactttaaagatgaggacactgaggcttggtgaggctctggaccagcatcacagagcgaggagacagggcagcggcaatgccggcccggggctgctgaacccactcctggctaggcctcccggaggaagccatcctacattgcaatgtatgtttgtctgcttgttttattttattttttttcttaaactgagagagggtcccactctatagtccaggctgaagttcagtggcacgatcatatctcactgtagscttgatgtcctgggctcaagccgtctttctgcctcagccaccccccgagtagctgggactacaggtgtgcgccaccatgtcccactaattttgtattttttgtagagacagggtctcctgatgttgcccagactggtctcgaactcctggggtcaagcgacccagccaccttggcctcccaaagtgctggcattacaggcgtgagccactatacccaggcttgtctgcttgtttttttttgtttttgttttgttttgcttcttttgtctatatctccttcctcccagtgaagctgtaattcctttagtgtaggaatggtgtaggaaaggcattctgcagatggcaataatgatactggattattccttaaaatattttcctgtcctagaggatgctccattatgttctctcctccagaaaggaaagccccgggatggccatatatttactgtgggagaagtgggtctttggaagtagcctggcccacagaggcctggaccagcctggccacagagttggagctttggctggagctttggctggtgagtccctggagctcacagctgcagccactctgcttccagggaacagaagcagggagggagcccgacaaggccctgggaaaaagccatggtgacaacatcggaacaggggaaatccacccttaggaaggggggcaggggcaggcaaggtcaggccagtgagggcgcccacaggaagtggccaggctgctgggttgggtcctgattactcacaagatatggaaagacggagcgacgttattgtgcatcctaaccttgcaaagaagaaaataaaactacagcatttagaatcagtccctcggaactattccatttaagggaaacattcaaattacttctgagatgaacagaactggccaatctttccaaactcggacaaaaggaaaatgccttttacacacaaccttggcttaargcgccacaagcattygagtgggcagaatgtaggttgctgagtggcttgtgtagcatgcgtatctccaagctagtcttttaaacgagtagcaaccttgaagaattttttggaagtgcatttacattttattttaacatgtttacatacatgtttctatgagtatatctaaaatgtgaacttttcatgatgtattaaaattttataaagaaaggatatggaataaaactccacttcatgcagttaaatgccagagatactgaccttgaagcagtcttactgtgaatgaccagctcccggagccaagttcctcaatcctggctgccttctcttggactccagtttttcccaaaagacactgagctgtcctgatcaattagggcactggggtagcaagaactgtcattcaccctcaatcacagtaacgcttaagcaccatgactatgaccattactttagatggactggtcaaagagcaggatcattactccaaataaaaaaataacagagacctcatcactttaattaagtgtagtggggaatggacagaaccgcagccacggcccctgcggctgtctctgcattctatcggacaacttcattctgcttccagtgggtaattcaaatgatggaagaaagcaaaacgtttctgaatcatctaggcttcagattcgcactgatatcatactcacagcttccttgtttaccttccaggcaacagtaaagctgttaatgtctatattttctaatgcatgaaagacaggacagaaggagctactgaacttgggggagggagccctccctgacatgaaggagtttagtagaatcttatcctgccttccccacagcgttaaaccaccttgaaaaggagatgaaatctttaaaacaatgttgctaagcctgggggaagaaaaagacccatttttctcaaccatcctttttgccagtctatgacagacgagcaggacttctaaatatttggcaacttttagaaattattcatgggcagctgctcagcacagatccacgtgcatccctgcctgcctctcaaactccctcctcccccgaccaaggcacacactctctaattactccacggttgaggcaccctctttggattaggaaacatgcaaattagaaagccagacaaatcctcctttgcaagtacgagtgtctgctggtttccatactgcctcgtctgtctatgccattattatcagtatcaaatttggaaacatggcaatttgattccaggctcccttccgaggtgtaggggtgccctccaagccccagaggggagagctatgaatttgttcacctcttggcgctgggcatggacacttctcagatactgacagtcactgtcatgttttttaaaaaaatctttgccctatgagtagcttcttggcaggggatctagtgtttgaggacagggatggacggtgttaactgccaccaagagaagacccttgcagaagaaacagccactgtaaggacaggaacttcatgccagactccccgccaagcacccaacagggatcactgcatcctctcaatactcatatgaggagtttgttattagacccactttgcagagggggaactgaggctcagagatatagggtagcttgccacaaggactccccacactgggtagtgcagtgggacttcagagcagcagtcctcgaaaacaaggcctgttttactcccctctacctgcctcrctcctccaattgggctcggactctgaaatgtattcaggacaagcttgctgggtgcctgacgctaatggtaactgaacacgctaaagatgtttttcttgagctaattcctgttcagtgagccccagagaaaatgattgatctctaatactcagatatgttaaatcagtgttttcaggttttctttttcagcgtgccaattggaaacacacctgcctttcaccaggtgaccctaggtctgcgatgaggctaagcatgtgtgtgaagggcctggttggtgatgatcttgacactcggctgtccacggtaacctgtggccagaggccagggcaaagcaatattcactaaggcagaatggatgagctctggcattaaataattattcagaaagatcattttattatgaaataataataattattattcacgaataagggaaatagcatgtttgctgatgagattggcacggataagaagagtagcgtgtgttggtaaacagccctctggattgcttaacaggtttggaagctcacaggaagagcatcaagtcgggcagacaccacggtgatccaccttctagaggccgctcactcacacaaccgtgtctcacggggctccaacacagcacagtccccctgcttccctcatgctgctccctgtcccacaaagcctcagtctcacccaaacccactagacgccaggtgatccagtaggtcaagtcctactctctccttgacatcttttctgagccctctgggctgccctggttgtatccctcctggtgcctagctgttccccgcccgccccttccatctttatgtgtcttcacgtctctacaacaacacagtacagtaggactctggattaacrttaaggatatttgctgccatttcagctgccctatgaggtggggaggtatgatccacattttacagatgacgaaggcaggtgcagaccctccccaaagacagagcatctgtggctaatttggtgatttctgaatagaaaacctgctatctctagcttgaacatcttcagtatatgaaaagttctgtgcatgtaccagaaactcataaaatactagttgaatgagtacatcaatatgctaaaccagccatttaacattagtgagcatctactatgtgctatttctgtgccaattgcttaggatttagagattaaaaaaaatacatggacagaacctcagcctccttaccctaaaagaagtccagaggacaggcttataaacagatcgttgaaatgcaggggtgagcagtgctaggtcgtggcaagcccaggggccatgaaagatggaagcagaacactaacctgtgtttggctaaagttaggtcatctttctcaagaagaaaattcccaggaagaacacataaacaaaaaccgggaagccagagagtgtatggaacattctggaaatggcaaataagttggatcctggctttgaccttggaacaagtcacaacagttttaagcctaagtttcttcatctgcgaaatagagataataaaatttcctgctgggttagtaaaggaggtaaggaccggacgcagaactcagtataaggcctggacccaataaatcactgctgtgagcctgggatgtgtggtgggcagatcccggaatgctgcagagacctttggctttgggctgaagccacaagggggctgcagaagtctgcaagcctgggcattcccattctgctctctgcaaagtaggtcactgtgatggctgcagagaagaataaggggcaggaccatgctaagtgtggactgtggattcctgactaatgaggccacacctgtggtccagatgcaggatgaacaggtgttctcaagggcagtggtgggcggccggggagggggcagccatttaacaatagaggaagcagagctcacaagctttggaggcatgtgagaagtggggaaaagggaaggaagctaagcgtgaccgtgggcttggcttgggggcctgggtgaagcgttgccatcgacagaggtggcgttcaggcgcagagctatcagaaaatgatgcatccttcacaggcatgcagaggatattagcgagagactaagaaaatatattagcctgagaaaaggggagacccatcctgaaaacagatcaatttttttttttcaggaatatggtactcagagcagagacgtttgttagatattcctcaggaagattctgaaaattaggaaagctgatgaatgaaaaatctgccaatcgactagccactttgctgaaacatttgtaaatattattgttttaatgatcctccaccccacaacaactggctgatctgaaccatttaaactagttcataaataagaatccctataaaatgcacaaaaaagaggctagcttgaaaacaaatgagagataacagagaagattctaggtatctgttatattgtcttgaagaggaaaagctacatgtctctatttaaaatagagctcataataaaaggtaagctgtcagggaattcacaaatcactgtgctcctaacagaaatgtgtctaggcttgatacgcattgctgaggacaagcacctattttttccccaccactgaaaaagttctgtgaaccagtaatgaatccctcctccacataaaagaacactgcagtattcatttagaaacaaaaacagcattatagcaaaaatatgcagtgctccattctggaacaatatactgcaacaaaagtgtaatgtttgacaggcattctgttttgtctacctagaaaggtcagctctcctcttccactgctaagcagtgcatccatcattctcaaggagatttattttctttctttacaactcaaggaatcatcccaaagtgtatgtgctcgagccgctgcaccacacagctggacagtcccaggcctctgtgtgatgtggagacattaaaggccggtggtagagggggctgatgtgtgtctgctcatacctgcagaaccctaggcctcccacctgccacctgcatggctactggtctctcctgtaatccacagtccaagggagggagaagcagcagcgtgtgctctccagccagatccctgcccactgggtgaccttggtcagcccctccacctctctgtgcttcaatggccactacacatgaggtcaccgatacttgctgatgatccacggcatcatggtaatgatccagtgagagaatgttgggtggacgagcttggaaatagaggagggtaaagcccaggtaaggacagaaaggctgctcttygcaccgtggggttggccgtgggtggggccacatgtagcactgccttgytacctaataatcacatttatgaggacaaatggtccttgaggcacgtgctagacactgtacatacaggatcctgtctgatcctcacggccaccctgaagtaacatgcgtgaagtcacgtggtcaataagaggttgagccagaaatcaaatccagccagatctgactccaaatcccatgttctatgccactgggcaataatgtcctcaacattaggaaaaccctgggcccttggtgcctgggcctggaattgcttcctgggagataagttgtgtgtggaggagcagtccccaggcagcggtcaggggaagtggtcactgcccagccaaccacagacaggatactgacaaggattcctcctcccccatgttaccctcatggtcaggcagcatcatggcttcgaagtgcacagttcatctgatgtgcccctgcctaggatgctgaaataccatcttcccacccggctccaaactcatctaagagtcacgagcaaattgaagaaaagtttctgctgggcttctataaactaggctgggtctctgaaaaggtaaaagctccggaagttgaatttaggaaaacggcatgaagttcaatgctgcacctgaatctgccaggaggtctgaggtctgaaagtgctaagggaaagctctcctggtgcccatggccatcccagcaggaacatctgaccggcctgagggagccacccacatggctggccgggatctgtagccaatggagagttaagagtcttcttctagagctgccaagattctaataaacctccttccgtttaaactaaactgcaaatcgcgcacgctggaggctttccccaggaactgccttgtgargggcaagcactcgctgcaggccgggatgggcacacatctgaccttccttactccagtgctcattctctaaaggaagtggaatgcgctagtacctgcgaggacagcaaggccagggcaccatgcatggggctctcgcacctcagggcggcaccgagtgaaaacactgggcaggcttcatctcaccgactcctccacatagtgtggagagctragaagggccctccctgccttccagaggaggaaacagaggcatcgagaacatggagacgccctccaggggggtgccaatccccaccctactccaggtctcttacgtaagacccatgctcccaacagctccctgatacttcgtcttgggctggrctccctatgcccactggggtcctttttgggatgtgaatgtttgaagtgaaccatttgttccaatgcgccagccccagcgtgagtgtcacattagcctcgtatggacacttgacaacatgaagctctcagtcaggtcayatggagactcccgatctaactttcagttcagtgagacttacaggcagggtctctgcatgggacaaaggacacagagacctctgccgctgtgtgtagacagtgagcaccttcctgggtctgccacagatatgggacaggataatgactgcagctgattttgctacatcaattaattttaatgacatagaagcttatccaaccatgagtcccagataaatttaacctggagggatggtttatttttgaaatgactaatcattcaaaacataattgaaatgaagtgacccttccccagtaaatgattcctatgatacgaataggaatatgatccacctaaaatcttccatagtaacaaggggaaaatatcaggtgatcttttttgtgagcgcagccatgatggaaacttgagtgtccattagtcagcttaactcattgtaggattaacaaaagaatagtccaaactgtcagttttcagagtttgatataataaaacaggagttttgtaggaggttcgtaggcatcatttcatcggtggctctactgtgtaatccacggctcagcagatatttatygaatgcccactgtgtaggtgcttcaggatacatgaaaaaacgcaacagatgagttaccaatggtgtgaggggaaggtctgtacctggggacaggtaatgagggaggagagctcagttggccttacaggacaggaatccagtcctggggtgggtagagggtgggaggacattctaggcttggagctctgattccaacgaattctgcaaatacaaccctttcatccgcaaagctgtgcttacactgaaaagaccttaccgtccttccattggattggctagcttctgagatttagggtgctcttgggtggcagctgggttcctggaggccctggagtctcctaaggacctcatcattgtggggtgtcccccacccaagttccctccctcttgtgtctcccagctggagtctgggagtgtgggctggacttccaggccactgggggcctgggaaaagcccttggttactggctcttttttttacgcgtgtgtgtaagtacttatatgaaaaacaaaaaaagaactcagcttcaacattttgaacattcagctcgaggtcacaaaagaatccaaattctggaatttctgtgcaaagggagagaggaggagacagctttgcctccccagcaccagagtttctgaagagcttgtgactcagggtccccatggccagcagcctgaggagcaaagccacggatgctccagaaccaacagcctccttcatgaagtgccggaggcacgtgccagcatctcacacagagttcacgttcaccatgattctccagaygtataattttgtaacagaaaagagccccagtctgaccgtctcctttacgtgtgatatgacaagaacacacacaaagctcatgtctgcatcatccccccgcccccctttttttttttctttttaggcagagtatcgctctgttgccagggtggagtgcagtggcccaatctcagctcattgcaacctctgcctcccaagttcaagcaattcttgtgcctcagcctctcgagtagctgggattacaggtgtgcaccaccatgcccagctaatttttgtatttttagtagagagagggtttcaccatattggccagggtagtctgggactcttggcctcaagtgatctgccagtctcagcctcccaaagtgctgggattataaacctgagctgtcacacctggcccatcccctttatcctcatgacgaccctgcaaaggcaccaggatgtcttcacggcccctgccctctccacgtcccgagcccagcaacagcactgtrtggagtgaatggaggattccctttgtcactccaggcttgccctttccatttacgttcttatcataagatgtccagtaaaaagagacggtgaaagaaatggagcaacagaatgcaattccagctccatggcgttcgccttccgaatttagtgttgcactatcataaccccagattagtattttttaaaggattgatacatgctatggaaatagaaaggggaattctccatcttttggggtgaaaaccattgttggaaaccctgactgaatcatttaggcttgcaaaataaagttgtcttagaatgtaacaccaggaaagtgtttatatttcctgaaaaactagggacattctttgaatcagactagaacaatataagccattgtgtttcatttttgccttgtcagctaggaagcttaaaacagaacttaacgcacaatcacaatcacttcttatctccagggaaaggragctggcatttatactatggtctgctcatgcaaagtgctgccacaacatatttttaaacttaatgctcacaactacccagttattattattctgacttcacagattagaagcccagagttcaaagaagtcaggagttcagttatttgacaagtgagcagtgaagacagcatccataccttaatccacctgaattagaaaccatcctgatacaacgctccttccacaaattgcctcaaacctttctgtgtgggaatgagcatgaattgcccagaaagaacgatctgcagaatggaggctggggaggccccctgccctgagctctggctgactgctcccaggacattggaggcagaactcgccagatggcctcaatggggaaggctttttgttgcgtagaccctggggctggaaggcagtgatctatttggattgctgtgtcttcactggacatcaggtttcacacggtggcccttgtacaagaggacttgtgaaagtcaccttcccctccccccaccaaacctaacagcaactgcctctcttcattgtcctgacttgtttactcragcctggagtgcagttgacttcagcattcagataactttccaacaacataggaaccaaattaccctgttgaattcatagatatgccacatttaaatgacatttgcatggcagcagtgccttcctgaacacacacaggatgtgagctggccaccatgtgaacctgccttttgagggctgacggctaagacaactgtgtgacctatatccagggacacacacacacacacacacacacacacacacacacacacacacctatagagcaacctgggaggcattcaaaaccaagtcatttagattcattgaatagctaggcaaggccttgcacatagtaggtattcaataaacataaaaatacttcgatataatctatgatccagcttatagaaagttcgaaagcaggcgaaactaatctatggtgtcagaagtggggacaatggttacccctggaagggaggcatgaagggactggaagagcaataaggggattgggctgggggaatgggcctgtcacattccttgatctgggtgctggctcacttgaaagttcagagctctgtgtgcttatgactggtgcagacttttctgtaaggatgctgcattttaatataatttgtgtgttagtccattttcatactgctatgaagaaataccctagactgggtaatttataaagaaaaagaggtttaatggactcacagttccacatggctgggaaggcctcacaatcatggtggaaggtgaaggaggagcaaaagcatatctttatatggcagcaggcaagagtgtgtgtgcaggggaactgccctttataaaaccatcagatctcgtgagaatttattcactatcacgagaacagcacgggaaaaacctgttgccatgattcaattacctcccacagggtccctcccatgacacgtggggattatgggagctgcaagtcaagatgagatttgggtggggacacagccaaaccatagcaatttgcaaaatcatagcttgagctactattttggagtagagtgggtattgctttttactctacatgaataagcaaacaaattcattaatttaatttgtctaaaaactcaattaaaaaatacggtcaactgagaaacactgagcatgtcatctgcccttagcagtcttcacactgggcgacaaatgaccatgagcatggagagacttaccggatggcagagagcaggacggttggcctgactttgcccttgaagtgtttgtttgtttgccacmaaacgctttatctcttacagagcaagcctttgtatcttttggcataaactttatctgaaaataattttctgattttaatcatttttttcaaaagaattaagaatctcaattttatcacctaaatcttttcaaggtgttggtcatatggatgaccttgagacttccttcgcaggagggactgctcttcatggccatgacaaaggtgtcgtggtcaaaaaatgtggctttgggttctgacaggtgttggtccaggcctcagctgcacctcttgccatcagagcagcctgggcagttacctcaactctctgagccatgggttttctayttacaaaatgaaggtaagtccatcttaaccttggggtggcgggtggggtgaccaacttaccttgctttgcccaggaccatccctgttttaaaactaaaatcccycatcccagcaaacccctcagtccctggctaagtaggtggctggtcaccctatggctgcatggggtgtatgtggtaatgtctacaatgcacccttcatggtgtctgccacatatcacaggctcaataaatactgatttttatcatggccacaaccttccccaaaatgtttccctctatgtgtattttggctgtaatatctgccaatatgtgatatctgagaaacttcccatctttccttcagcctattgacccattttaaaagataaatgatcagtaactgtcatgcaattcctagcaagatgttgtgtccggagggctccacacacctgctgagggggatggacactggcctcaggggtagggggtcccagaggcagaaaaccacactgaccccagatgcagcatmkgacctctttgagcttccacttcctcatggatgaaatgaggataaacatgcctgtcctctctttagggttgccctgaggcttagtgaagatctggtagatccacacttactgtgttcacttccttgtacagtgagtgtgggagtcatgactgtgctcagctgggagcacccatagcccaccatcaggacctgcaactttgcagaggcattcatggcccccagcggacctcagactgaaggccaggaggaggtcaggcaaagggccagtgtggcagaagatgggaaaatgcacatgtccaggtgtccagggttgtggctgcagtaccagtgaatttggtgtgcagtgttctgctccagaaagaggtggagactggctggaccctgagccagcagatctctgatgctgtccagcaggagctgggcagatacgaggttcacaggctcagaccctcaccgcacccagaaggggctccacactcagcacaaattaagccagtgttatcctctaacatctggccgctaaaatacatttatattcattgttcaacataaagtaaaagagcaattcaaaatgagataatttatatgtttatgttttaatatccactgcaaaaggaatacaaaggtaaatcacgacttcttcctaagttaaggaaacttaaaaggcttttgcttagggacgaaccctgaccttccactgcagacactggcaaggaatcaaaagaagaacatggcttataacaaaacccccaaactccaggtggaatggatgtatatgggatccaggcttttttcacatttccacagggatgtaaatcaatttaaatacttaaaatagccacagaaagaaaaaaaaaaaagattgagctatattggttaccatgggaattcctaactgaagaacttcttttgtcttttaaagatccttgccattcttgtgacatttagaatgataaaattacgggagtcagcatctatttcctgccatttgataattacaaaaatatggttatggaagttcaaattaaagatgcttcttaagaagtaaaaaagccaacttgtaataatgatgtacttattaaggaattggactgaattttagaagtcaagtgcaagatcttcaaagggttctgagaaattaggaaaaaagatgcttaaaaccraaatgccttcataccatgtcagtgggagaataaaaggttcacggcacggtccctgtccttcatggagacagcttcttccgtggggtccagggaactccctgaccttccagcagcagaacgccgacaccaggagcccgctgatgagctcggcttctgacaactagacaactggctgcaagcgcttactgaaaatgaaactgttcatggcattcactggtgcagagagatttttttcaaaatcattacttaaacagagtttgtattccccaaagtcatattcccaaatatcaccaacctgtgtctcatcgagaaagagtaattgccaggtaatgcgagtgccctttgaatgtgaagagtttcggagacagtgagacttattaatacagaagtaaatctttcccttacaattgagaattgtccacagttagtcaagggcgaaaaaaaaaaaatggaactaagaacttcattaattcttaaggacggctagaaacacattatgaaaatatattcctagaagtttamatttgataaaagcaaaggaggccgggtatggtggctcatgcctgtaatyccagcactttgggaggccaaggtgggcggatcacctgaggtcaggagtttgagaccagcctggccaacatggtgaaaccacaatctctaccaaaaattcaaaaactagctgggygcggtggtgggctcctgtaatcccagctactctggaggctgaggcaggagaattgctggaacccgggaggcagaagttgcagtgagccaagatcatgccaatgcactccagcctgggcaacagagcaagactctgtctcaaaaataaataaataaataaacaataaataaaatgaaagcaaaggatactctgccagctgggagggggcgacggactgcagttatgctgggttcaacttcaagagcaatcatctttgcaaggagtggtctcaacaggaaagaggctgaacatcagatggaagatttcaaaacctgggggccagcactaatcctgtggctcactttaagaaagtattaataaaactgaactccttctccatgaaggagaaaccatcttttttatctcaggcacagagggtcaaggtagctctgcaaatgggctgaagaccactgccttggcccactgcggactccctgtgcagaacttctgccccaagggtcatgggcttcccagacagggacactgagctgtgctcagcaccaggatggtgtgctggttgtctcacactgctagagactatccccagccccgtgggttccacacgtgtgtgcacgtgtgtgtgcacgcacgcatgcatgcacacacacacacacactccaccccaggtgagatcggaggaaacaggctcgcctacggtgcttccccacaactccaggattggagacaatttccctgcccactttcgatgtctcaactcggctctgcctatacacactgtaaagacgcctatgttatttatcaaagacaaagcataatcatttaaaaaccactttctgggcatctactatgtgttgggctctgaagacaccaggatgcatccacccagaagccagttaatcacatgytcatattaacaaaggatgtaaattacatacagttctttgagaagatgcaacctgacccagagcagcagtcagggaaggcatcctgtagggagtggccttggctgacaggagagggaggaatgggagttagtgagatgcaggggtgctgggggaacatgccagatgtttctgctggtctgtgtgtggtgtggagaatgggtccatacagttgcaggccctcagctgtgatcactcaccccagccctctcttgggtgggagcaggaccctaggatatcatgggttacctgcatttccataggccccagggggaccgagctgcctcagtgtctggcctccacaggcctgctcctcagaggcacatctttcctgcagcctcagccagtgtttctcagccagakacccctagtcaaggcctatagacccaggtttccacctctacataggaatccaagggcaccccaacttgggacctccagagcccccagcccagctctcctctctcccagcccctggttcctgggatgcaagatccttcctgtgcacctgggcgtgacctaagcccaggatttctccacctcagcaccgtggacattgcgggggctggggactgcctggtactgtaggctgttccgctgcatccccggcctctgcccactaactgccaatgacactgctccctccttggccataacaatccaacctgtctccagacactgctgatgtcctgggcgttggggagggcacagccgccccgctgagggcctccggcttagactcctgctcccctgagctccctcggcttcattgaggcctctgtggtgcaagtactgatgcagaactgagcgggaggcctgaccccgccctgcagagcccatgtcaccagggcacactccatcgacccctccccgttcagatgcagggtggtctctgcttccccggggaggtctgtgtccagcggagcagctgcgggtgcacagagcactggccctacagtcactgtcctgcagctgagccatcagaacaagtgactttgccctttgagcctcggtcacctggcctgcctcatggggcmttgagagttacaagaaaggagccccgtggcctggcatgtgccgcactcacatgccgtctgtgccagccttcccgcaggttcagggagtggtacctggggctgcccctccattaggggctagagccacgtgtccaggcagcagggacctctgcagcctcttcctcaccccccactggcacccagcaccatgggctgctcctccctcaacctctgggccctggcaaagaagaagaacagaatacttactgtgcttccctttgttatttagagcttaagaaaacaggtaataaattcctattgtttgatgaaattaaaacagcccagtaatacccagagaaaaatggagtctctctcctaccctggagccagcatctcctgagtggtaactgcaggccgcacatcctgcagaaccaatttcatatattctttcactcactcatctatccactcattcattcattccacaggcacctggggagtaccccaggggtacccggcccggctagtcctggcggcagagcatgagcaagacagcctgggttctcagtgctgcctgcagtcttgtgggggagacaggaataaatacaccaaggtacaaataaatatgtgactaccaagtgcagtgacaggtaggaagggacagacaagacgctggggagagtcacacagtaaaggacagccagtcctagcggcccgctttctctcgctggggggtggagcrcttatgcacaggtgtcacccagcagtctaaggcggggcccacccttgtgaagaagtgaagaaggctgtgcctgccagcatcagttcattctcaagttccaggccaccccaggggcctmctgggggccctccttccctgtcctgttgcatcttgctggagagaagagcccaggccactgtgggtctttaccgtttcctctcccacccccaccctgccccagagagaagcttctaaagaaggcttttcaattctctgtgctgggtgccttacaacacctccccaacaagcccacactgttctcatcctgcctccggccaaccctgctccaaaaaggggacgctgtcaccaacaaccataggaaataattagactgcagctgggatattttgctgaatgttaatcgttttcatttgtgtggtctgaaataagtacttctatgccccaggagaaggccacatacatgctggacacgtgtggctgagaaagacccctcgcaaagccccggctctgcccagagaagcccgttccttggcatcrtctgaatgcacactaacagcagagaggaagggtgagtgggaactacttgtttctgtatttttttttttttttttgacagagtctgggtctttggcccaggctggactgcagtggtgctatctcagctcattgcaagctctgcctcccgggttcacgccattctcctgcctcagcctccygagtagctgggactacaggtgaccaccaccacgcccggctaattttttttgtatttttagtagagacrgggtttcaccatgttaggatggtcttgatctcctgacctagtgatccgcccacctcggcctcccaaagtgctgggattacaggcgtgagccaccgcgcccggctgtttctgtattttttgaaaagcctcacgtatttggactaatggctaaatgctgataaatcagagcaagatctgggctatggcaagtttacacatttattgagctaggaggtccaagatgactcagaccaactcctggggctgttgaaagatggagcagcccaagtgctcaggctcacagagaaccaggtaaagctgcagggaacggtcagaccggactcgggggaggcacggctgccagagctgagtgctgaggggcaagaaggaatccaccagacttaagtgcacaggacacagaagtgatcaaagggcccaaggccagaagaatttgacaaaggatcttgcaaatgaacaaataagaaatctttgctattaacgatagaggggtttgtctgctgctatgcattttcttgaactctctctctggaatctaactcagcgctcacttgctgggtgtctgcagtatgaaagcacagcacaggcagcagggagaaaggtctgctgtcacacacacagccagcctcgtccttcagtgtccaccccagatgccaccatctgatcattcagcaacaggatctcgagtccctggggcacccgcatgccagcaagcatgcccaagctggagggattggtctcctttctgacctgcgtctgccattcacttgttttcccaggtcttttattacttcccatcttacatagtaataatctgcatctgtcctagcttccccaaagarttacattctccaagaggacaggcactagctttgatatcgtcacatctcttacagcactaaagagagtatcagtaaatctccctttgaatgaattaataataaaggtaagagctcccatcagtgycctgccaagcactgtgctagaagcttcataatatctcatggaccctcacaagcagcctgcaaggtgggtcatattatttgcactttacagtcagggaaaggagaattaaagagacaaggagacaatcctaagtcaccctgctgggaagtagctgacccaggatcatactggggaaggtctgactccacagttgtgccctcaacactatggagaaagtgcttaaagctcgttgaaaagtgtgtggctttggacacaacatcttccccacaatggacttctgctttaaatttgcctggyaatcactttctttgcaaattcagaaaggtcaccttctgtcaaacttatttcaacaattattacaaacataaattaatgagtctgagttattggggatgtatatttacacattaaaaacaaccacaaaaaagtaattcaagaaaatgcccaggaaggcataagaaaggcatatgctatcatcttgaggcaggacttatttctggtaaatgggttcagtaggaggctattgagtgaattaccaaatgaatgaatgtacaaatgaatgaatgagtgaatgcatgaactgggtaagcttttaggaaactcttgcactgtttttctccactcccctcaagtcccaacttgttgttaacctggatttctgtttaaaaaaagaaaataggcaatttcagccgggcgtggtggctcatgcctataatcccagcactttgggaggctaaggcaggcggatcacttgaggttgggagttcgagaccagcctgaccaacatggagaaacaccatctctactaaaaatacgaaattagcggggtgtggtggcgcatgcctgtaatcccagctattcgggaggccgagatgggagaatcgcttgaacccaggaggaggaggttgtastgagctgagatcgtgccattgcactccagcctgggcaacaagagtgaaactccgtctcaggaaaaaaaaaaaaaaaaaaaggcaagttgaatagaattatatctattgaagaaaataaataaataattaataatcttctaaaacagaaaggaccaggcacagatgagtcactggtgaattctaccaaatatttaagaaakaaattaaatcaattttctatgatctcttccaaaagatagaagcatagggaacactcattgtatgatgcccatattaccctcaataccaaaaccaaaggcattccaagaaaaaaaacaacaacactattgaccaatatctctcatgaatttagctgcataatcttcaacaaaatattagcaaatcaaatccaaaatgtataaaaataagtattcaccataaccaagtgggatttatcccatgtataaaaggttgattcaaatttgaaaatcaattaatgtaatccatcacatcaacaggctaaagaagaaaatcacaagattatatcaacagatgcaaaaaaaagcacgtgacaaaattcaaaactgactcatgatgaaaactctcaacaaacaaggaatagaaggaaatttcctcaagttgataaaggacagctatgaaaaacctacagctaatgtcatacgttaatggtaagaaactagacattttcccactaagatcaggaacgaggcaaggatgtcctctcttgacactcctttctgatatcatatgggaggttatggttattgcagagacaagaaaataaaataaaagatatacaggttaagaagtaaaaaatgcaaatatttttgttcacagattacatgattatctatgtaacaaacctggaagaataaaaacaaaacaaaaaaacctcctggaactaataggtaactatagtaatgtttcagggtataaagttaatacaaaaagttagtcacttttctgtatgccagaagtgaacaagtgaaatttaaaattaaaaacacaatcctatttatattagcatccctaaatatgaaatacctaggcataaacctaacaaaatatgtacaagatctatattaaaactctgatgaaagaaatcaaataacaactaaataaatggagagacattccgtgttcacggataaacaaatttaaaactgtcaggatgtcagttctttcacttgatctacagattcaatgcaatcccagtcaaaatctccaccaagttattttgtggatgtcaacaaactgatactaaagtttatacagagaggcaaaagactcacaatagccaacgcaatattgaaggagaagaacagagttggaggactgacactacctgaccccaagacttaactataaagcttcagtaaaataatcaacatcattggaacagaatggagagcctttctgatatcatacaggaagtcatggctgttgcaatgagacaagaaaataaaaggtatacagattaagaagtaaaaatgcaaatattcttgttcacagattacatgattatctatgtaacaaatctgaaggaaaaaatccaacagaatggaagagaaatagacccacataaatatggtcaactatgtttaacaaaggagtgaaggcaatacaaaggcagaaagattgatggtcttttcaacatacggtgctgggacaactgtaaatccatatgcaaaaaatgaatctacacacaggctttatacccttcacaaaaaattaactcaaaatagatcatagacctaaatgtaagatgcaaaattataaaactctagaaaataacagaaaaaaatctagatgaccttggataaggggatgactttttagatacaataccaaaaacatgacccataaaagaaagaattgatacattgaacctcataatgattaaaaacttcctgctctgcagaagacactgtcaaggtaatgagaagacaagccacagactggagagaaaacatttgcaaagaacatatctgataaaggatttttatcaataatgtacaaaaaaaactcttaaaactcacaataagaaaataaacaatcccattaaaaaaacaggcaaagaccagaacagacacatcaacaaagaaaacatatggatggaaaataagcatacataaagatgctcatcatcatctgtctttagggaattgctaattaaagcaacaatatgacaccactacccacctattgtaatagccaaaatccggaacactgacaacaccaaatgctggtaaggatttggagcaacaggaactctcatttattgcttcaaatgcaaaatggtacagctgctttggaagatagtttagtggtttcttataaaactaaacacacttaacatatgatccagcaattgcactccttggcatttgcccaaatgaggtgaaaacttatgtccacacaaaaacccacatatgtatgtatatagcagctttattcttaattgcccaaacttggaagcaaccaagatgtctgtattagtcaggattctccagagaaacaaaaatcaatgcaatgaatatatagacatatgagaggggatttattagggagattggttcacacagttgtggctgaggagtcccttgagaagccgtttgcaaggtggagtccctgagatgctggcagtgtggcttctcatctagtccacttggactcaaatgctaatctcctctggaaataccctcagacaacaccccaaaataaygttttaccaggtttttagatattctttaatatagtcgactcctaaaattaaccatcacaagcccaccccttgtcaacttggcacctatatatatgcaactcctgaaatcatacttaatttccagataagataataataaggtaatagtttcacctgacaggatgcagctatcctgcgtacaaccaaaaacacattaatccctgatatagtttcgatttgtgtactgcccaaatctcatgtcaaattggaggaggggcttggtgggaagtaactggatcatgggatggatttcccccttgctgttctcatgatagtgagtgagttctcacgagatctgatgrtttaaaaggtgacactttccccttctctctctctttcctgccaccaygtgaagaaggttcttgcttccccttcatcttcctccatgattgtaagttttctgaggcttcccagtcakgcttcctgttaagcctgcagaactgttagtcaattaaacctcttttcttcataaattacccagtctcaggtagttttttacagtagtgtgaaaactgatgaatataattccttcttcagaaaaagtccttgcatgatgtttactcttctccttatatctcatgacttaaatactatgatacaaaattaacaacacttaaatactaatataagttcagaaaatcttgttacatgataaaagaataagagaggaatgaaaataaagatctttgcttactatatgcatctatacacatggacatattcttaacaaaatagggaggaaatactcataacagtctgtttctgtaactggttacatgggcatagctggtattgataaactgccgtcttctactacccattctgtattctctttgccttcgataagcacctcactggtcatgattttatgtgtgtatgwatakatgtatgtatgtatgtatgtatgtatgtatgtatgtacacatgtatttattctctgcatcatatgatagtcatggttctttatctggagttacctaaaccttcattcctgaagagcctgggctattacttgtcctgcctagattggtttgttgtaacttccaattgaccttaatcacagggtatggtagtactaagaggcaccctaggggatcttctgtattccagaagatcttccttgcctccactatggagtagtagtccaatttcccattggtagtctggatcagtcaccgcagccaacaccrtaactccctgcttagcctgttgactcagaggcatgaggaaccccaaggggccaagtggcatccttatcttctgcttgagtggaatcattgttgtgtctcctggcggaagcactcctcactctggaactaagacctctaggccagcagagctaacagtcatgggaacgggaagcaaaaattttgctagtgggtcactaggagtaatggtgagtagtgccatttccattcctgacccttgattcctggacctgtgaatcccggctataggagaaagagcatcatatgttggacactgatttagagcacctacaaccttctgaagaaccttgcctcagcctgcaaggcattgtcacctagctggtgctgtaactgtgacttcaaaaggccatttcactgttctaccaaactggctgcttcaaggtgatgaagaacatggtaagactagtgaattccacgagcatgagcccactgctgcacttctttggctttgggtgaattccttggtcagaagcaatgctgtgcagaatgccgtgatggttgataaggcaatctatgagtccacagatggtagctgtggaagaagcatatccatatccagagtgtctattccagtaaggaaaaaacactgcccctttcacaatgaaggtgctgcattgtaatcaacctgccaccaggaggctggcagatcaccccaaagaatggtgccatactggggaccccatgttgatctctgcagcaggcagagtggtcactcagtggtggctgtagccaggttggcattggtaagtagaagtccatgttgttgagcccatgaacagcctccatccctgccaccatgaccacttagatcacgagtccatgacaggggtggctggggaaagaggctgacaaatattcacagaacaggtcattttctacccctgattatttcagtcctcctctgctgaggtcaccctttggtaggcattgatatggaacacaaatatcacttcctttgccagctcagagcagtctatccacatacctcttcctcaaatttctttgtcaccaattttctaatcatgttccttccaagtccctgaccttctggccaaatcactggctatagcccatgaatcagtatataattgcacatctggccatttctccttccaagcaaagtgcacarccaggtacattgcccagtgttttgcccattgagaagatttcccttcaccactgtcattcagggacatcccagaaaggggctatagtgctgcagctgtccacttcctggtggtgcctacatatcatgcagaaccacctataaagcaggtcctggtcttctcttcctctggcaaatgaccatggggtgcaggcaagagagagaaggcagcatagcaggagtaggaaccataagtatttgggccacttcttcatgtaacttacttatgcctccaggaccttttctggcccaatcacatatatacaccgcttccattttatcatagtgtgctgctgtgcatgcccatctttatggtttggtgggtcagatcacacccagttcatgatgagcagttcagattgcatggtaacttggtggcccataatcaagtgtttcatttctactaagatatagcagcaggccaagagttgtctctcaaaaggatagtggttacctgcaggtagtggccgggcctttctcaaaaatcctaagagccttcaccgtgatttacctataggggcctgccgaaggctccaaacagcatccctatcggccactgacaccgcaagcaccactgggtctgctgggtcatatggcccaaggggcagagcagcttgcccagcagcctggatctattgcagagccttctcctgttctgacacactcaaaactagcagcttttcaggtcacttggtagatgggctggagtaacacacccaaaggagaaatgtgttgcttacaaaatccaaatagtttcactaggcacttttttaattgtaggaggggccagatacaacaacttatccttcacttcagaagggatatcttgacatgccccataccactggacccctagaaatttcactgaggtaggaggcacctaaattttgctcaatttatttcccattctctgatatacgaatgtctaacctataagtccagagtggttgctacttcatgctctctaggcccaatcagcatattgtcattgtgagaaataaacttacccaaccaaacccaaagaatggactcagagacccaaggaatagcaaaagtgagacttttaatgacagtcttgcaagattgagtgtctgataagcaggcacacccagcacagttttaacaagcactttatcccctagtgtgtaggtccctccccyggttccctataggctgagtactatgggtttacaatcttcctggacatcrcctattgattgttgggtaggggctgtaggtgatttttattagggttgtcttgctgcattttgttgcagcccacaatgcactgcaatccttgtcagctcccctgagcttataagtaaaatacttaactctttaagtatttgacttatgacctaagtagctgggcaggctgataagaatagaaaaagggagctattttgcaggctaataaactttcatcttagactaaactttttttggtttgggtgagggcaactaagggctgggggggcggggtgggcacaacaagtaggcattggctatctaagcaggggcatattacatcctgtttcttctgtagttttgctgacctaagctgatttaaggcactttgtcttggaaatggatcactgtatacataagttccttcagtcatcaatatagtggaccagtgtgatatcttattgaagggaaaagtgatcaagattcctgaaaacaattgtgacataggctagagaactgatatacccctgaggtgggagagtgaaggtatattgctagccttgtcagctgaaggcaaactgcttcaggtgggccttctggacaaggatggagaaaaaggcatttgccagatcaatagctgcacaccaggtatcaggagatgtgttaatttcctcaagcaatgaaatcacaactggtacagctgctgcaattggcgtcaccacttggttaagcttatcataattcactgtcattctccaagagctatctgtcttctgcacaggccaaataggagagttgaaggtgggaatcaccattcctgcatctttcaagtccttgatggtggcactaatctctgcagtccctccaggtcatgtttttgatttactatttttgtaggtagagatagcactaatagcttccatttacccttttccatcataattgccttcactccacaggtcagggagccaatgtgaggattctgccagctgctgagtatgtgtactccaattatgcatctggaactgggggaatgaccgctggatggggtcagggaccccctgagtccactgtaaattggatctgagataaaactctattgatcacctgacatccataagccccacactaactggggggccatggtgacatttcaggtctcctggaatcaatgtcagttcagagccagtgtccagtagttcccaaattgtctgtttatttccctctccccagcacacagttaccatggtaaaaggccatagatccctttagggaaagatgggagaaagatgaacagtatacgttctttgtagtctaccagagtccttcctggagggaacccagcctctccttcacccaaggggttctgggtctataaactggctcaagtctgggaattcattgaggagccacgactctcagtttttatgatttgagttggacttttgtgcagttgacctgaaagttttatgcttatacagatcaggtaagaatttagtaggcttcctatctatttcactttatttatttatttatttttatttttttgagatggagtctccctctgtcacccaggctggagtgcagtggcgcaatcttggctcactgcaagccattctcctgcctcagcctctcaagaagctgggactataggcgcccgccacgatgcccggctaatttttttgtatttttagtagagatggggtttcactgtgttagccaggatggtctctatctcctgacctagtgatctgcccgcctcggcctcccaaagtgctgggactacaggcttgagccactttgcccgaccctatttcacttttagaaacacgtgattaactagccagtgccatagatctacacgagtcagaccattttgattgttgctttgctctgctgtaccttacagtaactacatccaccttgcctttgacagttgagtgctgccacttggcccctgccaccccaggatccaattatccccatagcatttaagtttcctaattgagtgactgaggttcccactgtaaagtccagcctacagagaagagcaatcgcggagctcttcagggatgctggcactccccccagaaatctgtttctcaaggttttggtgaaagaccagtcttctggaccctcctagtgtgtgggagttggttttaagtgacaaatccactctagcattccagcctccctaagcctctggatcccttcctttaaagtaaaccaaaggagatcaggcatctccaactcagtcatggtggaccatcttttgacccacatttcagccaaccaataaaacaaactgagcccctccccaaattccctgcgctgcagcattaactgcagaatctctgctcagtgggtccatatcaataaattcagtcggctccctttatgtctctgttagtccatacccttaatatccactcccacacatgttccccgaatttctgcttgtataaattagaaaaccaaagtagttcttttagagtgtaaccacctcctcatggggcacactgtgtacctcacctgtaggggctgctgggacttcagtctagttacagtaggtctagaaggaaagagggttggtgggggcgggtccagagattcagcactgtcttgcctggcaactggctcaggggaggctgtgagtcccatcagagttaatcccctcaggcagaggtgggatttatttctgggataggggaggtcacttttagcaaataagactcatcagaatttctgagctcaatgtctctagcctcatcaaggtctccccacgtttccccatcccaaatttccgcaaagctgagactcagctttcgcggtaattcagtcaatcgagggacaaaggcttgtgtttgattttcagcaatttcagccctgtggctacgggagagaagattctgacccagggcacatgtagaaactcaggtcatttatgtgaataccggagctcacccctttctctcatcacttggtttagccgtgctaggagcaaccaatgaacgtggcatattctttggttttcctcaaatgttcaaacgtatcaggtataaagtctctaaattatttgccttttataagtggtgaattaggagtatggatgtatttattttgcatatttacaaacagtaagcacgtgatctatcagtgctctctgcgctattagaagtagagtctccagcatttttagttctaaacaggttagagagccaattccagaaactccaaaaccaaaaattaaaattgtttcctctagaaccactcctggtaccaaaatctgtattagccagggttctccagagagacagaactaatagaatatgcatagctagatagacacatgggaagggatttacttgagggttggctcaacccttctaattagggttggctgagaagtcccacaacaggccatcttcaagctgaagaccctggcacactagcagcatggttcagtccaggtctgaaggctgcagaaccagcgaaggtgttggtgaaattcccagtccgtggccaaaggcctgagaaccaggggatggattgagggtggggcactggtgtaagttctggaatccaaaggctgacaagcctggaattgtccagggtcaggagaggcagggtgtatcccagttccagcagacagatcgacacagtcacctttcctgtttttgtcgtgtctgggtccccagcagatcggatgttgcccatgcacactgagggtgaaccttctccacctaattcactcaggctcaaatgctaaattcctctggaaggatatactccaaaatactacactaccaagtttttaggtattccttaatcctgtcaagttggcacctcaaattaaccatcacaatgtaggtgactggctaaataaactgtggtacctccggacaataaaatgctattcagcgctaaaaggaaatgaactatcaactcatgaaaagcctgggaagaaccttaaatgtgtattattaagtgaaagaagccaatctgaaaaagctacatattatatgattccaaccacatgacattctagaaaaggcaaaactatggagacagtaaaaaaatcagtggttgccaggttcacagggagggagaataaatggatggatcacagaggatgcttagggcagtaaaaccattctatatgacacggccatggtggatacatgtcatatatctgtccaaatgcatagaatgtacaacaccaagagtgagccccaacacagactatggactctgggtgatgatgacgtgtaggataatgagagtggggaggctgtgtgtgtgtagggttaaggggcatatgggaaatctctctaccttccactcaattttgctgtgaatttaaaatgccctaaaataaagtctctcttaaacaaaaaaaaaggagggggtgatggtgtgtgcacatccccaagctcaggactctgtgctggtcttctaagcctaggctcacccttccccatctgctctcctgggggccaacggagtggcccaacacacatctaagcatctacagggctcaaaagcttcagcagctcttcacccctcctaggagaaaacccaaacccttgggcatggcatggggcatccttcacggtgtggctcgcatttagctgatgggcctttcccatctcacgtcccatgctgtcacatgagaaggtatttattggggggttggctcaacccctctaattagggtgggctgagaagtcccacaacaggcctcagtttccccactccctgacctacttccctgtaccccagagactctgaactttgcccattacacaggtccaggacaatgtcagtttctcttgtagactgaattttaagtccgagatttttcttgagctcatgtgctccagtccagattctttccataaaagaacatgacaggtgatgccctggcaacctgcaagtccctcgggtggtcatggtggtccagggaaaggaggcctcctttaacatatgggagaatagccgggcacagaaaagttatgtaagagcatatctttttaaagcataccttttaaacattgtgaaaatttgtccaaagacaaggtaaaatgtcagaggcatcagaggatgtaagcattaagagataaataaaatgtaaacccatgggacaaacctgaattcttcagagcaagagacagacttctaacacacagcataggggagaatgggcctcagggtgtggcaacacctcaacactatttcctaacagttgaagaagacaatcaggggaggttttcctaggagaggagttttgaatgcacgtgaatctggctcactttagataaacatacctctgagaatttttatttattttgttttcacatctacacttatttaattttccaaaactaaaatataacctcttttccaatcactaaataaatgtgatcactgtattataaaaacaattgaacaatgcacaagagtattttttttaaagtcaaactgaagtgctatcacattttcgtggctgtcccatggcgtaaacccttctctgtgtctatgcaattttacacaaatcacactataaatgatatttaaaaacatatagcttttttttttttttttgagacagggtctcattctgtcatctaagctggagtgtagtggcacaatcatggtggccttgccctcctgagctcgagggatcctcctgcctcagcctccccagtagctaggactacagtcacaagccatcacatctggctttagtttttagcagagccagggtctcacgatgttgcccaggttggtctcgaactcctgggctcaagtgatcctcccacctcagcctctcagagtgctgggattacagacacgagctgccgtgtcctgtgattccttgtttcttttcttcctactcctccccttttctgtacccactttcactctatgcctctatgcagtctttgtgacctgcagtgtgtctgcacacacctttgtccctgtacccacaattacagatgagcaagtgtgcacaggtgcaatgtgcaa

SEQ ID NO: 96657 - DNA, 43873 bp, Homo sapiens
catcacaaaggggcatgtattggcgcccacgtggagcactgacacaagtcggcagtgggacaacaaactgattatctcccagaaatggagggcaccagagatgtctgtttccatggttaccacaatctgatgagatcatgcttgaggaaaagaacatgatcacccagagtacacagtcttgcttagcatttatagtacatgtaatattagcataagactctcttttctctattttcctacatggagaaccacaatgtaactctgaccttatttccaatttcctcacagtttagtttttgacatcataaggcggatgacatgtggtacctcctcagagctcctataaccccttgaacacatatcttgtgtggcactgacttcattacataatatttcagttgtcagcaaggtgtctctcccactaaaatgtgggttcactgagagtaggtcaggtcagttcaacaagatttatcaagtaccttttatggccgaggcactttgccaggtgttggagatgtagaaatgaataaaaacagtctctgaccttgaggaattcatttacatctagtaacaaagacagatataaacatatttttcaatactacacagtaagtgcaaggacagacgtcatatatacattacctcgagctctgaaagtagctcttaactccaccaaaggggtcaaacaagtattcctcgaattggctactgacctgaatcttgaaggatgagtggggattaactagcaaagcagttagagtggaggtggggtgtgaagtcagggagcagtgggttactgagtgactgggttaaggaagcaaagacagcgagtgcagatttctcctcccagaagattcagtgacaatatagatgatgttgtgaaacagtttgttgaacttatcttgtgccttatggtgtgctggtcagagggaagcccttggtctttgcctttgttgtcataaatatttagtgctattgactgcaaatgtgcttgatttctttctttctttttttttgagacagtctcgctttgtcgcccaggtcggagtgcagtggggggatctcgactcactgcaacctccgcctcctgggttcaaacgattctcctgcctcggcctcctgagtagctgggactacagccacatgccaccatgcccagataattttttgtatttttagtagagacggggtttcaccatttgagccaggatggcctcgatctcctgacctcgtgatctgcctgcctcagcctcccaaaatgctgggattactggcgtaagccaccatgcctggcccaatgtatttgatttctgaggctcaacaaaagctaactttcacatttaagtccattttgtgaagatccttcatgaatatgttggagttattttaatgactcaagtgattcaagtgttaaaaaaaaatgatgaaatgaactccccctcatgctggctttctaaaacttggaaaaatagaaaagtataaatttaaaacaagtctaaaaatggtccaaacgtataatttataaagaattaacgtttttaggctgggtgtagtggctcacgtctgtaatcccagcactttgggaggctgaggcaggcagatcacctgaggtcaggggtttgagaccagcctggccaacatggtgaaaccctgtctctactaaaaatacaaaaattagccaggcatggtggtgggcacctgtaatcccagctactcgggaggctgacgcagaagaattgcttgaacccgggaggcggagatagcaatgagctgagatcacgccactacactccaacctgggcgacagagcaagactccgtctccaaaaaaaaaaaaaaaaaaaaaaaaaaaattaacgtatttaaaatatctactttcctgtatccttgacgattctctgtttcctcctctgttcccctttttaaagaaattaactgttatacatgtaacatgtcagttggctgttatcctagagatggcaacatcatatctgaaaaaaagaccttatctataattgatggcacctaatgaaaaaatacatgccatggggatataatcaactgagagattctatgcagtggaagttatgaagtccgaagtcttgtgagaatcacattctttcatttaaagtatggaattggccaggcacgcctgtaatcccagcactttgggaagccaagtgcctgagctcaggagttcgagaccagcctgggcaacatggcaaaaccctgtctctatcaaaaatacaaaaaattaattggctgtggtggcacgcacctgtggtcccacgtacttgggaggctgaggttggagaatcgcttgagcctgggaggtggaggttgcagtgagccactgcactcccacctgggtgatagagtgagacagcgtctcaaaaaaacaaaaaaccaaaaccaaaaagtatggaattatgagaaatgaagccttatttccatcaacaacaaagttcttaggctgtctactaaagaattttggtgtaattgctctttcctctaatgacgctaaccattaaaatatcttgcttgacttgtatttctgatgactgactggctattcaagaacttgcaagattttctatcacaacacctatgacctcaggctaatcagtcaatctgtcaatgtgagaacaaagggattttcctaaatatctaactgaaagtattcaataagtacactacacaaaaatcaggaaaaattcaattttaaaaagtaatttttaaaagccagtttgaatcaatatctgatgcaataaatacaggaaatgaagtttattatacaatttctacatcactctttctcctaaaagtcctctgagataattaaaaatgaacattttgcagttccaccaagctgccatggtcaactgaaaaggaaaaggtatttttgttgttgttgttcctgcaaaaatatgacccagtcactgaaaataattcaaaccatttccagtcactaagaactttctctgaaactcatgatggtaaaaactatggcacatctctcagccctcttcaactttttaaaatatccttgttacagatgtgaatgaaatggtttgaatatggttagaagctagagacctacagcagcacccaacataaaaggaacccaacaagcaaatttgtgtggcaaatctactttggttaggcaatgaaaagaccagttgcagttttctcttccttgttcccagggatacccaatagttactcttctgtatttttttcttagatgtttctggttaccgaattcagtggcacaacacagcaactgaactaaaaaatgaaaattgtataaaacttcccaaccaaaggctaaatatacacaccttttcagattgttgggcttgcatctgttctatcattttagattcacttttatactggggcttgtgcattgactgcatacttagaatgttaatctgatagcattaataaatgtcatttagccacataaattccacttttaccaagaatcagcacatgaacaatcatttgaacaatataaatgtaatctaaatgtatcaacatacatacacacaaacacacaccagtcgctcctagcaatcagtttgaaaatgcataaatggtagtccactgtgagaactattctctttagttgccctagaaatgctgaatgacgctttcttttgaaaattcctacttcagcagattaaatgaaaaaccacctagtaaggacttcataaaataatgtaaccaagaacatcacaaaattttgagttccctgggataataatgtgacactgaaaaaaatgtttcagctgggtaaagatgcatattgtggaagaatacagtagtggaaaatgaaatggagggatatcaagagatctggaaaagcaatttcatccatgtggacctcatctgaaaatgttaagttttagagaagaatctcaggaggtttcaattctgtaaatgtttcagtcaaaatcgaatttctaataaaaaaagagacaagggattaactcattttcctatgaacaaacaaaaataaagaaaaaggaagcagataaatacatcacaatcactcagatcactagaacaaaaacaaaaaaatgaaggtaaaatgaccatatatacagagtgctggaatagcagatcagttaaataattatcaaatttagtgggcatgatgatataggcagaaatggggaggaaaaacctgccttatatgtactttcgcaatatgcccatattgtggcatacatttttactaacagaacttagcaaaataaaaggactcaaagccttctccattaactgtgatagattgttttccatttgagcctggggttgaaggtaaacttaacagatcaaaacaaaatatagacctaagtatgtcagtagtgctaagaatttgagcatgaatgtcatgtaagagcaaacccaagcaagtcggttattagaaggcagcaagtattatatcactctaaactctgcctagtaaacatgtgattggctcacatttttgaaacttgtggtcattttgaaaaaaaacatttaactgtaaaatttttttttttttttgagatggaatttcgttcttgttgcccaggctggagtgcaatggcggatcttggctcactgcaacctccgcctcccgggttcaagtgattctcctgcctcagcctcccgagtagctgggattacaggcgcggccaccacgcccagctaattttgtagttttggtaaagacgggatttcatcatgttggccaggctggtctcgaactcctgacctcaggtgatccacccgcctcggcctcccaaagtgttgggattacaggcgtgagccacagagcccagcttaacggtaaattatgaggaccaagcactctttattttctctttcctcagtttaccttctttaaggcattactgcagactaagcctaaaaaaaagtaatttgttttcaaatgatatgatttactctctggcctggatttcaaagatgtcagtataatatggattgtatatattgtttaaattttacaaataacataacgcctattatagaaattttggaaaatacagaaaagtgcaaagaaacagaaaaaaaaatccttcatccggtcagcagagttaccattttcactttttagttgcgctctatattgtacttctatagtcgctacactactctaatatcctgacttagtcaacttttatatcacgagtattttcttgggtcattaaatagctggcacttttaaagtgtttacggagtatctcattttgtagtaatgctatatgtcctggtttttataacagtaagagaaaaagctacagcctattacaaaacacttcctatatcaatgcgcaaaagagaaaggtggacacagaaaaggggaaatgtaacgtgagaattagcaatagagaaagaataagtgagaatcgcttaattagaggcaagataatagggctaagtcacattattgattcttgactttaggacaaaaggggtacatgtcacgcacctctgttccaagtttgtatttgcaccttgaatggcgatttattagataaagtcgcggttttacaacctaagcaaatactgctaatcctcccccgactcaatccaccttgaggccgccttttaaatgctccgactcccttcagagaaagcctcgaggtaaaaagaaaaacctgtctggcaatccagacctgccgtcgccacgataaccagagtagcaggcaggtgtgtgcttactaaagccacggccaacagagcgaagatgcgcctacaccgcacgcgaagtgtcaccgtagctctaggaccacgcatgcgcgaacgcagattcgcgatccaatggctgagcccgtcacaggacagatgatcagggtgcgtccgccttttcgttcccgcttctatcctcctcccctttcccctccccatgtccctccttcttctccctcctccctctctcccttcctctggcgtctccagccgactttcgcttcccgtcagcagcctttggcggaagagtgtcccgcctcttccgctctacagcggaggtggctgtggcggtggcgctggtggctgcggcggcggcggcggcagcggcgctcgagcggttcctgtcagggtcagccggcgggccccctgggtggtccacctgcaaatcgcggagcggcgccccagggatcgatggcgatgaactataacgcgaaggatgaagtggacggtgggcccccgtgtgctccggggggcaccgcgaagactcggagaccggataacacggccttcaaacagcaacggctgccagcttggcagcccatccttacggctggcacggtgctacctattttcttcatcatcggtctcatcttcattcccatcggcattggcatytttgtcacctccaacaacatccgcgagatcgaggtgaggggagggagctgtggtgggagttggcgttgctcgggaggagggtcctacgcgcccactccacttctttcccagcgcccagaatccagttgactggctgacctcgcgccgtccaccacccccttccctctgtttctctgttttttctttctctttctgcgggtttcctgaatttgcaggtttgtcctagctttgtcttgctcgagatttacgaaagagcaaatccacggaatgagctgagacggaatgaatgtttaatgcagaagataggtcaggtggagaacgcttcttcagtgggcggtttgtgtggttccgtgggggattagtgggggttgttcacggaggtaaaaagagaagtgggggcggggggcaattgtaactaggtagatgtaaccctgagtgaattgacagggtcaaagtgccattacctttgtgggaagtatcccaagacacagagatggacaccttggccattgttgggagaagaaccagagtcgtagaggtattgacgattctaatgtaaagaagctgtcgcatgttatcaggtcacatatgaggacttatgacaaatgtgcatagtacttttcattttgagctaattcgatatttttagttgtagggcaagatgtacataaaagataacctgaaacttcaattctggttttgcttttaggctacgtttattaatgtgccctacctttgctgggtttttgttttgtcttgttttgttttgttttttttttttacaaaaagagccagtgaccacactcagggagtaagttgtgcactgtctaccaaacattttactgatattaactttgctgaatgtgtaagacatgacaggaaaacttggggaaacatttctttgtcgaaagcacagtatctttatctgcaggggcgaagacggttgacagtacactgtattaatatatactctataggtgtccagtattaagcatctctcatcttttcttgcatatctgagaatttttttttttctaaatctatttgaaagggcaggaactagtaccaagttctcttgattccttctgttctgtttatacacacacacacacacacacacacacattttaataaatatactttgtgatttaatgggactttgagagtaattttatttttaactactgaaatagggatggggttccagtttaatttgcagtgttatctctaaaagcaagattgatgtattttgtaattctacagtgcttacttcagtgttgatgacagtaataagaatagtatctatagaataactagttttaaagttttttactaaaaattcattctcaatttaataactagagagttacagtattttttttcagcatgtattttagtttgttttatcaccttaatctccctaatagtcctgcaaatgtagtacttgttctaaccatactgggatcccacattatattaggatatgggcaaagcggtgtcatgcaaggaacatgggcattggctggggtcaggcagagctggttttaaattccagctcagctactaaccagctcagtttcttggaaaatttccgtaatctctctgagcttcagtttcctgcaaaataggtagaatcattcatatcttctaaggtgtgagaattagaagcaatrtaaataagatgtctggcactagggatctgtctcctgatccttaatcaggagaagagaaatagagaggttgagatttgacagtaaactagttgagagtattgtaaaaaatgagacagaaactcaggtgtcttgattcccagctttaagctttcaccctacactaagatccttttactgcaatgttagtaaagtagaagaaaataatttaacatcagaaatttgaatgattttatttaaacttcttaagataataagatgaaaatagcaataatttggaattgtatataaattagtattttcagaactcagcttccattagtatttactatagtataaaaataaatatttaacttttcttaaaatctttgggttttggagtaaaataaggttcttcacgctaagtagtagacgaaatagaaatttttcaaatggctctcatgtgtaattctgatttcaagttgcctgaagaatctgctgcagcttagcctggttaaaagggcactgaagagtcagggaattaaggttgaaatcccagctctgtcactctgtactttgtgatcttaggtataattttgagtccaatttctttacttgaagagccaaaagattcagattagactgcgtctaagaggttgttcaactctaaaattctatgatttccaattcaaatgtgattttaaaaaagcaggatgtgtttaaattgtattgcctttgaaacaggaggaaatgaaaattaagaataattgggaattttttactgacactgacatacagttgtgcagacagaatccacatatatatttttaaagtttggatgctaaatgtatagagaaatgcttctgaattgtgtctggaaattccccaaacacacatacttgtttcctgcttgttctctaccctttgttacccactagttgtaaatgggtaatgagaagttcttaccaacattcactttcatactgtaagttactcacactttattttttatttaaaaaaccttcattgctattttagttcagattactagggcaaaggaggcttgtcaaatccaaatgcttttttaatatagcttaaagtgccaaaatcaaaaatccaaactttttcaagtataaaatcactggatttttctcattcccgcagaaatgttacattaaaaattactacttttgaaaagtgtcttggacacccctggaaaaaaaagatattttcacattttaatgcttacatttggtagcagatttcctctactttttaggtttatgtatcttgtttagttggtttttagattttcaataatctaaataaaatgaggctaatagaaaatcataattgctttatcattcacgagaaaatattttaaatatttaatatcttcatttattatcaggagcagggaatgaagatttcctttaatttggcaattgtgagtcaggcacatctttcaaagggcactgattttctagtctaggacccttgttggtgagactgagatacagaggttacttgaaaaatatagtgaggttattcttaacttttgtaaaagtatcagtgtgaagttacatagttttaaatttatggtttaagtcagattaggttgttattcagactaagtttaaaaactaaacatttacttcaagttagtgttgccaaaaacatttaaggtacattttcatgagatcttagtgaattagctccccattccccacgtttgataaactctcaactttcttcttcaccttattttatttactgccctcgattatttaatcctgattattttctgttgtcctagtttctgataaaaatttttatgtatgtttttactcctaaattgaattattagattataagatttttaaggagattaaatttctcatctgtatttagcaatctttgttatrcttaggctttagctaagagtcagggaagaataagttgctttgtataaattatcgttaaagattaggcacttttatgttaaaaagtttaaggttttaatattcaagttgattttagttacttagaagctgacttttggaaattaaggtttgtggtgttttaacttgtttctcaagtaatgttagtacttagagcaaggaatgcgaaagtaaatatggccagctggaatgttttgcgtggcccaggaacatttaacagatgaacatttgtaatcgatttgatgataggagagcactaactttgaatcccaattatgagaaatgtctcctccaaaatttccattcttctcattagtattagtagacctatattaccaaaaaattgtacatattattgttgcattttgaattttatcaataaaaattgttgcaaatttgttttctctcttgttacataagaacctacatacctaatatcttggaccatgcttctgggtccacaaagcctgaagtatttactttctggcctcttacagaaaaaaattgcctgcccatgacttagagttttaatgaatcataccagcaaagttagcatttgctacacaaatagctgtgtttaatttacatgttctagtcctcaataattgttcaagataggtgtaatgatccctggcaattgcttaggttctgtctttgtacagatttagtagatataaaatttaccattaatattggcttaggaacatcattcttcatttctttgtcacagacaatcaggcagcctaaagaaagttgcttttgaaagttttacttaccttttgtcttcattaaggtctctcgaaaagacttcagataaatcatttagtgtggaataatcagttcaagggggagtacttaaaatatgatttttaacttaatttgattaatacttaaaatgatttaccttattactcagcattttgttgaatgacctgtttaggtcttatgttgatttcctttttgacaaatttacattcaaaatggaagttttccagtcgttttcctatatagtgtaaaaaatgcgcatctttcaaattcctcctttcccactgcattaaattctgagtctgtttcttagaaatataatgtatttttagaattaccaagaagaaatgccagtttgacttaggtgaacaattacagtggtagcaaaacaaagctgagaatgtgatatctcctatctgctcatctacatctgttctattttgcctctggttctttgtcttggattttagctaatgggcaagtctccagactatcattgtagtttgcactgtgccttgtatgctcttgacgttagtaagcattaatttttcaaaatgagagaactgtagcttgtcttccacttggtagcctcttttgtttctaaagataggaactatgtgctttagtgtgaactttattttttgaataaagttgttacaacccatggtaacaactttattcmaaaaataaaggattgttaggcccataaggttttattaaggtctggacattatgtctggctacccttgaattttagctgataaagggtgttgtggttttatttgatggtgaaaactcataagctgagttaaatttataaaggattttaatcaacattggacattgtcttcatacattttcttcaaagtgcatctctgggaatagtgggagatagggaaagtttgggcacaggacttccctccctgcccacccccccacacacctttttggagcagaggaccttcttaaggagcttggcatcttttggggaagatgagacacaataacaagaaaactaagcattgctaggtgagtggcacaggcaagaatatcctttggtagttcaaaggaggatgcaatcacatctatttctaatgaccatggaacactgtgtaggaagtgggctttgagctggtacttgataaatagcacttctttaggggaggtttggatgcattccaagaaaggtgattaatatgaacaacgatctagtggcaggaaatcaaaaagtgtatagataaaataggagtaagagcaaattagctggtgctagattgtggatagtcttgagtatttgataatgaatatattaaacgagggaagtgacatgattgctacactatcagttaggagtgggttgagcaatgagtaattatgattttcagtctcatgtaaaatggcttaggaacatagtgtgaagctgtcatggaggttctgttttactgagtcttcacttgatctaatcatttactgcccagccattcttaggaactggctctcatgcttacagttcggcatggaagctagggttctaactgccttttcacggtagcaatgtggaagaagggatgaacaaagagataaaggccttttaaagaaggttcttgaaaactgtcatgtaccacctccacttagtaacaaggccacacaagctacaagggaggctggaaaatgttttcattctgataacaaggttctcagtaagtgagagttttgtattgtgaaaaaaagatagaatagaaattgaggcgaggggttgctattagcagtctctgcaacacagggttagaggaagatttatctggtggtgaaatggtatgtcatcaggatgagagctagatctcatatagacgtgagagtagtagtttagacgctggaattaatgtttgcatttttatattgattataataatattgaatccaacttgatttcatagtgaaactcattaatgttttttcatgtgaaaagtgagttaggtatgtggctttgctgatacttaaaaaaaaagttataggagtattgaatatcaccatcttcctcttgttttcttcaacctcttttttccatctctgttcagcatataaatgtgttttggtttctccttaaaaaacaaaaatatccttttatttttattttatttttcttttttagaaacaaggtcttgctctgttgcctgggcttcattgcagtggtacagtcgtagcgcactgcaaactcaaaactcctaggctcaagcaacccttccacctcagcctcttgagtaactaggactataggtgcatgccaccaggactggccaatttttaaatttttgctagagatgggggtctcgcttggttgcccaggctgctcttgacctcctggcctcaagcagtcctcttgccatgtcctcccagagtgttgggattacaagcattgttagccaccgcacctggcctttttttaaaaaaaatagagatggggccttgccgttgcccaggctagagtgcagtggcaatgttcatagctcactgtagcctcaaactcctgggctcaagtgatcttcttgcctcggcctcccgagtagctgggattacaggcgcaagccactgtgtctggcttaattgtatttcataataaaactattaataatgactaacattttttgagagtatactctgctaagagttttacatacatcatgttagttgatacagtgacacttaacaagggtaacattattctctccattttttttttttttttttttggatgaggacattgaatctgagattaagtcttctgcttagtcacaaaggtgggattcatactttagccatctgacctcttgtttagtttcctgtagtttcctgtattctctttccacacaatctgtttaaaaagaagggtccgtgcttattgccaatgtccattcccatctccctttaactccttaatttgctgcatttgaagtatgttaaatggtaaaaaatcctatgaagaagaatgaaggaagggttgatggtttataattttaaatagggtagccaggggaagcctcagtaaaatggcatttgaataaagaaccaaaagagggaagagagtgaaccatattgatatgtgagggaagaatgttccaggcagaagaaatagtaagagcataggtcctgaggaatgtgcttagttaggtgtttgaggaacaacaagaggccaatatggctgaagtagagggggaagaatggtagaagatgagggtattgggaagtattaggaggaatatcacatgaagcactataagaactttggcttctccgctcagtttagtgagaagctattgaaaagttttgcacagataggtgttattatttcacttatgtttaaaaagaatcactctggccttgacatggagaatattgcctggtaaataagagtaaagcagggtatttctgacaggaaaaagccaaagcatatttcctagtctcgcacaccactcaacacttctgacaccacatgtgtggaaatttttccctacacaccatccagttctgacaccagattctccagcacacagcaattgggtgtcctataatttcgttaaattctggcactatctactaggagatagtatcagatcccacagggtaggggctcagtcccacaagactgcctctcactttagatgccaattgtaagtcccaggctgcgacctgtacttctggccaaattgctataaactggtgtttccatgacgccctccttgagtttgctttatttgctagagcggctcatagaactcaggtaaacactttatttacgtttacccgtttattataaaggatattacacaggatacagatgaaaaaccagatggaagagatgtaaaaggagatgtttggagaaggggttcagagcttccatgtgctcactggggtgccacacttcaggcacttccatgtgttcagctatctggaagctctctgaaccctgtctttttgagttttcatgaaggcttcattatgtacacatgattgactcaataattgaccgttggtgatcagctcagtcttcagtcactctgcctcctgggactcaaccttcagtccctttccccttcccacaggtctattcatgccttggtctttctagtgaccagcttccatcctgaagctatttagggggcaccaaccaccaattgtatcattagcatatgaaagacactcatcactcagagactgtaagagttttttttaggagctctgtaccaggaaactgggagcaaagattaaatatgtatttcttactgtaaatcacaatatcacacagggaaaccagttaagaggctattgcaagtaattcaagcaggagatgatggtggtcacagtagaatggttgcagtgaaaagcagttagatatagaatatatttatgaaagtagagctaaaagaattttctcatgcaattgatatatggggtgtaagagaaaagtgaagaatcaaagatgactaagatattttgrtttgtagctggaaggatggagttgtcatttttcaagatggggaagattgtaggaaaatgaggttttaagtatgctagtaagaggatgtggtgggggaagcagaataaatagttcaatatttgacttgttaggatgagatgccattagacatccaagttgggaataatgagtaggcaaacaaatatagagttcaaggggaaggttgagactagagttacatattttgagggttaatcagcatagatgatgtataaaggcctaattagcatagatggtgtataaaggcctaagataggatgaaatcataagagtgatttataggtcaaagaaaagtaagaagatccctgagtcactccagtgtttagaggctggggagctaaggaggaactagcaaaggagactgaaaaggagcagccagtgaggtaggacaaaaacatggaaactggtaccctggaatcaaaggaagagcttgtaaacaacatgccaaatgttgttgctcatggttcacagaagagcaggactgagaactgacttttttttttttttttgagacagagtctcgatctgtcacccaggctggagtgcagtggcacgatcttggcttactgcaagctccgcctcccaggttcatgccgttctcctgcctcagcctcctsagtagctgggactacaggcgcccgccaccaggcctggctaattttttgtatttttagtagagacggggtttcaccgtggtctcgatctcctgacctcatgatccgctcgccttggcctcccaaagtgctgggattacaggtgtgagccaccgcgcccggcctgagaactgacttttgatttagtgacatgaaaagcagtggtaaaccttacagagagtggcatcaccatccatagggtttttcatgccagaaaccctggaaatcaacctaagtgtatttgccctcatcccatctctaggcactaagttctgtagattctaccttctctttcttttgtgaatctgtcttttgtattcctgctgccactttattagtttaagttctcaacatttttcacctggattattgtggtggcattctgtctggcattctctttaatctctctgcacattggtgccacagtgattctttttgagaggctagttttaatgtttccttcttttatttaaaatttctcttatggctgtttctgtctagcattcaggatactgttcaaacccctttacatagagtgtaattttcttcatgataggctactttctgcttttctagccacatctcctaccactcccctaccttatgctctagtcatggcaaactactatagtttctggaatgtgacatgctaatagtttacctgaaatgaccttccttttcttattctatcacattttcamatgcagttcctattaacatggaaagtcttccttgattctcctttttccacctggtatatatgcttctctcagtttccagaagtactagcttacagcctgccttaaaattatattatcctgtaattattcataaatgtgactttctatcccacttgtctgtaaattcttttgtagcatgaacaatgtatttttccattttgtattctcatcctgtagacagtgcctagcacctaatagggactcaggtttgaatgagtgaatgaaactcagtcagtaccatcaagacatcttaacacagtttgttgagagttttttggtcatctgaatggtattatgggtctgaaggagttcttgaaattacccaaggaaaatattatatactataaatcaaacttgtataactgtgatatccatccatatctaaaggcaaaacaaatttgcctattgaagagtaatctagagagtgctgaaaatttaacaaacaggttatttggcaaatgctgcagcaaagagagacaaatatcraaactatatcatgttccaagcccccagtcagggatgtagtctctctttgtactctctccctgtagataacatctactcggcagctttcatggagaaatttgctgactactagactagcttgtattgccataccacctatactttttttttttttttaataaaaatatccattctattttaatgttgttttctgtgttagatactgaactccaggaggtcaggtgctaggctgaatcctcattgctgggaccatagaggcattcataaatgttaggtgaatgaatgattacgtcatgatgggcagtcagaaagaaatgaaagtcctatttcctatctgtttatatgcaaatatttgattatgttgttctcctcaaaactcttcagttccttatttcctgccggacattttaacactcggttacttagcttgctgaggctttattgtcagcagcagtaaccagctctggctagcttagacaggaaagaaagtattaaaggaggattgggtaactctcacacaaaatggatgggacgtacagagagtcaggtttggagacaagtgggaagtaagggagttttgaaagtataaacagtctgatccagatgccacagctgctgttgaatttmtcttgctagactactactgtgactgctcatttaatcacatccactctttgtttcccaggattcactggtctatgtgggagtgtctgattgctgagtctagctcttgtacctttacactggctaccatgggtttatggagaggaagaacccatctctccctttggtttctgaagtgggaggtggagccctgcatccttccaaaactcacaatggacagttccacaaaacttggaaacaattccagcaattgccagggtaattgtatttttaaaatgagatgatgtgtgttagataatcagtgccatgaagaaaagtcagcatagagacagaggacctctcagaaacgcagtctttactttctgcagaaagggcgctcctygaagatggaacaatggtgagagcacacttgaacaaaggaaaagcaacatatttatcccttatgcatttggrtcatccttactgtcgtatcctgcatccattggctggagctggacctcacagttttaaactgatacccgatttgctaataacctaaaactttcctaaataggtaagtgcaagggagaacaaagaaggagaggaagttgcttatgaaaggtttaaggaagcaataacatttccaaataaggaaggggcataagctatgagctaggacttgcttgggcttgtccaggcatgcctgagtaagccgaagcaactaactgggctaaagtgtaagaactaatagttgataggaggctttagagtaagaagttattatttctagtgtctattgttttatttttaaaccaagatgagctttgaagaggagcttttctactttctacatgtgtattaagtacttacaatgcccagcacttagtatacattcaataaacagtagtcagtgaaatacagtatatagttttgggtccagtttaccttcttagctgcctcatttccttccaacatgaaaactccataaatacaaaatgtgtatgctattgtccttaaatataccttgtgatttccacctctgtcttctccatatgccacctctttctctcttttccatctttcttttatggctctgttcaaatctttgctgcttctcagtaagaaagaagtgttggtccatctattattcctctatgccatctagtttggcacttagaatttaaggtagttttcttggtatttatatgttatctttgataaagtagtctgctagagggcaaaggggactgactattttgggggaaaaaatggtttagtagaagaaacatgaggcttggagtcagaaatccttggttccagcttagcactagctattactacttgtgtgaccttggacaagtttctgaatgtgttctttttatataaaatggagataatgctatagaattttggtgagggtcagatgaaatatgtatgtgaaggaacaggctgtgtaaactgtataacgtatgattgcttttgtgtgtatcttgtatctaatgtcatgccttacacataggcttaatatattaatgataatgatttttttaaatagtcctttcagattttcatggcatcaaaagacatgtaattttttaatacatttaaaaaatcataatcagattgtgatgaagatgttatagctatctttcattttgttcatgtgtaatttaatattcagtgattactcttggttccaataaaatgttatattgttatattttataytgtagcataatttattagatttcaaattccatcagattatttttgttcagttaaaaaaagaatatgatttctcttgcagattttgcccctagaaactaattctaaacagtgatttgagaggtttctgttcaaaagcgtataatatgggaataagttcagctggcaactttttttttaatgcttagattagtcttaagagggagaaaatgtacagagattttaaaatatagtttgtttttctgaatggtcttttctttcatctctccaacatcataaaacttggtatttaagtggaatattgtgcatgaaaaggccccaggtgcaaagttgtggcccaacaggtctaatgaaagattacataggctttgcctctcttcgtttgggagacctgtgttttcagtttgttttagttatgtgactagctcttctttaattatgyagtgaaagaaaagtttctctaaacaatttcatcagtaaacaaataagctttgatgaaaactgtttctataggaggttatactggaatttgacaaaaccaagttttgttaagcaaatgtatgacttttaaaaagccactaaatgttacaccttaccaaggagtactacrgtgtcttaatcagctgggtgataccttccattggttgggttaaacaaccaatgtttatttcttgtagttctggaggctgggaagtccaaggtcaaggtactggtagattcagctcctagtgaggtccctttacaggcttgtagatggctgccatcttcctttgtcctcagatgatagagattgagagagctgtggtcttttttcctcatcttataaggacactaatcccatcataggagctccaccctcatgacctcacctaaatctgattacctcccaaaggccccttctccagataccatcatactgggggatagagcttcaacataggacatttagggggacacaaacattcagttcataacattcaggtggcaagtaagcatataaaaatgctcaacatcatatatcaatagagaattacaaattacaacaacaatgacatattaccacatacctagtaggatggtgaaaatccaaaactgacaccaccaaatgctaagggaggatgtggagcaataggaattatgatggaatgcaaaatggtatagctcctttggaagtcagtttggcagtttcttacaaaagtaaacatactcagctgggcgcagtgacttacacctgtaatctcagcactttgggaggccaaggcaggtggatcacgaggtcaggagatcaagaccaaaataagaatttaagagaaataatggggccgggcgcggtggctcatgcctgtaatcccagcactttgggaggccaaggtgggcggatcatgaggtcaagagatagacaccatcctagccaacatggtgaaaccccgcctctactaaaaatacaaaaattagctgggcatggtggtgcactcctgtagtcccagctacttggaaggctgaggcaggagaatcacttgaacccaggaggcggaggttgcagtgagccgagattgtgccactgcrctctgcctggtgatagagtgagactccgtctcaaaaaaaaaagaaaaagcaaacatactcttactctatgatccagcaattgcataccttgtatttagccaagtgggttgaaaactaatgtccacacaaaaacctgcacatggatgtttaacagctttattcataatttcaataacttggaagcaaccaagatgtccttcagtaggtgaacaaatcaataaactgtggcacatccacacagtggatattatttattgctaaaaataaatgaactatgaacccatgaaaagacatttaaaatcttaagtgagtattactaagtgaaagaaaccaatctgaaaagggtacatatggtatgatttcatatataacattctggaaagtacaaaactatgaggacagtaaaaagatcagtcctttccaggggttagcagagagagggatatagagtacagaggttttttagggcagagagactattccgtatgataacataatggtggatactcattatacgtttgtcaaaacccatagaatatrcaccaagtgtgaaccctagtgtgaactgtgggctttgggtgatggtgatgtgtcagtgtaggttcgtcgattatagcaaatgtaccactgtggtgtgagatgttgatagtgggggaagttgtgtgtgtgtgtcagaggcagagagtatatgggaactctgtactttgttcagttttgctgtgaaccttaaactataaaaattagtctatttaaaaatgtttatggtggaaaaaaaagcctttcaatttagcgatcaggccagatcttctgacatcaaccagtatactgcaattcaattctggcactaaccatcctgaaatagtgtcagactccacaggttcaagggcatggtccccaacaagactgcccccacttcagacaccagctgcaattcaagttcccaggccactcatacttcttgtcaactggctccaaatccagggagttcccaagaccattctcactacctcgccataagatttccctcacttcagatgccatttgcaagttcagggatctccaggtcacccatatttctgaccaactggctatatattcagagggggtcctagaagacacatatagcaaggtctcgaacagtcctgaatgcagagcttttatgccctctccctgtatacttagagcacattaccctcccagcacattagtggattcaccaaccagaaagctgtccttcacttcagtgtctagagkttctattgggacttcatgatgtaggcttgattgattgaacactgactaattgattgaactaaatttttagccccastttcctcctaagagattgggctgggccaaaggtccgcaatcacacaattagtctttctggtgactagctgctatcctgagtcatcttgttaactaacataaactctggtgtgaatcaaggggcttatgaataacaaagatacttctgtcacctgggaaattccaagcataaagctccttgccgggaacccaagacaaagacaaattcagcaccaggtgttgaaaaaacagtagctcttggtaacctaatttttttcaaaagtatataatggaaagctgaggtgactgaaaagtatttaagattgaaagatttaagaggaaaaactgatttattgatctctgttaatctagtattttaatagtttagatgttttagctatgtaaatatgcagttttgaattttgtatgtatgattttatgcataaatatatttctttgataaaaagaagagaggactttacttggaaagatcagccagtagaacaacagaggaccctttccagtttttactacctcacactgtcaaacagatgaccttaaaawcagtttttgtctgagctctaggtcatttcattggacttaattttccttttaatagcaagtcgtttcagagtgttttaggtatccactttctctaaggaagtgcttagttatatttttctcttgcagattgattataccggaacagagccttccagtccctgtaataaatgtttatctccggatgtgacaccttgcttttgtaccattaacttcacactggaaaagtcatttgaggtctgtgtttccaagtaatgtgctagaaaagccatgctttaaaaawtactgatactgtactaaatgtcttttacaaggtattttccttttatagagaagtctgtrtaatttactggagtttataggcttttgaggaagatcgttttgtgtgtttggctgttggattttgctgtctggtaattaaatacatttatttgaatggtttagttagtactttgtagacaaaatttaagatattgtattttatcctttcaacagataatgttatgactgtacgaatcaattttttatcaagttttatatacttgtatttttaaaattattgctcaaattgttgtgcatacttacgatactaaagcaagctttactttagaaaataaataattctcccattacttaattgaattatttttatgacatatgaagcattataaaaaatgcaaacacttattaaaaccttactgatcatttatgtttttataagtagttagaaatccatctgtttgcatttacactgcyattctgaatacatgctaacggacataaagattcagaataggcatgtaaagaccactctgtattctcctgtgcctgaaaattgagcttaaaataattattcttaagggagcaaaactgcgttaatacatgccaactttttagattttctgaacttaagattttctaaaggtagtgatgactttaatagtccctaatagttggttgccatctagtggttatagatgctcttgcactgacataaaggacaggatcatgctgcttttgaataatacatgaaaacaaattttgtagaagacaaatgtaattatttaactttgtttcagcagaaacagaatatacatttaaagtatctttacaagtccatgatttttcagtgtgatgggcagacaataaagatacaataaattctgcttttgtcagaacaggcagaattgaagaaacgagagactagtagtgatatagaagctctattaattttctctcccattcaaaaaacacttcagaacttgttttttgcaaaggcagtcaacctcaaattcattctcttgtggactctgtgtttcttcacaagctcaaactttgaattggactaaactcttcagggaacttcaagtaggttattttatctcagtgttcattcaaataatctctttttcagtttacaaattgaatttactgtactgaatctcgaggtaatatttccttttaaaaaagaatattcattttctcaatttctgtgatgtaattttgatattccctctcttccacaagaaggtttccatgtaaacattttctttatatagaatgggaaaatttgcatggtttgacatttgaaagtcaagcattaaataaatgatagtgtatataaaaatagcaaatcaaatgaagtctacttataatgttactgaattacttttaattaaggataagaatatagaaaatagaggtagcaaccagaaaggagaaaataccttaatgtttgctacctctaaaaattttaatcatttaagatggcttcttagcatcttctaaataattgtaatgtttataggttacccttctttcccaggttatttcaaagttggcgctattaaatatattaaagtacttttcttgattattataaagtggcttattatcatagagactctactaattagtagtttattaactcataatattatatagtgtcctcttgaggaatttattatatcccaattcaagttcagaattcacttggacaaaaaaaatgaaagtttcaactgcacgtggtgctacagacctgtagtgcacacctcccagtgtctagggatagaggcggtagaacggctcaagcccaggaattaagggccagcctgggcaacatagcaagactctagtctctgggagaaaaaaaaagaaacaagtttgaccattatccctgtgaaaagtcgatgctaactgggtgaagaccagtttgaattagagaaaattttaaattgaaggtagctcagagtaggctaatagattccttgaatattctcttttaatgtaaatagtacttttttgacgtctttaaggatagttttaaagtttacttgtggctttttgtaacatacyttctctagccttatttacagttgtgccattttagattgctaagtactggtggaatttaccccactacctatcacaaattgtaaactaataaaagtccaaattacgtagcttttatgtacacatgaaataagtttatacagaatagtttttatatgaaaattttttccctctctgtttctctagggcaacgtgtttatgtattatggactgtctaatttctatcaaaaccatcgtcgttacgtgaaatctcgagatgatagtcaactaaatggagattctagtgctttgcttgtaagtaaaatgataaatatgaaaatatgatatctgtaaaataagaatatgtagtaactgttcagttagaattgttaggatgaaattaaagtgttgtcatttatagtttgtatagtgaggatttttttccccccgagatggagtctcactttgtcgcccaggctggagtgcagtggcacagtctcagctcactgcaacctccaccccccaggttcaagcaattttgcctcagtctcccgagtagctgggattacaggtgtataccaccacacccagctaatttttgtatttttagtagagatggggtttcaacatgttggccagtctgctttcaaactcctgacctcatgatctgcccacctcggcctcccacagtgctgggattacaggcatgagccaccatgcctggcctgtatcatgaggatttttagttaaaatattttttcctggaattcacacagatgcattgatgcccagactggtttggaaatctgtggactaggggatcttagtttctttactgttcttcagttttccatattagtggttagtgcctatgtatttttttttattttttattttattttatttttttgagacagagtctcactctattgcccagactggagtgcagtggcgcgacctcggctcactgcagcytccacctcctgggttcaagtgattctcctgcctcagtctcccgagtatctgggattacaggtgcgcatcaccaagcccggctaatttttgtatttttagtagagacggggtttcgccacgctggccagactggtctcaaattctggacttcaggtgatctgccctcctcggccttccaaagtgckgggattacaggcttgagccaccgtgtccggccctaagtattttatgttactgttgccaatgcagcaaacattcagaggcccagagcaatttaggatttcttagaattaatgaatctcttagaatacaatttaggactatgttgtgagcagcatgggcctccgaaatgtaaaatataactgctctaggttatcttgattggttttattgctgatcatcagttgctgatgtgtgggattttaagcaatacaagtctacttaaagattccttggtatacacagggttctggttaggcctatgatattttgaatctatgtggggtttattccataggatccaatttttagcactcaaatccagagaagatgttgtactgtgagatacaccaagtttctagacctttctgaatgtgttttttagggattatagatagtgtgtgttccaaaaccccagaaatggtggctgatttacaattattttatttatatatgtgctgtgttcactgagggtaaagaaaactgaaactgattcttttcttccaaactgtaagcaaagatttcaggccacaccaggaatagatcaactttttctgtaaagggtcagatattatgtgtaaggccctgtacaatctggcatcagccttattatcttatatactayttttaatacattaaacaaggcctggctgccctgggccttgtttgctgctccctaaccatgcattgtgacacaagtaatctgctcattttgccagttagcattttatttgcttagaatgtcatttttactgtttccctggaggtcttctcatctcaaggcctgctattttttctaagtgyccttccatgcaaaaatgtgcttctttacatatttacttcatttatttttttgttccaagtcactaccactttttgcttggatgaacaaattgtgtctcacatcatccaatcctgctcctttccaggccattctcatagcagctatagtgargtttttaaaaagtataaatatcacttccctacctaaaatctttcagtggtcatattagcacttgtagtaaaatctcaggatgatctgagctatgcgtaatcctcttatctcatcacatatcatcctccctcttggcatgctccagctacattcaccattaccttcacagaaataagttcttgtttagtggcatgtggtgttctctttgcttaaaactctcttctgtcttctctttacatggctggctcctggtcttttttttatgtcttaacttaaatgatacctcctccagagtcaaacttttcattaccatagattctaaagcagctcctcctatcctttttccattaaatactcacatagcctcttcataacacttactgtaatttgtaattacatatttgcttatctgtyatctttctttccagctatactgtaagctcatgaaggcagggagcatgactttctttaatcactgtttaccaagtgcctggctcgtgcttgcacatggaaggcatttaataaatatttgctgaatgaatgtagacatcttcatcatggctcttatttcgtatgatagttggttttgtaagggtctgcttcccctgttacattttgagttgcttaaaaatagggattgtattcttttcgtttttctgtttttagcacctagtattgtacatgctgcatattaggtactcatcaaatagctttgtttttttttgttgttgttgtttgttgttttttttttgagacggagtctcaccactctgtcgcccaggctggagtgcagtggtgcgatctyggctcactgcaacttctgcctccccggttcaagcaattctgtgcctcagcctcctgagtagctgggattataggcccccaccaccatgcccggctaatttttgtatttttagtagagacgtggtttcaccatcttaggcaggctggtcttgaactcctgacctcgtgatccaccagcctcggcctcccaaagtgctaggattacaggcgtgaaccactgtgcccggcttgtttttgtttttttctgagacagggttgactttgtcacccaggctggagtgcagtggcacgatctctgctcactgcaacctttgcttcctggactcaagcaaaccacccacctcaccctcctaagtagttgggactaaaggtgcacgccaccatgcctggctaattttttgtatttttgtagagatgggatttcgccatgttgcccaggcttatctcgaacacctggactcaagggatcctcccaccttggcctcccaaagtgctgaaattaggggcatgagccaccgcacccggccctcatcaaatagcttttgtaagccagttaatgcaaagtacctagcattgcttagtttagtacctgacacatagatagtaaatactattttcctttcttttaaaacttccttaagaatttagtggctagcagatatatttgccctattgttaatagctttatcaatacagatggtgtagggaccaaaaagctgagaagtcaaatattgaagagactttatgagatacctaccacagacttccttagccttatcttttccattcacacaagtgcttttatccaatctagacatggagaatatagatacaagtcaaggttagctggtaatgaaatagtcctaagaggtctaattagggtcctcttaatttcaaattgagattatcttggtatgtttatgtgttttgagacatggcttaatgtggcgggagggtcccagctcagacagacccctaacctcagacttgatatgatctctagttgaatcccataactgccacacctctttaagatcctcagtagggastaagtcaaaaccaaaatctggaccacaggcaaatgttctgccttgtcagcatttttgtttttcttgtacctggatgcacagtttaaagattgatatattctaggaatctgcactagactccttccttcctttcttagatataggatttaaccccaaatcacaaaatttcagattgtatagttggacatgtttattttgtgaggcccagttaaattaaaggaattgcccaaggaactagaacctctagcctctttagttccagtttaagattttcttgttatatcacaactggattggcaatagaccatttcttaatttttcttgggcagaaaaccctttgtggtaatgtttctgtgataagaaaatcaaaaagatgtttatttgatatatgcatatatgacaaaacatatgcaagtaaaggttatattaaaaaggtaaggcagtaatgttcagaatacattttgaatatttaaatgtggtgttatctatagcctacttacattacagacctgtgtattataagtgagaaaaatataggtgttgaattcttaatcagtaatttagggatagctcatagttctcccaaaggcctggataataatttctctcttcttttccttgtaaaaaccagaatcccagtaaggaatgtgaaccttatcgaagaaatgaagacaaaccaattgctccttgtggagctattgccaacagcatgtttaatggtatgatatagatacaaatatagacatatataattaggacaatttgcataatttcattacagatttgatagtttagtaaacatgaatgaaattgagaaactcaaacatttaagactaaatcgagtattgaatggggtattataatgatttgtgattttcttttgagcatacttacattttagagtggatttctgtctctgagaagaaagaagcagaaacattctgctaatcttatttcatataaaaataaaagtcaggctgaccttcccactgacttcatttttatcattgaaaaggagctatagttgatcatttagagcagcactatctgatagaaatataatgtgagctataaatacaagtcctgtaggtaattttacattttctktcttttyttttttttcctttttctttttttgagatggagcgtcattctgtygcccaggctggagtgcagtggcgcgacgtcggctcactgcaacctctgctccctgggttcaagcatttctcttgcctcagcttcccctgtaactgggattacaggcgcccgcaaccacgcctggctattttttttgtatttttagtagagacggggtttcaccatattggtcaggctggtcttgtattcctgacctcgtgatccgcccacttcggcctcccaagttgctgggattacaggcgtgagccactgcgcctggcctggtaattttaaattttctaatagtcatatttaaaactatgaaaagaaacaagtgaaattaattttagcaatatgttttatgtaacagtatatccaagatactgttatttcggcatataatactatataaaagttgagatacttcatattctaattttttatactaagtctttgatatctgatgtgtattgtacacttatagaacatactcatttggaccaaccacatatgaaagactcagtagccctgtgtgcctagtggctgttgtatgagacaatgcaaacagaaatggataagcaagaagctattggggatgcattattggaaggaaggaaatgcagatttaccttgcaattatagttgggttaatattaaaacatttgatcttactgcatgtcagctagcctatgggtaactgaattagaactctgttaaaggaagagaagtccatctagaattataaagttaccatagttaatccacataggaataaagaacaaatgtgaatcatatgcctactctgtcacaaccacttttggaaacaaatatcaggtccttatttctcatagagttaagcagatgctatgagttttcaagagatagttagtaatgtctttctttgcttgtgtttagatacattagaattgtttctcattggcaatgattcttatcctatacctatcgctttgaaaaagaaaggtattgcttggtggacagataaaaatgtgaaattcagaaatccccctggaggagacaacctggaagaacgatttaaaggtaaaacattactaatatcccttaaaaaattaaactaggagttttaatgaagtattttaaattttctatcttcagaatcttaaagttatgctttgaaaaacacaatttttctttcctcagcttcataccaagttaggtaaatgttctaatgtactaaaattctaaaggaaatgtatacttttaattaygaattcagtttctgtgatgtcttataagcatttcagctataatattttaaaattgcagcaaagcttcttttgaataaacccctatttattatccaaatttattcgtttctccgccactttaatttcacaatgtaatattttgtctccttatcccytccccactccttttaaggtacaacaaagcctgtgaactggcttaaaccagtttacatgctggattctgacccagataataatggattcataaatgaggattttattgtttggatgcgtactgcagcattacctacttttcgcaagttgtatcgtcttatagaaaggaaaagtgatttacatccaacattaccagctggccgatactctttgaatgtcacatacagtatccttttttggctgggtatacagattcatagagcttgaaaggagtcgagtccaaccttatatctgttatgtggcatgttaccttgtgctttagttttggtctctgcatttttacaaaagtatgtgtggtatatgtgagaatgtatttttaaatttacgtcttctagaaatgttttgaattcgcatatacttggtactggggtttgaagcatattgtttggtaaaattacttaaaatataggtgcttgttttattaacaagctaggtatttttacaagggagattgtaattgggcttaatgtaaaggccaatgagagtacctaaaattgggtgttgagtggtactgggctgttttaatatatatattttagatattaaaaatcaacggatgtgttaatttgtatcaatgtaattgttcatgattttgatctattggtagtatcaaaacattttattattagctatattgttccatattaataagttcacattcagtgctgataaatacatttattccactctaactatgtgttaacactgtgctgagtattttcygctcattacttaattcaggcagcagcatatctccctattayagaccagaatacaggaatatcgagcacttaagtaacttagctgactttacacaggtaataataaagagttgaggttcataaccaggctgttgactccaaaggccataattttactctcagctaccaacatagcctgcgtcttagctagttcactcagttacaccaacccatatctgcatagatgcagtcttttttaggagggaaatactcagtaatttcttttattctaaccaaagtctttgcatcttttaatctggagtctatattttacatacactgtgagtgaagagatctctcaatattagaattgtaaatgtttgctgatctttgcatttttatttccataatccaaatgagtcataatccatatgggttttggttttaaaatggattagtaaatggttaaattaatagacccaatttcaaaataaggttttttttgaattctactctcttgatgttgcacctgaatacacaagtaaatatggcctgctatggcaggctaaaagtgaccaagtttttgaaactaaatccacattggagcagttttggacagacagacccacttcaagtgctggtagaaataacattatcctgaggggatagtcaaactagagagtagctctgttaaaattagcatccagaaaatctctagagagtaagggcaaatttagcaacctgtagcctaaggcacaatgaagggaagtctgtgaagcactgaggaatttttagttgatagatgatttccatacaggaattctgcagcagggtcccaggtttgaaagaactatctaaaggaatgcatgatatatggcagattgagaagacttgataagacaggaatttggacctgcaaaacatcaagggttaattatcaaaattgggcataaggtgggaactaaagactagaatgatggcagaagcctgtttctttaggtttgggagactagagagagacaagcatgggtaatttgatactgtatcccacagaatgttgggttagctagaggtcttaaaatcattcctgccttagtttagggttaatttaagaagttagcagaactgaacctgccattgggagttagggacccatagggacccatctgtggggatggagagttgaagaaactagagaaacagatggggcctaaccctagattcaaaagatgcttttgaaaaagttgtaaactttttgcatggagacttggttctgtcttctttgctgccttacctcttgcaaaattctacaactggtccatgtagataattcatctagtacactggtgccctgtttcctaaatctccttaacagcccacccttcactgccactgttagctatcagctgtgtcacagagtgagttttgccattgctccaaatcagcaagttaaaacttttttattaccatgctttttgatcttttgctcagagccttttcatagtctcataactacactcttgatacatgtgttctttgagctcatggagacttctagttcctgatttttccattttctcctggtctgtcagtctccttgtgtgggcttcattgttcacttgaagtatttttttcacattgcattcctttgaggccttttgccccttccatgtaatgagagcaaaagcaccygagaaactacataacctttacatttatttgttttggtaaaatattttggcttttactactaacatttagtttgctaaatcagtctttcaagataatactttgtgtgtgtgtgtgtgatttagaacgtaggagtgaggtacctgtatatcctagaattacacaaatgaattaccaacaattaaatggcaacttttaaaattgtattttaaacatcaagtaaccagagatggaaaaatcttcctataccctcttcagattaccctgtacattattttgatggacgaaaacggatgatcttgagcactatttcatggatgggaggaaaaaatccatttttggggattgcttacatcgctgttggatccatctccttccttctgggagttgtactgctagtaattaatcataaatatagaaacagtagtaatacagctgacattaccatttaattttatattatgaaagcaaatcatctgcatgtgcatcaaggccagtcctattcaacctagctttcgaatgctgatatctggttagtatgtcattttgaagttggcacataacttttctaaaaaaaagcagtctttgttgtttgcttcttccctacggatgacttctaaaaatatatgacgggtataaaaaaattagctatattgatcatatcaacactgtaactgctgaaatggcattctaatgtttgctttttattcggacaggccacatgatgcatagagcctctttcatgtgacttgtgtctactgcttaaatctttatgctgtgttgatgatattatattgacatatgaagctgtatatgtgtatgtattttgtggagaaagggattacaagatgtatgagtataatgacttgctaacctttcaggattcagagaaagatgaagaaagaccatatctaaataatacacttcatcattttcatgtgtataaatgcttaaagtaccatctttgttgaggtggttcatgtatccagtttatccagtacagttatttgtcaagcttagctttgatttcaaaggacacgcttaccttgtctggcataagaattaatgctcatgtctgcagtggttgggtaggtcctgcttaggagaattaaaaaattcctctttccgtttggttgaatgttgcagtcaggaaccccaactcacttggaatgtttttatatgtaatcatttcccttgaagcttatactttataagggaagaaagaattcaggtgatatgggaaaactgcttggcagaccttcatcttctgcctcaactgtaaaccacatgtaartgcttaatggagactgttttcattcttgtgatatttaacattcagaaaattacttcagctttggaaatactcaggctgtttttattctgcaggtaagtgttttgacttaagtactaatattccagaaatttttgaaagcagtaaccttaatttcctatgtatttcattccacttttgcatataggtcaaatagcaatgtgtatgcacattctctttagttaaggcaccaattgttttggttggttttcctaagacatactttaaaaagatgttctataaatttcctarttaaattatggggattttggagtatgtacatgataaattataataygtatatggttgaagttattttattttttactaatgaattattttaatattccttattgaataaatgctgtaacttgtttgctatggaacttattcttaaagttctagttaaaaataatttttccacatgcatgaaaatatgtattaatcagaggtggcttaattacattgaaattgcttttttgttgttgtttttttactgaaataactcatgtttgtgtagaagaatgcctgtttactcagagtttatattttccttcagttatattttaaatcaaaaggtctgggtaatgtatacttttgattaatatatactttttttaaaaaacaaaaaacaatgtaatggttaatagtagaaatgtgccacacttttcaagttttatataacatatgaaattcagttaaaagaatgtgtgtttcataatgacttttaactggtaaaaatattacttgcacgaagtacttgatgtatggttatcctgaaatttcggagtatttggtgtgttctttgtctaaaaatagtctgttttgtcagtccttcagaatattatttattctgaagattgtccctcttgcacttggcagtttattttcggggatacattgttgggggagaggggtttctgccactctttccagattgagtctgtgctgtttaaggaggactaccatcctgcaactctttttctaaytggggcacagaggatgtcgctaaagaaaagttgaagagccctttcagcactttctcatytgtggagaagatggaatcttaaaatacatttggagttttatctgttttacaagtccattgatggcctaagttcctcctgttttctgctgtttgatctctaaggaactcctgttgctaaatatgaagagtatggaacattcrtatagtctctgtgaagcatggggggagggaagacatttctttttcttataggctttatgctcaaatgtcatagtctcctttcaaagaattgtgttgyattttaaatgcacccagcttaagtagaagacattgaaggatgcattaattttcaggaactattttgaattatgaaaagattcccaattgaaaaaattattcaacaagtaaaagctaagaaatttcattgaaatcataaggcagtttaagcataaattgataaaaatagctgtgtactactaattaatagaaaatcattcaaccaagagaagagtcaagtgaatatcgtttgtttatttgctagtgagtttctttgtaacgttgattttattaaatgataatatttggttagtatgtcctatgttaataaaaatgaacaaaattaattttgctatgttcaggtgtcttgataaaataacaatgctccagtgttgttgcttacatttagcactaaattttaacacagsgtcagtgagtccaggttttaacttcttcatgcctggatgggataaaatgtaattcattgttaaattaattcatatttgtatttattaatcactgtgacaacattaaccatttgttcttaccaggaagtggtcagattatcatctgagttacagttagactggctaagtttggtattagatcaaggggaatgtccagtaaacagagaggtaagcatgatggaaataatgaagtggggtacacaggaaaaacctgactagtgaggaggagcagctgagagatagggtcagtgaatgcggttcagcctgctacctctcctgtcttcatagaaccattgccttagaattattgtatgacacrttttttgttggttaagctgtaaggttttgttctttgtgaacatgggtattttgaggggagggtggagggagtagggaagtggtccttttacaagaattttgatgcataagtgtctattgtagggtttggatgatctagtaaagtgttttagaacccctttttatcccatgcaccattcagtaaacataaaaatcacaattctgctaatgtcatttggaacttcaaaataaatatcttgtctaaaaacaaatcagaccgtggtggccttatttccttttatatatctataaaatttatcaaagtaacatgtacacagttttaaaaaataaaatagtaagttctaaaggctttatgataaaaaatagtagtccctgcctgaactttccttccctcccagaggcaatcactgtgactccaaaagttgtttcttcttttaccttagtgtatctaaatagtatggctattctgttgcttgatataacaattttagacattattgttacatgatgttacatgatttagctctctaacacacatactttgccttctattatgtagttatatcataatatttagtaaatgcattagctgttatttaagtatgactgtataaatattttataccctagggcaaatgtaatatgattttcttttgcataattttatttttcctggaattaataattgccttatttaaaacatttacataactttcttgcaacattatcttccttgtattgaatttgtagcacatttctaaaaatattctaatttctagaacttctttcattttattttgtttccaaaatatcctacttagtttatagatatcttatttttctgaggatatatatatatgaatatatattactacttttgtttactgctctattaacaccaaagtttatttgttgctatttgtaatttgttttttctcttgttcatataggcgaatttcctgttatttctggctagtcttggcaatatatgagtagactccaaaacactatttgaaagctctgtgtttgtgggcagtgcttcaaggggtctagggaggttctcttacttactgcttttaactctgcttcttccttgtcctccatctcacctcctgatttccacttcacacatacttccttgtatctgtccctccccatatttcttccacttaattgtctcccatttatttctccagataaaaattctctggtgttctacctgtgagagacagtgatggaagtgagagatcatatttttatggctaaggggtagggcagaggactttggggatcaggccattctgttgtatatgctttcaactagtcattttcaggcctgtccctgcctccactctttgctgtaactttcacctccaaatctgagcttctcaggggttgtggaatcaatcagcatgcttccctctggtatccgccttgtagtccctctagattgcagctttctctgttcagctcagtcatattccatctgctttcagttttccacaaatttgttgaaatcatttgtctgttgctgcctcctctctattcaaattttgggctcatatcttttttaaaattgtttttcagattatcatatggtaaattttacttctgttctggtagcatagttttgtgagttttaacaccagagataaagaaaagtaccatcactccccaaataactccttatactatccctttgtagtcattctcccttccccccactcataatccacaatttgttttctatccccatagttttatcttctagaaagttctaaatagaataaatgccatatgtaacttttgaaacgccttcttttctttagcataatgcccctgagattcatctaagatgatgagtcttatcaataatttttctcatattttaaaaatttctttcattttactatagtgggatggaggagagacaaactcatggggccagtccactatcttaaatcagaaacaccttgaagcaaatatacccttcaccttttggtgattttataatgtttttaaaaaaatcttaaaagataaacttgttatgtactttaagtggtattaataggagcttgtctgtttgtatatcacaagcttttctatccagggtaatgtggaaaaagattgaactccccttacatccctttcaagcttgttatgtcactttgtttcaagcacagaattgcagacaatagctttataaatttttgtcaaattgctgtatcagtggtgtaaaataaccccagggcatgttgtctttccttttcacaacaaattttgtgaaacagtatgtcctttatattttcttatcatcttcagcttcagtcagggtcaggttttcacctcaagattacatcgtttgtactctgttgactgtcacctgtgtctgaaagattcagtagaaagagtatgggtttcaggagtaggctgatacggctcctatacttacaagctgtaccttgcaattgcttaaatcttctaagccatttacctttccttgtctgtaaaatagggatttcaatacccatttgacagattttgttttgagcaataaggaaagtgacagttaaaaagcatttagcacaaagcatagaaaaatagatattcaatgaacaattcccattcttttctgtcagatcaagtgaactcacccttatattgatctttttgctccatttgataggcattttccttcccacttcatctttagcatgtggcttctgtgaatgactcctgatttttttccccttatctgttccttagtctcctttgtatattacttaatgttgggagttctttgagattatgttctgtgcctttaagttacacattctgcctgaacaatcttaagtaccttattattccgttgtcttaacactgactgacttctctatcttttcttgtgccttgacatctgtcttgagctctagatttttcattattaatctcttgagaaatgaaggttaataatgaattaacctaagttagtaaggcccaagcagcaatcattccacacaagcctgggtttaataaggtcaaaacaggaataatctcacaccaacctgagatttcttacattcctcattactgtgaatggtatagccaaccaccttgaggtaagccagaaacctagctctcttctccagctgcccaacctaatcactgtattgtgttgatttttgaatgttcttccttttagttgggtctctcatccctccccttatctacatctctcttgatgatttagtttaggtttttcttcctccttggattactatgagagctttctgacagactctctgaccctaataactcatgcccaatccagccttttattactagaacgatcttgaaatagggctccgattttaacagtttgctacttgaacctctaagtagcccttcaagttgtttaattcatcactgaaatcagccttccactgttacctcattcttcatttgttctgcaaatcaaaccatttgcaattccccaagacatttggccaccctgtcttctttgcctttgcaaatgttatagcttttgcctagatttttcttcttacccaacctttcttcccataatagtaaatatttattgagttattttaacagccacccaatgatgatgaatactgttatctccattttaaagacaagagaaactgaggtataaatagattatgtatcttacgttcagtcatgtcactaccactaaatggcagattcaggatctgtctgacttccaagttcttaacaacaatatattttttttctcttttcactccatctaggcctctgtttttgcagttctgcagcacatcaacgcttgattccaaattcagattgttaatcatgttcttgtcctacatctggaatgacttaatttctgctccatttattctaccagaccttgccaaaattgtcttttgttttttgagacggagtctcactctgtcaccaggccagagtgcagtggcgtgatcttggctcactgcaacctccgcctcccaggttcaagcgattctcctgcctcagcctcccgagtagctgggactacaggctaatttttgtatttttagtagagatggggtttcaccatgttggccaggatggtctcgatctcttgacctcgtgatctgcccgcctcggcctcccaaagtgctgggattacaggggtgaggctataatccgtgcccggcccaaaattctgtctttttacaaccttagcccactagtttctttgaatttcccatacaacttttgttgtaccagtcatctggagagtcatttatgtctgcatcaaatttactgttatgtatgatattcctaattagattatattctccagaaggtcagagactttaaaacaatattcccttgcgtgtattacaaagtgttacattcatagtaggtaaccggtaattattgttcaatggggaatgactccatgttgatgaaaagagtcaaactctataaaatattttaagagatttattctgagccaaatatgagtgacacagccctcaggagatcctgggaacatgtgcccaaggtggttgggatacagcttggttttatatatttttgggaggcatgagacatcaatcaaatacatttaagaaatacattggtttggttcagaaaggtgggacaactcaaagcgggggacttccaggctataggtaaatttaaacattttctggttgacaactgattgagtttatctgaagatctgggatcaatagaaaagaaatgtttaggttaagataaaggatgtggagactaagttttattgtgcggaggaaactctcagcggactgcagagagagcaggttataaaatgtgtcttatcagacttaaaagagtgcctggctcttagttgattatctcctggatctggaaaggggaaaggagattctctatagaatgcggatttttcccacaagaaactttgtagggcaatttcaagatatggcagagagacatgttttggggtaaaacattttgattttcttcctccttatgccagagtcacatgggaaagtaagtcataatatacagggttaaataaaacccatctgatgagaatttgtggtttgtagggcaggactccccagaccctttagatatgaatttgggcaagataaaaaaaaaaatcagagattagtcctcattcatatgttttatgaaattgtttatcataaggactttagagtcagagaaaaagatcattaggagttagtctaactacttaagtttaatgatgaaaagactgaggcttgcaattaaagtatttaataataaactaatacagcaactaagatagcaactgtttcctgatgtccaaaagtgactcagaatatgataaagtatggaattatattgaaatgttatcttttacctaaccagtagtttgtaacattaaagttcacatgaaactgttctatatttttataaaattggaagttggttaagcatggctctagaattaacagatgtgtgtacgcacacacacacaaccaaatcacacaaaactattctggcttccctctgtttttgttacttatcgattctataggcaggatcaaagtcagggttatcttgtctgctaaaaagcagacaaggaaaaaaaggaaaaaaaagattgggtaactgtcctctggtaactttgcatcagtaattatgagatattttcacttagtactttcgcatctgatgtccatcttactgacgagacttaaaccattacctacctcaggtttcccagatatttcccacatattccccctgccaattttgttatactgttacaaaaccctccggagtaagtattttccgaaagaaccattttctaattttctaacattacaaaagagcaaggataaaagaaccccaaactgatgttttggaaagcattctactttgaaagtaacttctggttcagaggatgaattttaaaatgtggtaatgtttctggtgtgcctgggaagatgcaataaagtttgttaggtacgcaggcaaatttcagtcatttgtatgtcaggataatcacaacttacagaaaaggagcaagaagataatgaatgaggaaccctgggactgaaaacatttggagggagcacaagtactaagacagatgttttgaatttttatactcaatagtccattcttttgtgcaggatacagttcattcatttaaccaatgtatattgagcattttctatgtgccaattactattc

SEQ ID NO: 96658 - DNA, 22517 bp, Homo sapiens
aaaatcaagggcttcattcctttttggaggttctcaggagagaatctacttccttgccttttccatcctctagaggctgctcgcattcctaggctggtggccccatcctccatcttcaaagccagcactgctgctctctgaacctgtttctataatctcattttgctctgcctctcttcttctgccagttttggggacccttgtgattacactgggtctgcctggatgatccaggagagtctccctcttttaaagtcaattgattagtaacttgaattccatctgcaacattaattcttcactctgtagcccaacatattcacaggtttgggggatccaattttggatacctggggagatccttattctgcctacgatagtagggctgggggaggcctgagaatctacatttctagcaagttcagaggtgaggctgatgctgctggtctggggaccacactttgagaaccattgatctaagggaggagatgggattctgtcacaggtctttttaactacagagactccagtggccacctctaccttcatctcttcctaaacaagcacacatttttcttcacctgacagcagatcaagcgcttagaaggatttaaatctctccaaagctgcctcttgggtcttggaagggaagctaccctgaagacggcccatggtgccagggaaggatcacctgagccctgcaagatttaaagaaaggaactataccaaggatgtgaacccaaaagctgtggcctccccatgtccactctgtgctaacgtctgcttccctcatgccccctaggctggcctcactgcctgacagctggtccccagctgtgcactctgaggccagcttcaggcccttggtgttcttcccactggtcctctggccacatccccagccaatagctttgggcctctgcctcttctgtctcctcttcaagcagctcccaattgccatctaaaagttatcaacccagtgtaatttctgcccctccctcgttcacagacaccccaccgtccaccaggctctctcgttttgctctctattgccaccccagggaattcacctctttactttttttaaaatccccttcattctctaaagggaaacccttagtcctggccatttcaaaagcatcacacagaagaagaccttgatatttacatttaagtcacatatgcagctactgacacttactagtgctgttatagtcctggctattattccatgaggtcgtcacattttaaccttttgcataagcctccaacggcctgatggaatgatgaagcctcagaacagtttctacacaatggctaagggatgtacccattttgaattttcctcttttctgtgatcacagaggtgaatacgctttggccgaatacacagaagtgaaaactgtcaccatcaaacttggcgacaagaacccctgaaggaaaggcggggctccttcctcaaacatcggacggcggaatgtggcagatgaaatgtgctggaggaaaaaaatgacatttctgaccttcccgggacacattcttctggaggctttacatctactggagttgaatgattgctgttttcctctcactctcctgtttattcaccagactggggatgcctataggttgtctgtgaaatcgcagtcctgcctggggagggagctgttggccatttctgtgtttccctttaaaccagatcctggagacagtgagatactcagggcgttgttaacagggagtggtatttgaagtgtccagcagttgcttgaaatgctttgccgaatctgactccagtaagaatgtgggaaaaccccctgtgtgttctgcaagcagggctcttgcaccagcggtctcctcagggtggacctgcttacagagcaagccacgcctctttccgaggtgaaggtgggaccattccttgggaaaggattcacagtaaggttttttggtttttgttttttgtttttttgtttttaaaaaaaggatttcacagtgagaaagttttggttagtgcataccgtggaagggcgccagggtctttgtggattgcatgttgacattgaccgtgagattcggcttcaaaccaatactgcctttggaatatgacagaatcaatagcccagagagcttagtcaaagacgatatcacggtctaccttaaccaaggcactttcttaagcagaaaatattgttgaggttacctttgctgctaaagatccaatcttctaacgccacaacagcatagcaaatcctaggataattcacctcctcatttgacaaatcagagctgtaattcactttaacaaattacgcatttctatcacgttcactaacagcttatgataagtctgtgtagtcttccttttctccagttctgttacccaatttagattagtaaagcgtacacaactggaaagactgctgtaataacacagccttgttatttttaagtcctattttgatattaatttctgattagttagtaaataacacctggattctatggaggacctcggtcttcatccaagtggcctgagtatttcactggcaggttgtgaatttttcttttcctctttggggatccaaatgatgatgtgcaatttcatgttttaacttgggaaactgaaagtgttcccatatagcttcaaaaacaaaaacaaatgtgttatccgacggatacttttatggttactaactagtactttcctaattgggaaagtagtgcttaagtttgcaaattaagttggggagggcaataataaaatgagggcccataacagaaccagtgtgtgtataacgaaaaccatgtataaaatgggcctatcacccttgtcagagatataaattaccacatttgccttcccttcatcagctaacacttatcacttatactaccaataacttgttaaatcaggatttggcttcatacactgaattttcagtattttatctcaagtagatatagacactaaccttgatagtgatacgttagagggttcctattcttccattgtacgataatgtctttaatatgaaatgctacattatttataattggtagagttattgtatctttttatagttgtaagtacacagaggtggtatatttaaacttctgtaatatactgtatttagaaatggaaatatatatagtgttaggtttcacttcttttaaggtttacccctgtggtgtggtttaaaaatctataggcctgggaattccgatcctagctgcagattgcatcccacaatgcgagaatgataaaataaaattggatatttgagaaacattgtgctttttcatttaaagaccaaagtcatttgaattcgatggcaggcctttctctttctgagacctgtacgaaatggctgatattaaagcaggatcaataatgtaagcataaaattacatttgctcagtcagtcgggcccagtgctttgcctgagtgtgaaacccatttctgtgggcttgggggttgaccaggcaaggagctgggcctcagaggttccatgtcatagctggctgagtttcagctgttatctaagctgcctgagtctccttttatcataaagtagtgatggtgtcagtgtgcgaaatggtggggaggactgcatgaggattgacggacagcattgtgcccctgacggtgagcacaagtgtctgtttttgtcaccttttcctctagagaaatctagaggatctagagaaaggatcaatttgggttttactgacctcaagtttctaaagcttctaaccaagaagcctcaatcaccccgttgtgagctgacgctgccattggctcaagatcattgctggtactggggtatgtcctccaagctcatcccttgcatttgatgtggaaagcccagatcattttgacatgggtggcaaagcaccaccactttaacaaaaaagggaggctgggatcagatctctcgtaacatatgcacttatgttaagagaatttagacacattatttagagacatcccatttctcaatccaaatgtgagcaggaaactgtaggagaaggatattttccctcatttggtgtcccggaacatgactccctgaagggagccattctggggacaattggagggtgtggtatgcgtgtgcacacatgcatttgtgtgcctggtgtgcgtgtgggggttggcacctctctagaagtggaccctttgggatgtcctagcttctcctgctggtggatgaagcctttctaatggctttgctccttgctcctaggcatgagcttgaagggggataatgaagggcgtttaggaagttgctcaaggaagactgtctgaggaaactgcgtactgggctgaagaaagacaaccggaaaacactgaaggagcgctcagccactgcaccttcaaaaaggcagaaaagtcagttcagggaggtgcctcccagctaccccacccgcctcaggaggggtcattccaacctagggtgctgagaatccgggtgggattaccagcaaaagctagagaaccatgggtcagcgacccttaggaagaagtggaaaggagtcttaacttacctgcaataaccttcctatgcgaagctgtggctaacgcatgcctaatggctagaattaaatgctgggaatataacgagctcagcacaggttatccgcgtgtcagatgttcctgctgtcttctacagtggggacatttcctagcctattcccaggctcctttagaagggaagtggaggtgccccatcttcacctgccgcgtcccctccagcgtctgcccgggccctgggcctgcgctccctcgcggtggcgccaggtggcggggctgcgcgccctggaggagctgcaccgccgtcgcggggctctctcagcactgaggacaccacgccctgcaaattgctgggaacttgtcggtggcaatcacactgctggctcctgcaaactggtgtgaggccctcaggggtgagaacaggattgcagaactgcgctcacccttttggaaagtcgtccagtggcagaagtagcctcccaggagcagagcgaagctgctcggtggtcccctctccaaccagggacccaagaagccgctcaagggaacacggccccgcggcgtccgggaggtcctgcaggagccctgcggctgcccgggttctgtgaaatggcagtgagggtgggggagatgtgcgctaaatcctgggaacgtgcgagtcataactttccaggagaggggcccagggcgctggtcctgcagggcgtggaaccctctgctcttcctgagcaggctttgtccccgggtcgacacggggagctcagcgtgaggcccgcctgcagcgtggacgcagatcttttttatggtctgcgtttctgtattagcctcagcagcctggtgacgcctttataaaaggtcgaaacacgataaattgccaatattccacgttttatgtattccccccaaagccgacaattaacaatgactcaccgagcagcagattctttgcacacatccataattgaatcagtaaaatccatgtgttggaggatatgcaaattgcaggtcgttaacgctttagaacgacacatttctgtatcgccccgtgaagagctctacgcacatgaatgttccccgtctgtttaactgttacggccgcagtgtgtgggccgcaggcgcgctgggggctcatctgctgattttgctgcccctggagcagagggatagcgaaagcggggctgagcgcagcacggaccgatcccatcgccgcgctcgccccgcgtggaggcagccgggtgcccgaacctgaaggaggacccggtgccggaagggcccgcggaccccggcgtctcccggggcatcgagcgccatcgcccgcgttttacggccagggaaactgaggcggccgccgaggggacgcctcgcgacggttcctgggagagctggcggcggccttgctctgcgcgctcttcgcgccgccctccccgcccgcccgcctcaggattgaggaagtgcgtctgggcccggccccggcgcggggggcagacggcggtgggacggccaggccccggccccgccagtgtgtccgcccggccccgcgtcccggagcgcccgcacccggccccgccgccgcctcaggtaagcgccgctcctgccggcgccccccggcggcctggctgcctcccggccccgcccggggaacccagagcccgcgcccggcgcccgcggggagcctcggcctctgcctgcccgcgggcccctgcgctccgggcggccgcgtggtcgggcacggggggccgttgcgcaggggccgcggcccgaggggcgcggagggcgtgtggggcgaccccggtctcacgtccccgctgcctcccgccgcgcccggagcccagccagcctgtgggaggggagcgcgcggggcccgagcagggaaccccgaaaccccgtccgggcagggtcgggaaagctgggaagcggaggcaagagacacgagtcgggagacacgagccggggagcccataggtttcctctgcctttggagcgaacccagtcccttagcggggagcgggcggagtgtgagcgcgcgggtgagcccgtgccggggtgtcggcaagagaccgcccgggagcctctcgctggtccggggcttcctggggttgcggggcggcccagcgaggcttcaccctcctcgatgtctgggtcacgcttcttgcccaggtggtctctggctggcgcagatacaactgctctgtctaccatggtctctgcaagctacaggggaccttcctggcaggcagggacgcgggaaggaagcctaggaaggccggggtcagcgaggagacgctggtggagaatctgagaacccccgtggccatctcaacctaccccttcacagtatgaggccgcgaagtttttctcccacgaacacttcccctgcaacaggtagagaaacgggggcatatagctttcagcaaacctctcaccgtgtacactaatgatagagtttgccagccactcacagggtatcaaaatgcccagacattaaagggatagctagaacatgcacaattttggaaaatgttaacattaaacgccttttatgatttgattctcttcatctttgcctatgtcctgaaagagaaaataatataacaaactaacctcacacctaatttgttcctaaaggaggttttgcggtcagccaaacctttccctctcccaaaagtcgatgtctctggcagtgacctcgcagtcaactcggatcctcagataaaaaacattcagtctgttgaatctatgtctaaaatgtgtcctgatctgtcccctttttcttatgcccccaccccccaccctgccccttgtccagggtaccagcatctctttactgtaggatttcagttcccccttcctccattctctatatagcagcgtgcgtctgtgtgtgtctgtgtgtttaaatgggtaaatcagaccatatcagtcctctttatggagtccttcagtagcttctccttgcaactggcacgcaatccaggagacctccttctcctcacacccccagctgatccagcctctgctgtctcggaccaccaggccattgccccaggccacactggctgagcttgctgtccagcactggtcccctgcactgctgcctcctgactcttcacacagcctcagaaagtcttccctggtcaccctctgaaaacccacgctccctctcacatccctcactctgcagcctccctgcagtccccattctgtactccttctttatctgtttaatttctccttaattatcttgtggtctccactggagctcttggggtcagagactgatctgtcttgcttattgctgtgccctcattcccataactgtacagggagataccccgtgcatggtggtagagtgactggatggggaatggacaaccctaacttacctgtggtttcagactcatggagcatttctctcctccaccctttttgggctcatctgggattgagaacaacatatttctctggcctgcagctccaagatatttggatgcccccaaacccattaaacacattttataggcaaaagccaatgctagtaagggatgcaaatagcactcaagagatttctagaatcatgggctaaccattttgaccaggattttgtttcaaaaaggaactaggtgatatgaatgagcatgtctagcatgctttgcttgcaagggacttctaacttstwactgatatcgacagtccttcccaagcctcctaaaatatctgggcttctctgctgtcagaagctttatagcaattacttagctgtctgctcccccaccagcttcacaaactcatgaagttccctcttcatagaaagaactcaataagacatttgtagaatgaatgacaggttcttctcttttcttttctctagagtcttgctctgtcacccaggttggagtgcagtggtgcaatcttggctcactgcaacctccacctcccccagtttaagtgattctcatgcctcggcctcccaagtagctgggattacaggcgcccaccagcatgcccagctaatttttgtaattttagtagagatgggtttttaccatattggccagggtgatctcgaactcctgacctcaagtgatccactctcctcggcctcccaaagagctgggattacaagcgtgaaccaccgcacccatctattttcttttccattaaatgtttaggtttattcattaatgcaggtataaatagttggcaaaaggaaattgatgaggttttgaaaaatcatttaaaccatcattactgctgaaaacctcttgatgccctctttagggtgtataatgaagacatgtaacttgtaatcatcacttgttggcacctctctggacccaaaagaagcaggaggaagcaaagatccgtttgagggcaaagattgagcaaaatttgaattacctcatcttaaaacttctaccttagaatataagccaaaatagtaactagaattttaaaactgctccaggggcagagtcttccactggtaaagtgattttcaaaaggaaactgaaaatgaaaaggggaacaaaatgtgctgggtgagggttagcctgaaataattttaagattttttttttttagaacttaaaaacattgtatggtaagacacttctgttttcaggaagaatgtctagcgtttggatttttgaaatgctgttggttatgtgcggtagctgttttggagaggtgtctgaaagcagatggcaactgtgcttctcagtttctggatgtgaatgtgtgatcggaacgtttattttaaaacagattctgtcttgctggctcttcctctctctgtcacaagttgattttccaaatcaggttttgctatttataaggctttcatcatcccctaaattttgcccagattgatcgtttttcctttcctccttcgacttttcaggcttcccaacttcaaacacaggtgtttcccacacgtggtttgtgtcgaccatcccttttgcctctgaaacatgtgcagcttgcacaaggctgctggagcctggcttttctagctccacctttccctgccttgacgagtccagtccacctgggccaggtgcctgagttctaggcttttaggtgagaaattcccacagccttgtcctgtaccttacttcgtgcccctactgctcacggcatcttctagaacctacccgctggtgaggctggcatctgccctccagcattgatattctgatcttattaattagcagggaagtgggagacccgctggcctccaagtctgtgcgctggtactacaggtaatgaccaccccagccctgtcgtagagagaggctgcagaaacttcactttggttgaattcacacagtaaccccactagcaggcccgggcataagggtggatgtctatttttaacaggtgaaaactgagacacacatacctttcagctgggagtcacactgcgaacatgtgacacaggcagtccacacctttaacgtccacgctatgcttttgcctgtacagattctcttaggcattatttttatataaccttgatttaaaaaatatatttttggctgcactatcactccccatttcagagttgtctatctgagagaacacagacaagaggtgctaattacctcgtacttcatcacatgtaggatatgctataagaacaaggataggcgcacatgcattacttatggtagtacctcatgtcaggcctgagctaggcatgggtcttaccctccctctggtccttcaatcaccataccaggatgggcacttatgcccatggggggactctaagctcagtgggggcccagcatagaagagcagcacttggtctcagtttatcatagtcattagtttcagagattagtctaactccaccctggaacttttggggccagataattctttgttgcaaatagcagtcctgtacattgtaggatgtttagcagcatcattgacctctacccattagaggcctgtagcactctcccccagccaagttgtggcaaccaaaaatgtytccagacattgccaaatgtcccctgggaaaggggcagaatttttgaggctcatgtctgctaacctccgtcatttagctttctgctaaagctcatgctaacttgacttcataaccagtaataattccatgtctttggaactgttgcctgaccacccccttgggatgacgtgctcacctctggcttccagaagaactggccccgggcaaaaggagagccttgtatcgtgactaaccttaactatgtctgccctacccccactggagtgtgcccctgagggcaagagcctccttgagccatcttggtgccactgagcctcacacagrgcctggctaccttgcatgtgacagtaggtgtgcgttgactgaacaatgattgaagctgttaccagtatgtgttttccaattgtctggggtttgtttgagactcttctcaggtagacaatacctgagccccgcatcaagatgggatggggggagctgtgccttcccactgaccacmcctgatgggtttggctggatagatggactacaaaaaggaatgttgcagagggaaaastaaatgaacccatgcaaatatttgcaggggaggaggacaggaattataaaggctttctgttttgattgtttttcgccaccagakcaagaaagctttctgctcagccatggctacgmgtccacgccttaatgcaccccacagccagcggcagtggcagtgacaacagcgggacctgcctttgaagatcggctgctgcaagggttgatggctggcatgtcgcaaagaccccccagcatgtactggtgtgtggggccggaggagtcagctgtgtgtccagaacgygccatggagacgcttaacggtaaggacagggctgtgcttatgcctgcctgggtgtgacctgccatgctcatcctgcagggtgtctaggctatgtaagaacaaggagttctcaaccagtggaaatcaaatgtccatcatttggtgctctttcatcatataatatatcttgggastcttaaattctaaaaattgaggaacagtgtacaaaatttattgtggactcacagatcttaacaattgggacatcacttcatgctgggttaaagaacttttaagaaaaaggatgtagttttgttttttcattataaaaataatacatgtttattaaggaaaaattgaaaaaaataatttaaaaaaaaggaagaagggaaaggaatcatccagaatcccgctatctcaaacacaagtacaatgagcatcttggcatgttctctcctagtctctgcttctctgtgtttaggggactttgttttaaccttattgtacttacaaggtgtatgtaatgttgcatgttgcttttttctcttcaccgtccatcagtgacatttgcttagggcaccacctggctcccgcaatcaagtgaaacatcatttcatttattttattttatttttttacgatttaataattggatcaaaaaatgattcataaattgggcagtactccgaaccaaaacaaacatcattatctgcgggagtgctatgtgcagttattgacctaatccttattctcctgtgggacatttgggttgcttctagttgtttactcctactgagagcatttccttcccatctcttcatacctggtttcaaggttatttctgtaatgcaggtttacagaagttgaatgattggtcttgaacatcgttaagctcttggcacgtattttgccagattttccgctacacttgcaccacctttaagaccaataggatatcatcgtttacaaatatttgtcaatcccttagtatgtaccaggcactacatgtacaaagttcagaactttacgaaataatgtcataaaatcctcacgacaacctggcacatggtacttttatttccgttttatagctgaggaacatgagggtaagagaagcctggaaacgtgttcaaggtcaacaactcagaaatcacagaattgccatctgaaccctgtcttaatgctgcaacactcattcttaaatgctaggccacactatgggaggtgaaagggtcaacaggttgggtctgagaggcccacgtttgtacccttaaccgtgttaactaacgatcggccactgtacctggcttggcagacactttgttcagttgtttgagtgttttcactccatctgaaatgtccagcagctgaccagggtgatgtttctggaaggtgtcgtttcacatccatcacattatgaaatgggaaacgaatttgcttcttgacattgcccagcactaaatctttccagagtgttcaacttgcatctttgtaaattttctttttctttgtattagacgtgtgtcttttttcagttgtgtggtaggaagaccttgctctgttggtgtgagatcgaggtggcgtgggtgatagaacgcagtccccgatttgggggtagcacctccacctttccagtgcacgtgaggctcccttatcctcctgctgctcctcttcgcagccctgagggacgagggtggggacagggaccttgggtctgtttggggcctgtagggtaggtgactgtgtcatctgaaaaagcccacaggaggcgctgctccctcccctcctggtcaacagttggtgatctaaaggagtgcttctcaaccacggcccacacagtcactgggtagtggctcaaaccggcagggccctggcaccacctggacccactggagcagcatcttggggcagggggggcggggagtgaacaagcatgggtaattttttctttttcattttctttctttcttttctttttcttttctttttttctttttttttttttttttttttgagacagtgtcttgctctgtcacccaggctggagtgcagtagcatgacctcagctcactgcaacttccacctcccaggttcaagtgattctcctgcctcagcctcctgagtagctggtactacaggcgtgcgccaccacgcccagctaatttttgtatttttagtagagacgaagtttcaccatgttggccaggctggtctagaattcctgacctcaagtgatccacccacctcagcctcccaaaggggtgggattacaggtgtgagccacggcgcccggccagcatggctaatttttcaaagttccctagtgattctaacgtgtagctaaagttgagaatcaggccatctaaatggtttgagtcccatagagcagcacttctcaaattatcaggtgcacatgtcccctggggatcctgatgaaatgcagaatctcattcaggaggcctggggcacagacagcctgcgtttctaggtccccagggatcccccrttgattcttacaggtcccagggaccggggcgcaatgggctttggacaaacccatccccacctccaagctcgtggcaggacagataaccagaaaatgttaaggtgttccgaaaggccaaagtgtggcactccccagcccccatgattctccctaaaggcctgcatctgagcttggcactgctccttaggaggtgtcctctcctgactctgctctgatggcctctttccccagtgggatctcaggaatccctgctatccctgttctgtataacccaagggacacacacaagggccaaggaccctgacgtgacctcagcagccttcactgtgtactgttcaaggagcttgaagtagggacaggacagggaagtgacaccctgggaacccctgagaatgagggaggtgtttgtgcagtgacctaayacagagaacacagagttgaagaggagaggaagatagcctgaaacaccccagaaagttctgtcccctgtttagcattaagaaaattatgttacatgttaatgaattacaataataaccaaatcctcataaggaatctggtgagaagctactaatttatrcccatactcagagttttaaggtcccacaggtggtaccagcagaactgagcctgtgagccccagccctggagctcactaacagaagttattaattccagggactaaagcctacagtgctccctctgtaaagcccaattttaacgcattgcatgttggatttcattttcgcagaatatattaataaatgtgtacactaagactacagccaaggagcaggtaatgctcaaagggtggcgtgtggccacgtctgtgtgctgggattgcagtcactgtgctttgctcatcggtgctgtttatgtttcctgcaatatctacacattgctttttgttttgttttgccttcttttgcatccagacgaataatattgcaagttatttttaaattattgtttatttaagtactgatgatttgtgtttagaatctaaacggtaaacctcctgtgcttacatccaaagttagatctgcctccactggcctctttgccttgaagtctttctggaataaatgcggaatacttgacttactatgactgcagctgatccccccgcaggactcaccctctgcacatgtccccagagcctaagctggatttgtcccatcccaccttctcctagacttcctgggatgatagggagccctgtttcccctctcccaccccccaaatccaccagcctcactcagggaacactgttcaggcctaatttccagctccggctgagaaaagttggccgccagaaggaaaactaacgacactcaaaattatgtagggacagctttctcatgctttaaaaatccttggaagataacgtgattgaaaacgacgacgttcttattatacttccacgtgtgcgttagaaaaagacccacactttaaaaaagagtgtctactcttgggtgttggggtaatggtatttttaattttttatttgtgtactaggcacgccttttcacaccccctacctgttgtgacttgcgtgacctcagctcatgtttgtttacaatggttaatcctttcaaagcccctggatgtggggggctttgcccagctggtgtgaggctggggtctgtgtgtgtctgccctgccgtgcggcccgctgtgtgtttgtgcaacacaattgtgtcccaggaaggtgtgtgacaatctcaacctcattagcaccagcagcagtcagctcgcctgcggtgcaagaggaatggttggaaagctttgatgggcgtagagtttgccagctgacagagcagctgtcaatgagatrctgggcatgggctgcaggacgcgcattactttgacaaacatgtcattagatgttcattcttctgagtatgtctgacaccagccagagtggaaaaaccagtcccgccagccaaggagagctgtcctggaaagtagagaagtcaggaaacttccacataattcaggtggagaatacttgggaagacttctggattgcggagggtgggtggaacttgagcagacatcacccaggcagtggctcgcccccaccagctctctgtgagtggccgtcgcttcggtcctgaaagccctgccacagtcacacacctctcagagcactgcccaccaccggacccagcatggaccaaaggaggagaaggaacattccagaagttcttcaaatcccaggttgtttcatggctacttccaatgtcttgtttttttctcctttggcttttgcgaatctgtatttgaaatacaactccttaatataggagctaagaggtttgctcaagtagggtctcttcctgccttccagaaatagaactaggaaatagatcaaattaggaagagcctctagggtggcagccagccttcttgtcaggccacagcaggaaagtctacgagggacagatccccagtgatgagccagcccacatctctgacctgttcctcctgttggattcctgcctgaacgtgctgggctgtgttcacaccgtgagagccacaggaaacagggcaggcagggccttgcagggaaggagattccagcctggctgcaggagttcaccagcccctccagggagcacagccacgtctggtcaggaatcttttaatgagtgaggagaaggacagggaagctgattggtggcccaggtggcaggcgaggtggctgtgtgcgtccatccatgcaggtggcagttagcacagctgtgcttcatgcttacaaagcagaggccagctacagatgctccaggcccttgatgagcctttgaacattcgttttaacctgaggcttagatcttctcctggttacttgtctggaatgtgcttgcttacttctagcaatggggagctgactccctagcaaacaacgccagcctttctgtgggcagctctggtaggaagtggatgctgtggggctctctttgcaccaggctttattcatttagacagatcggaatcccttaacccatttcttggagtcactaaaagcagatgtgttgccctccctgcagattcctttttaggctgagtaagccatcccacggacaggccgccggcaactttacacgttccgcttggatatccaagagttttttgacttctcagtctgtctgtgggctaattattaggccatacacacctgggtccacagggagagctgcccctacctgcttccccaccctgccgtggaccggctttcaggagcacccccactgatccaccccatcctaggtggcccaagcctgaatgtggtagctcaccagagccccagtcctcaccccctgcctggcctcccccaccccacacttgctcctgacttggcctcctttatgtggggtgtgcagggcagccctatctggtggcctctgtgcttgctagggagcagcccaggctcacttggcatgcattcagccaccaagagagaagattttcttaccagccatctgccctggcccccatgaagagatcagtagcctgagagcagggagatgtccatgtgggcctccccaggcccctgtgcagagcgacaaggattttcacccctcctggtttgcctgagtcagactttgaaggagccatcactagggatttttatgaaattctttagttctctgggaatggagccctcccaccactcccaatgccatgtaagtctaaacttgagtgtgtgaattgcacgcacatttttggaaagtttgatgaatgaaaataagaagctgctattattctttggaagtcccaattctgagtcccttcactattcaggccacccttgggttcagtttgtccagattccacttagccatcttgctacttattgggtgacatttgtcataaaaaagaaacgagaaaaccgaacagaaacacatatctcaagcaatagagtccttcctgagctcatcacccccatgctgcacaaagaagcacacattaatcagaacttgtattttcaactgtaaagaacttttgaggattgcagttccttttgctaatgctgctggggttgtgcctggcgacatcctctcatcctccattcaacatccagcacccaggggccgtggcacattgccaaatgttggcttaaaatcacctacctggtcgtttcaggagaaccgagaacaaaaataacttacgtgacactttgaacttttcagtgactcagagatatttaaaggcagagaacatcttaatcgattattttaaatatgaagccatgttacgatgcaaatttgaggttagaaattgaatgtaagtggacaggaatggctctctgaagttcctgttagcagcttagtttggacttgacacagccgtgtgaactcagagaggcaagtgggtggtcacaggtggcccacacctgcagggttagagatggaaggttcagggcctcgatctgctggtggggctggcgcgggaggccagggcagggctcctccagtcattctgcccccaccccagcttccaggcaaaaatggctccagtgggccgtcactccagtctctgtgcaaccttcaccagcacccacgggttcaaaaataagaagcaagcgaagaaccgctgcctgacagtgcactatgagcattctcctggtgcctgactcctccctgaaggttaagaaaaaagttatttatatggaattccacaattcacacagtggattgacatgataagagaaagccacagttattcttggccccctttccatcatgcccatgggtaatcactgttagctgagtgtgttttctttttgtttgtttgtttgttttgagacggagtttcattcttgtcattcaggctggagtgcaatggcgcaacctcggctcactgcaacctccacctccagggttcaagcgattctcctgcctcagcctcctgagtagctgggattacaggcactcgccaccacgcccagcaaatttttgtatttttagtagagatggtgtttcaccatgttggccgggctggtctggaactcctgacctcaagtgatccactcgtctcggcctcccaaagtgctgagattacaggcgtgagccacagcacctggcctgagtgtgttttcttcctaacctcttccaaagcacatgtatggttatctttgtatatatttctggttttacatgcatattcagttgtacatactattgtacaacttttttcccttgaggatgtctcagagttccctctatatgcaccacatctggtgtgaatccaaccatctttcatcaatgtcttattaaagggtctttagattctttctaccttttgcttctaagagttgaatattactgcatatgccccagcagaatggcgggatcacagaacaagcacattaaaaattatcaaaggaaggcatacccctggttaatgaaggctgtcagacagaagggactataatataggaaaagcaacaaggccctgccccagtgtcaacttcccaaaagagttgttatttcctgtttctggttttagttcttcaggtaattatcatttctcaatgtaaagaagatgcctgcacctctctattgctgatccgttgaaacagtgcctgttgacttcctgccataataaatgaatatttccttcccttttgcaccccatctatctgctgctccctctgcatttcattcttttggggctgactcatccctaggttacatttgtgactttaaatgacatgttcccttcgtgatgacgagtgcctggagacccagtgttctgtggagccctggagatgagaatcacccccttccctgctacctccatcggcctcccgcctcccacccaggactcttactttgcacctttatttaattggaatgcatcagcaagaaaatgcctaagaaaggcctcctgggaggctcctgcaggagactctgtgttcctgagggcatctttattttgccctctcctgcgatctcaattggaatcctctgcctttggaaccttctcccttgtcctctgatgtggtgtgattctcactgccctgtggtgacctggttttccctttcagaagctttcagaatcttccctgtgtgcttggtcttccaaaattttccaacgaaagacctgggtgagggtcctcttccattcctgctgcttggcactgggtgggccaagcatgtatccctttcatgcatgggacatttcttgtattttctttgataatatttttctcttctgctttcgctatagttttgttttgtttgtttttctggaactcctattaattaagatacaggttgcttatcttttcgctcacattttccaactgttgttctttttcttaatgtttataaacttttgaccaggtccagtaacacactggtaatcacagctctttgagaggctgaggtgggcagatcacttgaagtcaggagttccagaccagcctggccaacgtggcgaaaccccgtctttactaaaaatacaaaaattagccgggtatggtggcacacacctgtagtcccagctactcaggaggctgaggcatgagaatcgcttgaacctgggaagcagaggttgcagtgagctgagatcacaccactccactccagcctgggccacagtgccagactccatctcaaaaaaaaaaaaaaaaaaaaaaaaaaaaagatttgcttgacttcatcttctaacctgtctattgaacatttcattttggaactcagtcttaatttccaaaactctttcctgttcttggttgtttattttcatagcgttgtgctcctgtgttttgtacacagtattttcttgaatttcccagaggatcctaattgccatttattttattttattttggtgtcagtcttatcttctcagttaatttttatttatttatttaagatgtcaaaatcatgtattgaaaccaatattttacagtgaattccagacaaatcaataattatatgattcaaagcattattagggaaatttgcagtcagctgactttataggcaaagaatgtctataaattacatagaaagcaacttcctaggatactaagtcagtgaaaatgctggcagaaaaatatttttcactggcacttatttttgaagttctttttaatgacctctgcattctctacatttcttctaagccccagctttgtgtttgtctttattaattcagcatgattatttcaaccattcttaggcatccacttgtggaggacactgttccagatgctggggacacagcaggagtgtggcctctgcccttacagggcttccagttgtagcaggaaaagtagacagcaaagaacaagagagctgagcaaggtagctcatgcctgtaatcccagcactctgggaggccaagcaagtggatcacttgacttcaggagtttgagaccagcctggccaacatggcaaaaccccatctctacaaaaaaaaaaaaaaaaaaaaaaaaaattagccggtcgtggaggcacacacctgtggtcccagctacttgggggtgctgaggtgggaggattgtttgagcctaggaggcagagactgcagtgagcagagatcacaccactgcatttcagcctgggtgacacagcaagaaactgtctcaaaaaaaaaaaaaaaaaaaaggaaggaagaagaaaaccagagagtgatgctcaatgaagcattagagtaagatcatgtacaaaagaggcacagtgtggccattttgatttattattaggtaagacattgatgttgaatctcaggtctgctcagttgaccagaaggaggcagccacaggaaggctgggaagaagagggtttattgaacatactgaaaataacagagaatgatctgctcagccctccctcttgtgcctggtcttagtcctacactccaggctatgtcagagcctgctatggtcagggctctgggaagccaggaaaatgtcctcatgatgtttctattccagcaggggaaacacagtaaataaacctgcactctactgtcaggagtgaacagggccatgacagaaatcaaccaggttgcagggatggagagtgacaggcatagggcactactgctggtcagagatcagggaaggtgtctggggggaggtggcatttacacagaatgaagtgaatggaatcaggtcagtcctgtaaaggagctggggaaatggtgctcctggcaaggcatcagtgagtgcaaaggctgggcagcgggaatgagctcggtaggtttgactgaccgcaagatggcctgtgcagttggggcagagtgagagaagcaccaaatggggctggagaggtaaagccttcacagcaggagtgtagattttgttccaaggctgatggacacatctgaggagctgcatggttttatttagggaattagaaggctattgccagagccctggagagaaggcaccaggagggccaggatggtggggtagcagtgggaggaagagaatgcactgggaataggtctcaaaataaagctatcaggacttgtgtgggtatccacacacaagtatgtaacaaaccaccctatcacttgctggcttaaaagaacaacgaatgatcatttcccaggtttctgtgggtcaggaatctaggcagggcccagctggtggttcttcttgcttcactcccatgtctggcccctccgtgctcct

SEQ ID NO: 96659 - DNA, 49629 bp, Homo sapiens
  misc_feature (1)...(49629): n = A,T,C or G
gaggtaggagagaaccaggcttctcaaaactgtgtgtgtgtgtgtgtgtaacgtgtaaagcattcactcccttatcctttttcacagagttcctttctcaaaaaaagatgaggcagaaacgagctatttcgatttttttttctttttttttgagatggagtcttactctgtcactcaggctgtagtgcagtgacgctatcttggctcaccgcaatctctgcctcccgtgttccagcgattctcctgcctcagcctcccgagtagctgggactacaggcacgcgccaccacgcccagctaattttgtgtatttttaatagagacggagtttcaccatgttggccaggatagtctcgatctcttgacctcatgatccatccgcctcagcctctcaaagtgctgggattacaggcgtgagccaccacgcccagccagaatttttaaaagacagatgtttgagagaaaaaaaaaaacacctggtagcttttaaatgttgtactttagtgagaccttctctctggatttggcagccttgcatattcattcattcatagtttataaaaatgaataaagcagagtcctcatcctttttgaactcaggctccagaaggcagatatattaactgataattataatatggtatagggctaagctatgggagcacagaggagggagtaaataatcaattctgcagaagttggaggtcttcatagctgagtcttgagagacaagttaggttttaccaggcaaagaagcaagagggtccctttatacagagagaaaagcaagtgtaaaggtacaaagctatggaaaatcttgactaaggaatggtgagaggctcaatgtggctagggcaaggggtagatggggttgagttggggaggaaatggatcaagggaggaagataggtggggctggattggagaaaacagtacagagaaatgaagagaaaataaatgactcacagtcctaccattcaaagtgaaatcactcttaattttggtatatttcattccagttttataattctaattgtaaacatgataactgctcaaaagcaaataatcaaattcagaaaagcacaaaataaatacaaatgatctattgcctatcacttgaaacaatctatagtagtattccttttaatttttggtgatttcatgaaaaagatttaactgtatttctgtagacggtgagaaaccaaaagatatattcagacaaagaactaatatgacaagatatgtttttaagaagatatcactgctaacagtatggaaattgaatgagtgtaagaggagactggagaccaagacatttaccctcttttttttttttaacttctttgaggtttggacaaagaaacctgtttgatcccagctgtgcaggagccgaagtttccacagaactacaaccttgtaacagagaaccttgctctgacagagtacaccttgtacttgggatttcacaggtaactcctctgatgtcattaggaaaaaacagtttagttgtgttgataactagaaggtagaaattgagtctttggccaggcacagtagctcacatctttaatctcaggattttgggaggccaaggcagaaggattgcttgaggccagaagtttaagaccaccaacctgggcaagaaagtgagacccccatctctaccaaaaaaaaaaaattagccaggcatggtggcatatgcttgtggtcttagctgcttcagaggctgaggcaggaggattgctctagccgaagagttggaggccacagtgagctatgattgtgcaactgtactccatcctgggtgacagagtgataacctgtttcttaaaaaaaaaagagaggaagagtcttacagatataatctgagcttattctaaaggttcacattagaatctaatagaaaaggggcattgtatgaatttacttgtgtttcatgaatcagctttgtccagattccttaaatttgtttttaacttttatcgttgtcgttgttgttgaaatggattttcgctcttgtcaccttggctggagtacagtggcacattctctgctcactgcaacctccgcctcctgggttcaagcaattcttctgcctcatcctcccaagtagctgggattacaggcatgcaccaccatgcccagctgattttgtatttttttagtagagatggggtttcgctgtgttggccaggctggtctcgaactcctgacctcaggtgatccaccaccttggcctcccaaagtgctgggattacaggcatgagccactgtgcctggcctgttttttaacttttgacctgttaaactttaaaaattaaatcactgtcttcctattgtgatctgggaaagtggaattgttttcattttatattgcactttctgctcttaaattttcattactggccgggtgtggtggctcatgcctgtaatcctttgcactttgggaggccgaggcaggcagatcacttgagcccaggagtttgagaccagcctgggcaacatggcaaaaccccgtctctacaaaatatacaaaaattagctgggcatggtggcgtgtgcctgtagtgtcagctactcacgaggctgaggtgggaggatctcttgagcctgggatgttgagactgcagtgagccgagattgcgccactgcactccagcctgggcaacatagtgaaaccctgtctcaaaaaaaaaaaaaaaaatttcattactactcctggtgataaaagatgaagttcagccgggcgcagtggctcatgcctataatcccagcactttgggaggctgaggcaggcagatcacaaggtcaggagatcaagaccgtcctagctaacatggtgaaaccccgtctctactaaaaatacaaaaaattagcccagcttggtggtacgcgcctgtagtcccagctactcgggaggttgaagaaggagaatcgcttgaacctgggaggcggaggttgcagtgagccgagatggtgtcactgcactccagcctaggcgacagggcgagaatctgtctcaaaaaaaaaaattaattaaaaaaaagaaaaagaccaagttctactctacagatagagacaaaagtggcaaatattaaggaaatgtttataagggagctaatgagatcaataggaccacaaaagacattagataaagaagattctagaaatgttaagattttagaactagaatgtatgacttccaaaaacagttctggttctggctattcattattctgtaatttgttttcctctgatttagctgattatgacaggtataagtagagggagaaaacagcaactcagtcatagaaagggacactaagaatagcaatttttaatgccttctcaagatacctgaattgatgcagagcatttttcaaaactactcagtcaacacattgccggaagaaggaaattatgtctttagagagaaatctccatcatagacattttaaataagacagtagataaaagttcagcatgtgcttaagctgctcagctgcctagattcaaacaaaaaatgaatatcatctagtttcccaatattagctagctcaagacattatctacagggccaaaggaaatgattttggactattatccataactttgaattatgtgtcttcctttcagtagagaatattaggctgaccttttctgaagaataatttaatttaatattgaacaacagagagctggaagctgctcttagattgcatctcaggtggctactagtttatatgtggtcattactaatctagagtcccttttcaccagcttagttttctactaaccaaagaaagactatccatataaccccatcaaagtatgatcattgcatcaaagtatgatcattgcccttgtgtgatgtaaaactatcctgctggccttcttgtactttgcctaataattattttatgtaataacaacccattctacaccctactcaaccaagctgcctttctttggatagtgcatttcaactgaaggctgctatttgcaattagcttcaattatgttgaatacttggcagcattttcccattgctgtgcaccctgcctgtgtcctgtcaaaaacttttgtgagtgccttctgtgtcattgcaactgcaactccctactatccttaaagagaaggctagataaataattgaggatttgtttttttgtgactttctgttttccctgacccagtctcttctgctttcttgggggcaggttgcatgatcagatggtaaaaatcaaccaaaatctgcatcggctgcaggttgcctggcgggatgctcagcaaagttctagccctgctgctgacaatcttcgtgagcagtttgaacgactgatgaccatctatctttctaccaagactgccatgacagagccacaaatgctacaaaactgcctaaacttgcaggtgtccatggctgttctactggttcaactggccataggcaatgagggctcacagccaatagagctaacctttcctttgccagatggctacagctctttggcttatgtgccaggtaagcaggctctcccttgggaatgtcctgtttatagccttctgagtttaagtgggtcactttggaagtttaatcctcaaaataccctttcttcgttatcattcagttgtttttggagaaacaactcaaacttagataatatctactggtcaaagtattaggggactaacagtttgttccctcaaccttgtgtccccctgctatgcatatcagaaaatcatcttcaaaggattaagtgtaatcagagttttcagagctgttagtttctatcattaatatttgttcaacttacacattcatctaactttccctgtcctttttgtagaaaaaaaattagctcctgctggttaactcagaagggaaagagtgtgtgtgtgtgtgtgcgtgtgtgtgtgtgtgtgtgtgtgtgtgtgtgtgtgtgtgtgtcagtgagtcattgaggggtgggcaggtgttgtcaatctaatcaggttatgtgttcttaaccattgtattggccatatcatgctgagtaacagattaccccaaaacatagcagcttaaaactacagactgggtatgatggtgcacgcctgtaatcccagcactttgggaggccgaaacaggatgattacttgagcccaggagttcaagattggcctgggcaacatagagagaccctatctctacaaaaaataaaaaattagccaggcatggtggtgcacacttgtagttccagctactcaggaggctgaagtgagagaatcgcttgagcccaggaagttgaggccacagtgagccataattgcactactgtactccagcctgggtgacagcaggaccctgtctcagaaaataaattaattaattaataaaataacaacaacaactgcaaacagctcactcacctgcattgttctgactcagagttcctcaggaagttatatagccaagctgtcaatcagggccttaggaatctgaggactctgctagggctggaggatccacttacaagcccagtcatgtggttgttgacaggcctcagttgcttgtgctattggccagcagcttcttttctaggccatgtatgtgtcttctaaatactactcatgatatggcagctggcttcccccagagcaagtgaccaaaatggagactgtaagcttttataccctaatcttggaaatgacatactatcacatctgctgtatgcctcagagtttatcttctactctgaaagagtgaatgtgggaggggactgcataaggtcatgaataccaaaaggcaatgatcattggaggaccatcctggagtctggctaccacagtcacctaacatattaatctttattagagagtcctcacacatctgaagggtttaaaccacagttaaccttgagagtaaaaatgtatatattagtatactggtgtgttaacattttgtgtcattactgttcatatatttacttgaataaaaatttaaattgacttacatttaaaggagattttacatttattgacttaacgaccatctctwgtaccaacaaaacatttagggttttttttaaccttcattaagtagggtgaaaggaatttaaatgttgtttattagtacagatatacagatgtttggctaattccagtgaatattttctttttcagaattttttgcagataacctgggtgattttctcatttttctccgccgctttgccgatgacattttggagacatcagcagattccctggagcatgtccttcactttatcaccattttcactggaagcatagaaaggtgaagtgctgaaagcttggttctgtcactgtttaggctgtaaaacattcagaagacttctaaaccaagaaataaacaagcctgaatcataaggggttgccttcagaagttatggtaacattaaggaatcacctgaccatccatatgggtagccagaaatcccactgttgagaggtataataaacaaaggactttgtccacagagaatttaatcctgcatataagtatcttatgggaagtccactgccagtccctggttaaagtagttaacctaatgccagaaacttaacagtggcagccaggtgctaatgatcttctaataattatatgataataaagcttattcttgctattctgagttggatgagcagtaaacttaagtcaatgttatttctcatttcaagttttctcactcatagcttctagtcctcttttccaaaggaagatactgtgacttgtagaattgcttccctgatttttttgatgcataggctaaaggaagtggaaactctgtgtacaaaagtgaagatttgctgcacaatgaagagaatgacccacaattccctgagccgtatcagtgataagtagagagaagccatttcttcactgagctgagcatacctaatgagaagtcataagtcaacaagtattatgcatacactgtatgcgtcatgggtaatgtagcataattatattctagtctttaccctcagaaagcttgaaaaggcaagtttattccacatgaaactgtcagagaataggaagcagtaaataatgcattattacagagaagtaaacaatggctaagcattcaatagaaacttaagtgctcaccgtcatatttggtaagctgtcaactcaagagttaaatgatgtaccctgcatcaccaccccaccccccgcccagccgcaccaagaaactgacaaacttaaaactgcagaagtggatccttttttttcctgtaatatggtttagggtggattttgattcttatgtggagagaacagagtcataaatttggagttaagcttatctgctcatcttgctttttgcccattttgcagaatgaagaatccccacctgagggccaaactagcagaggtgttggaagcagtgatgccccacctggatcagaccccaaatcccttggtatccagtgtgttccaccggaaacgtgtgttctgcaactttcagtatgcaccccaacttgcagaggctctaatcaaggtttttgtggacatcgaatttacaggtaaagcagtcatgaagctgagcccagaactgggaagctgataccagtggagtttcatagtttgatccgtatttggatatcaaagaaatgtcaagccattacttattgaatacctactatatgccaggcttgatgataagtgctttttttttttttttaacattatcccattgtcaccattggaaaagtttcactctattatccctgttttatttattttttattttttaattattcttgttttacatatgaagacatgactgcccaaaagatcagtttgtccatgtcataacaaactaccaagtggtagaatcaggtctgtgtcacctaaagaaatctacatattcaacacccttattatgttgcatcatcaaatcagactcaaattagactatttgggtctttatatttctctgccttaaaattacagaatagtgcataaagaggcagtgtattggttgagagattcttttatcttaaccagactatctaactctccaacagtctaatggttcgattaaaaataccagcaggcggacaggcacagtggctcatgcttgtaatcccagcgttttgggaggccaaagtaggcagatcacttgagctcctgagtttgagaccagcctggccaacatggtgaaacccattctctacaaaaatacaaaaattacccaggcatggtggcaggtgcctgtaatcccagctacttaggaggcagaggcacgagaattgcttgaattcgggaggcagaggtggcagtgagctgagatcgcaccactccagcctggatgacagagcaagaaatccctctcaaaaaaaaaaaaaaaaaaaaaaaaccagcaggcaacattccctctctatctaaccctgagcccctgtgtttgtttaaacagtaccctgtctcaatcagtaaataagatatgttaagaagttgttgaagaccattttttaaagggatatctaccatccaatgataaatacaactaacatttaaagaggcatttaacattttactggccgcctttccatatttggattctggttttttttaattcgctcacctatcaaccttagtttcctcatctataaaatgggtcaaagtgatgattaagtgaaataatgcatgtaaatctttataatacataagaaattgtataataaatcattgcagttatctcgttatgtgaccatacaaccaaagtgttgtaatggagtacaatttctgttttatttctgaggaagtggaagctgaagaagattaagagacttagattaagcagagccagaatgaaaacgtaggtcttttgactccaaatcctacactcttcctttattatgacccagcctgtggagctctagtaatacctttggtatktsaaaagcagtataagcctcagatttttagctcctgacctgatttttcagagtaatcaagaacctgttggctacacagtttgggatattgtctgtgaagaatgtgggaattgcttagtgtcccgtcctgcacatggctttcactgccataatggccagccctgagccctcatttaaagcctgagaagtactcatgtttggatatggaaacatttgtttcccttaacttttattttacagcttggtacttgtctcttgcagagtaaggtatcctttatctctgtctcccccttacttcatcagtaaggaaatgagcaaacacttggcgataactctaggcctttagaaactccagggcagattttgttagtagccttaacacactcaaaagcaaatgactacaaagcaaatgrctacacataagcataaactcttcctcttatggcaccgcctttgctgatatttcgctcttgccttactccaggagacccccatcaatttgaacagaagtttaattaccgccgtcccatgtatcctatcctaagatacatgtgggggacagatacctatcgggagagcattaaggtgagagagtttttgatgaaacctgttgctttatataagccctaatgagttgtaattcagtactaaaatggttttcttgtgggctgggacttacaggatttggctgactatgcctctaagaatttagaagccatgaatcccccacttttcctccgctttcttaacctgctaatgaatgatgccatcttccttttggatgaagccatacaggtaaaaaaaaaaaaaaaaaaaaaratttaacttctccataccatcaaatcatcagcagtacatacattttaccttttaatcataatagagcagtccttatgcccctagtaccagacttgaacaccaaaaatttgtgattagtagtgtaccaccaagcttgtcattatagagctttctagttcattccattagagaccaagatcaagggtcattgaagcatcatgagatggacattttggcagagtcaaaaataccatatggtgaagccaaactaagttgtactggcaggagtaattcatcaggccagcactacagaaagaaatcagaggagcttgcttttggtcagtgactttcaacccttttaatcccaacatgtcagtaaaatatctcactaagacagtgatttttaacccactttcctaaaagattctgatttttgcaccactacttgaaagaaaatctctgatttgggttattttttcatataaaggctccaagttgtcaatacttctcatatttccactgccttctaaattcttagctatatggtgaaacaaaggtttcacaaagtataaaatgcagctgggtgcctctcagctccttcagtgtattatttccttaaccttccctggkggaactgcttacttctcccataaaaacttggctgtctgtagagcaaaacttcccttacctgtgatgggtataggatggacaaggcactgacctaaagggagatgaagcaggtaaatcctgagggtagcctttagacagtcatgagctcctccttatgatcagcaatcccctgagtagcttgtgtttaatttgtgagaaaggtttgatctgatttcttcataatcctacgctttaggatttaagataggttttcttcaaaagcgagaataggtcctgttacaaacaggcccttttaagcaagaggtgtgtgacacaaagcatgaagcagatggtattttcatgagactgtaagtttaacaagttgtttgctacaacaggaaggatgacgtgaggtagagagttttaaataattatggttcttccacgcatcttgcatatgtgatagagctttgatttttttgtaagcaatttggcaggggggatttgttttcatctttcaggaaggattcattgttttttcactatagtgtggggttttttagttttttgtttcttggcctgggtttcatatattaaactattcatccttctttgcatttcacaatgctatactatttctaggggaattacctgtgaatctacccaagctgaaacaaatctgtatgaagccacaatttctttttttcctgaaagttcttttgagcttcagccttatgctgagaaataaaggctcatgtcttttacatggtccctcgttttcccagcttagttgactggattttgaataggacctcttaaatgtcacgtcccttcaactgcacctttcttctctgatatatcccatctctggtttctgcagtatttgagcaagataaagattcagcaaattgagaaggatcgaggtgaatgggatagtctgactccagaagcccgccgagaaaaggaggctggcctacagatgtttggacagctggcacgtttccataacatcatgtccaatgaaacaatyggtacccttgcctttctcacatcaggtaaggacatgaagtactgcttccccccaaaaaagtaatggccaagatcagcttcacttgggggatcagcccagctgaaactaagaattcagaccctggtgacagtatcctccacatctggaagggaaacgaatcacttgagaagcttcaaaaagaatgatgatgcccattgttgacatggaagtgaggaaatggtcaccctcacacagctgccagagagcataaggtggtaaaatctttcttgaggacaagttagccatataaatatatgtgtgtctgtacacacacatatatacatatatgtttgttaatctgagaaatacgcttgaatcctggttaaatatggtggatctaacagaaatttatctctactccttctatagctccactgtccaattcagtagccacttgcaacgtgtggctttcaaggatttaaaatgtagctggtctgaattgagatgtgctataagtacaagacttagtgttaaaatgtgaaatctgtccatttttatactgattacatactgaaattatcatttttaatgtctcagctaaatgtgatatgacaatcagtaatcaccagacatttgaggaaatcctctaatgtgaaaaacaaataggtgaaaactttgtaaaaactttttaaaaaaactttttaatctcagagggataagagaagatacagcagccacaaaacaagaacaaagaggcaatgaaagagattatttraagaataagaaagagcccttggatattgaaatttttacctcggaaatgttaaatattcagtaaaggagttagaagatataaattcaaggaactcttctatgaacgtagaacagaaggaaaaagatggaaattagaagagaaaggataagaaaacaaaaggatggatctaggaagtctcaaaagcgaaaaatggaggggaggaagttatcaaagataccaaaaaatccccaagactcaaagacagcctctaaattgaaagggcttgccaaggcccctgcacagagaattttttaaaacccacagtgaggtatgacattgtgaaattttaggaaatcatggtaaaaacaagaccctaaaatagcccagagaagtcaggtaatgttaccatagtttaagtatcaaaatggctttgcacttccaacagtgtcatttgaagctgagacacatttctgagggaaagtaaacctaggaggaggaaggtggaattcaacacaagggagacgcaaaggagattcccaggatgacggtgaaaggagcttgtgtggccactacatagcaggcctgtagagcaagcagtccaggttggagcaaaggatggaaacatccagaaagaatgtttccaaaaattaatcagcagctggaaatgaccatgttgagagttttaaattccaatggagagtttggaaaggatttagtgataagaggctctgaaaataagcaaataagcaaaaagttatactaaaaaggaactatatactcattaggacagcacatggctctgctgtgaataatatttacataatcttaataacaaactaaattatttaagcaaaaatttgactatatattgagggcatctgtgataatgactaaaactgaaaaatcaagaactatcagtaccaaccaaacatagcattatgatactgtctgacttgttaaatttggcatgtataaattttttttaatttttggaattcatgccctataacatagcagttccttacagatttgttaagaagaagcgataggccaggcacggtggctcacgcctgtaatcccagcactttgggaggtcgaggcaagcagatcacaaggtcaggagttcgagaccagcctggccaacatagtgaaaccccgtctatactaaaattacagaaattagccaggtgtggtggcatgtgcctgtagtcccagctgcttgagagactgaggtaggagaatcacttgaacttaggaggcggaggttgcagtgagcagagatcacgccactgcgctccagcctaggcaacagaatgagactctatctcaaaaaaaaaaaaaagaagcgatgagtctacaagatgtatccacaatgaagttcattgataagtgtaggaaaaaactgaaaatagtaaaaatgtccaccagtaaagacattaaataaataacttatggtgcagttacaactggaaaagtcagccattaaaaatgatgtaaaacagactgggtacagtggctcacacctgtaatctcagcactttgggaggccaaggcaggaggatcacttgagcccaggaagttgagactgccttgaaccatgatcgtgccactgcactgcagcctaggcaccagcaagaccctgtctcaaaaaaataaaaaataatttttttaaaaaatgatgtaaaacagctgggcacagtggctcacgcctgtaatcctctaaccctttggaagccgaggcaggaggatcactttgagcccaggagtttgagaccagcctgggcaatatagtgagaccccatctcattttttaaaaagattatgtgaatcacccctattctatagaactttctgtgatggtgaaaatgtcctataaatctgggctgtccagaaccatacttaactagccacatgtggctagtgtgactgaggaatggattttttattttttattttaatagccacatatggccagtggctactatgttggatagcacagggacatacacttactaaaatgataaagtatttgcaatatagttactgaaaacagtaagtttcagaatatgtaaaatatgatcatttttgtttaaaaaatgtctgtgtgtgtgtaaataaggacagaaaagctagaaggacmaaatgttaaattagcaagatgttaacagtgtttatctctggatggtagtttttgtcttttctgttttktgtttggttttggttttttgcttgtctatattttctgcagtgaaaatgaattacttagttttttaaaaaagtagttccttcaaaatgtttagaaataaaataacagtagttcccagaggtctccaaataaactatacctaataaggaaaagagtgctaatggattgagttttcagagactttggattcttttccagagatcaagtcactctttgtgcatcccttcctggctgagcgcatcatctccatgttgaactacttcctgcaacacctggttggccccaagatgggtgccttaaaagtcaaggacttcagcgaatttgacttcaaaccccagcagcttgtatcagatatctgcactatctacttaaatcttgggtacctgagattgaaatctgtcaagccagaggggatgctgttttgatttagggttttgatagtagaatgactggttggtaattatgtgaaaatagaaaagaaatggttaattcctagttgcttgatgaaggaatcttctgtagttttaaataaggagattttatctgggcaaggtgtcgtgtgcctgtggtccaagctacttgggaggctgaagtgggaggattgcttaaggccaggagtttgagaccagcctgggcaacacagcaggactctgtctctaaaaactagtaagattttgtgtgacccatgggacattgagatttccagtattctgctttgatctgtgcaaagagaaactttactggttgtaccactgtttagaaaagtagcattcttttaaggtcacatgatacttgatagacttcctagaaagtctttctgtatcaaaaagtatatatattaaatatataatatatttaatatatattatttataatttattattatattttatataatataattttatataattataataaaatatatattatattttattattataaataataaataataaaataatatttatatattataaataatatatattgaaataagtctttctatatcaaaagaatgttcatggcttttaagtggtgagaatgcttgttctgcagcctacctattgtctcttccattgaccaaccctctggtgatcagtttttttctgatgctaatgttccagggatgaggagaatttctgtgccactgtgcccaaggatggacgttcctattccccaactctctttgcacagacagttcgagtcttgaagaaaataaataagcctgggaatatgattatggctttcagcaacttggcagagagaatcaaggtgaggaagaggaggaattgtttgctgatttcattaagaaccacgttgtcagccaggcatgatggctcaagcctgtagtcccagctacttaagagcctaaggctagaggatcacttaagcccaggagtttgaagctgcagtgtgctatgatcatgcctgtggatagccactacactccagccttggcaagatagcaagaccccatctcctaaaaatmcatgcaaaaaaaatcagattgtcacctcagctgtgctgatttttactctatttcagggagaaaaagagcattaccaagagaaaatataaacagatggttctttttggacagtcacttagaactacaatattcttagttttattcttgtcaacatgagagtgagaatagaaatttaagaaatcggctgggtacagtagtggctcatgcttgtaatcccagcattttgggaagccagggtgggcagatcacttgaggtcaggagttcaacaccagcctggccagcatggtgaaaccctgtctctactaaaaatacaaaaattagctgggtgtggtggcaggcgcctgtaatcccagctactcgggaggctgaggcaggagaatcgcttgaacctgggaggcggaggttgcagtgatcgcaaccactgcactccagcctgggcaacagagcgagattccatctcaaaaaaaaaaaaagaaaaaagaaatttaagggccaggcgcggtggctcacgcctgtaatcctagcactttgggaggtcgaggcgggcagatcacaaggtcaggagatagcgaccatcctggctaacacggtgaaaccccatctctactaaaaatacaaaaaattagccgggcgtggtggcaggcacctgtagtcccagctactcaggagactgaggcaggagaatggcgtgaacccaggaagcagagcttgcagtgagccaagatagtgccactgcactcccgcctgggcaaaagagcgagactccatctcaaaaaagaaaaaaaaaaaaatttaagaaacctcaactagaagagaagaatgtgcacatttatgtaagatgtttttatgaaaacgtttatgcacagtgttaccmatagattttaaaagctagggtgttaatgcagaataactttttagaaaaaaaaaaagatgagtagttttcagtcattaatttttatttggattgtctctatgtttgtagttggtagttggcttttattggaatatgcatacattttaaagattaaaatactatattgtatttagctaaatccctttggttagagtatgacagagctctattagcaggtaagaagaaggaagatcatggcacaaaagtctaatagaaaaccttccttattgctgtcagtcttccctctattgagtttcttttttattgagttggacttcatctttgtttagagcttagccaggtggatccctgaggaactcaagttgtgaaggaattaaatgtcaaaatgactttaaaattcctatacctgtttgtatcaaaaatcaaaaactgcttttcatacgcaggctgcatgagtgactctaattatgcaaataataccctcctccattctcccttctccatccacttttgaattatggcatttacaacagaactgttgccagatggatgttrtatctgatgtatttcttttcctcctaacatttaaacccatttccagtatgactgccagcagctgagccaacctaaaggtccagagttggggctcaatgcttaatttgttcttagaatatcttggcttgtttttgagaaaatgaagctcacgtgtgtcactgtcactgtcaagggttattaatgacctgtttttttatttttgagatggagtcttgctctgtsattgagcacgctgaattcagctacactgtgaattcactttaactaccagatgttgtatactcagtctcttgcagacctccaacaacaggaagaggaaacctatgcagatgcctgtgatgagttcctggatcccattatgagcacactgatgtgtgaccctgtggtgctgccatcttccagagtcactgtggatagatccaccattgcaagacatttgctcaggtaggccagtcccaaaaacagactcaagagcatatatatatattagtttgctatctttttctcccaggcacctaagacagtactttgcacccaacacataccacatattattgatttactgatatgttggaagacattttggtttcaattgctaggatataaacatttcaaaacaaaacattctgttgagaaatgctaactctaacctcacctcttcctgccttaagaaaataatttctggccgggtgcagtggctcatgcctgtaatcccagcactttgggaggccgaggcaggtggatcacttgaggtcaggagtttgagaccagcctggccaacatggtaaaaccccgtctctactaaaatacaaaaaattagaggggcatggtggtgcgcacatgtagtctgagctactcaggaggctgaggcagaagaattgcttgaacccaggaggcagaggttgcaatgagccgagatcgcaccactgcactccagcctgggctcaggtgatcctcctacctcagcctctggagtaactgggactacaggcatgcactaacacgcccaactaatttttgtattttttgtagagacagggtttcaccatgttgcccaggctggtcttgaactcctgggttcaagcgatccaaccgcctcagcctcccaaagtactgggattacgggtgtgagccactgtgcctggcctgtttttttatttttgcgacagagtctcgctctgtcaccaaggctagagtgcagtggcgcgatctcagctcactgcaagctccgcctcccaggatcaagtgattcttcagcctcagcctcccgaatagctgagactacaggtgagcaccaccacatctggctaatttttgtatttgtaatagagatgaggtttcaccatattggccaggctggtcttaaactcctgatttcaagtgatcctcccacctcagcctcccaaagtgctgggattataggcatgagccacctcacccagcctgctttttctaattcaggttttacactatattcaccatgtggattaactcacgttctgttgctgttgttgtatcagctgtggtaaccatgaactttccccagcctgcctattcttcggacagtctgccccattataactatagaaaagacaggaatgaagcaataaatggtagcttattagctgcttaatgggccccttaactttttttagtccggcattagaaagaaatgagtactgagagactctgcctatttatatatttatttatctatttttttgagacagggtcttgctctgtcaccaggctggagtgcagtggcatgatctcagcttactgtggcctcaccctcccaggctcaagcaaccctcccatctcagcctcaccaagtaactgggaccacaggccatgcaccactgttcctggcttatttatttttgtattttttgtagagaaggggtctctccatgttacccaggccagtctcaaactcctgggctcaagcagtccactcacatcagcctcccaaagtgctgggattacaggcatagccaccttgtttggcctctccatatttaaaattaagttatatcgagccaggcacagtggctcacgtctgtaatcccagcactttgggaggctgaagcaggtggatcacttgagatcaggagttcgagaccagcctggccaacatggtgaaaccccgtctctactaaaaatacaaaaattagccgggagtggtgacacatgcctgttgtaatcccagctatttgggaggctgaggcaggagaatcactggaacctgggaggcagaggttgcagtgagccaagatcacaccaccgcactccagtctgggtgacagagcgagactcgtctcaaaaaaaaaaaaaaaattaagttatatctctacaaaaaattatttttaattagccaagtataatggcacatgcctgtagtcctagctactcaggaggctgaggcagatcgcttgagcacaggaattcaaggctgcactgagttatgatggcagcactgcactcctgcctgggcagcagagcaagacaccgtctctaaataaacagatagatacatgtggtatactttgacccaaagttaaggaaatttttaaatattaaaaagatgaatttttggccaggtgcagtggcttacgcctgtaatcccagcactttgggaggccaaggcaggtggatcaccctgaggtcaggagtttaagaccagcctggtcaacatggtgaaaccccatctctactaaaaatacaaaaattagctgggcatgatagcacgtgcctgtagtcccagctactcgggaggctgaggcaggagaatcccttgatcctgggaggcaaaggttgcagtcagccaagatcacgccactgcaactccagccagggcaacagaacaagactccatctcagaaaaaaaaaaaaaaaagaattttctacctcttggtatttggtattaagcattcactatatcgctcgaaatgtggcccaacaaaaattcataacgtttcttaaaacattacaagaacttatgtataggccaagacagttcttccaatgtggcctgggaagccaaaagattgacatctgtcataaaccttcttatgtttcaagaaaccataatctgcatgtacttgcataacaatcagctgactaaatcaaatgttggtctacaaggctttattccttaacatctcatactgttctaagaatctgtcactataattacaaatagttctttacactgacatgaatgtatagtgtctctgccttagagaaatctaaaggtgacagaagcatagcattttttaagccactgtaattaaatatcatctgaacagcagtgttgagacaaagtttattaagaaatagaggccaggtgggtggctcacgcctgtaatcccagcgcactttgggaggccaaggctggtggatcacttgaggccaggagtttgagagcagcctggccaacatggtgaaactctgtttctactgaaaatacaaaaattagctgagtgtcatggtgcaggcctgtaatcccagctacttgggaggctgaggtcagagaatagctttcacccaggaggcagaggttgcagtgagcagagataacgccactgcactccatcctgggtgccactgcaccagcctgggcgacagggcaagactgtctccmaaaaaaaaaaaaaaagaaagaaagaaatagacaaagtagctacaaaaactcctgaatcatcttgttctcactctttctaaccccaactcggcatttgactcaaagttataatgcactctggcttcattcttaagatgcgacgcccaggtgttctgtktttggcttagaatgtkagaacttatggaaataaccctatttccctttctctctttgtcccagwgaccaaacagatccctttaaccgtagtcccctcaccatggaccagatccggccaaacacagaactaaaagaaaaaatccaacggtggcttgcagagaggaaacaacaaaaggagcaacttgaatagatactgtgaactaaccaaaccaaaaccaaccccrgagtgcagataaacaattgtttgtggtttctctctttctggttctgttccttttytttcttcttttytttttyttttttttttttttttttactaaattagagaactgctcttgctgaaattatgatagttaagattcctaagaacttgacaatgctcccctggcttgcaggaaattatacttattatagcatcaccaagtttagaaatcatcactaattttcaccctctgttgtctcttcatattcttcttccttttcctaaatgaaattatattatttcaactactaaaacttcccgccaccctgctatttctcttccaattactgttcaaacatttttggtgagtgctgcttttataaatatgtgatgtcacatatttcagtgacagctgatgttatcagaaaaatcctgttatcctgtgtatttactagtcctcatgatctagacttaaccccttttctgtgttacagagtaacttcacataaaagcagatacctttaagtttgtgtagacttctgaataagatgatagacgagaattttttttaaaaaaggaatttaaaggaatcttgtgcaacttctgttgatagctcttaattttgttatacagtctttttaatgaggattggtagggcaatcctaccaattgatgggggtgaggagactgttgggcccttattctcttatgaaaatctgtttctacaaggactaggcctaagtagatttaggcaacgggtatcatatccatgaaaaatgtcattttaagacactaatatcaacagtatatctcagtgtgtgagatatataaatacacatacaccccatgtgcttttttgttggtttagtgtaaactgagtaccactttatattttctcttccatagtgagatgtatgcagtatgtggccatgtttactaacatactcattcttcacaaaattctgagattataaaatgtatatagttaatatttgtttgagcttgtgacctgacttctaagagctacttctaacacagccttaggtcttcaattaacaaagtaggaagttgagcacaaccttgtccacagccattttaaatatccacttagccctgtgtagttggtaggtggacaccactttcataagtgaacttgagctcactactcaattgtgcagcttaatatgctgactagggacattcccctatggattatctttatatcactgtctttctaagcccagagatgtcataagtgacaagaaaagtgataggatcaagaaatgggtgtcactgcttcatttggaacatgttattaactatggtctctttcaaataaatagtagttttatatttcaacacaagttgctataagcagtccttgatgggtttttgattgcatcagctggaaagcctcaaatctaagagggcttcccatcctasatataaaataggtgttgcctattgctgtgcttataaaatgaaaaaggaaattgaggacacttttgcaaatgccagaatgtaagattcattcagtgtgctccctgggcctttatggcatgggttgacaggatttgtttattttctaaaattagcttcattcaatatttatcatcctcctttccctctctgagaatgaactatgtataaaataagcttctgcctatttgcatttatcttccaaacccaatctagtaggatgttctcattttaaaaacgaggggaaaagaccagagtttttcaggagaaaactggaggaaaatgggcacaaaaactcagaaggcagctattcccagcagcttcctagttaacaacccccatgctgcctccagtctttgtctgtattcttctgtatttaaccttcagattgtaagccttttctggcaagcttttcttctttttttaaactcttttcctgaaactttttatgaatggctatggcaccattaatgctgctgaatatctttaaactctgcacaagcaagtgtgtagcttaaggccactactggtaaggaaaccaagtgtcctctgtgccttttttctttctgtgaagtaatttaagaatatccaaaaaaattagactttaaaaagttatcttggtacaacaccgtgtgtatatacacttggaagcttaaaaaggtgttttgtctggaacttagaagcagctctaaatctagtagagcagactttctaacatacctagttttgtgtattggctttgctggagtatgatagcaaaatgaagactcttttactcagctctggtattgctcataacttaccaagaggctaatactaaacttggaaaattgtttaagtatgttttatcaagcagtctgggttttgttttttaatatactttttaatggatatgtgaaaactgaaggaaatgttaaaggttttttaatggtgcaagtgaaggtgccagttgctatttgatatcacactctacaaaagcttcattactttatttgatggtggttgctaagcagccattgcacagagcataagtctactgggtgcctttacatgccagaggctgatgctgcactgttgatgtcatgtgaggaaataatgcacatgctctaactgctcaacaggaaatgaacctagaaacagaaaatgaaaaggttgattgaaataaaacttgatcaacgcgactgtattttgaaacattccaggaaggttacttcttgtcaaacttgcctggcagtgtttgttcaaaacttgtatttaataaatgaacatctgacttacaacctttgttatcactttattccagtattaaaagctagtggcagtttcagaaatccccctgaaaacttagaggattctgacgtttcactttttttttaggtaagtaacatcaaatatgtgtgacctggctgacccagcctgccttaccaggcctctggaggggaccctggggttaccctcaggagatgaatctcacagtatggttttcctaaccagctctcttttggcttcactgtttttctttatctggcctgaaccccaggtctttgtaatcatttgctgttatcttcccctttcttgctccttgtttccatacccctgccatgcaagatgtcagcctagattaactcagccattcccctctgctgtaatatccaaactgcagaccattgttggaggaaaaacacaatttttagaatggtacaaccacaaacttatctctaacgttgcccaacaacccttctgtgtgtccttcagctattccaaactttggcctccttcctcaaattccttctcatacccccctcccattgacccctcacagtccgatgactttgccttcattttgctgggaagataaagacttcagagactttgaagactttcagacctctctcccataatcacatctgtggaaaaggccccatagatccctggctagttctcttttcctgcctcatcagggctcttgtcaatatccctttttatcaggcaggatggcctgtgcctgtaatcccagagctaagcaagaggctgaagtgggatgatctcttgaggccaggagtttcaggccagcctgggcaatgtggcaagaccccatctctaaataaataaatgactgcctcttctctgtcttcaatttctcccctgagttccacatccccctttggttttctgacttgtaatcctttacagccatatttcttcaccattcaccctggattctatcctaattttttgaaaaggcgctagttagttaaagattgccatattgctaaattaactttcccatccttaatttgacttttctgcagtatctagggcagcagaatcactccttcattgaaaagttcttagttccttgattacacttctaatttttctttccatctctctaaccattccaaaaatcggagatttacttctgctcagacttccccaggttacattacttatagttctgttcctctcatcaaatgccacttccctacatacatcttttcctcctcatattaaactatgaagtttcagccctctgtagtatacagctgttctcttacacatcggctcaaggatcttttctaggaagtatgctgaaatcagcaccatgcctaatctgatggaatgccccctctctgagtatacattgcaacttcagatctcaactctgccacttccaaactgtgtggccatttttcaagcccagtctcaatggggacaatgccttacaggctttctttaaattccaaaatgcctggcatagtgtgggcgttcaatacaggtgattttttcctcacatctgcacagctccttgtggttaactagggaattaggggaaatggattccaatcgtgatacagcactttggggagattgggattacaaaaaatcaactttaaaagggctatggggccaggcgcggtgattcacgcctgtaatcccagcaccaaggcgggtggatcacttgaagctaggagttcgagaccagcctggccaacatggtgaaacaccgtctctactaaaagtacaaaaattagccaggcgtggtggcgggcgcctgtagtcccatctactagggagactgaggcacaacaatcgctggaacccgggggacagaggttgcagtgagccgaagtcgtgccactgcacttcagcctgggcgacagagcgagactgtctcaaataaaaagggctatgggttgagcctggtgacagcctgtgtggtgattgctcggcccctaactttatatgtttggccttggaccctctctacctctgtacaacgatcgtgttggactagaagaatctcagcgaatccttctccagtactgacttcaaaggttctcagaatcgcggcgaaagcaccctacgcaaaatagcggaggtcggcgccaagaaaagcactgcaggttcagggcgcatgcgcatttccgctccttgccggttttccggacctctacgagtggctgccccacaaaatgcctgcttctctgcggaatcctactgttcttcacatgctctctaataccatcttttcatatccactttctcttccatgttgaaaaattaaattgacaggctggattctgcaaagatctttggacatttaagtatcttcgaccggcgcgaaaagaggcggcctgaccttggaagtgggacggggtcctgcagcgggtccttccggcgggtgacattcagccggcggttcggggcgacggactctccattccagaaccatggcccaatttgtccgtaaccttgtggagaagaccccggcgctggtgaacggtgagcgcgatgtgagaccgcsgaggcgggcacacgggcggcagggaggcctgcgatggcctgagaggaagaagcgggctgcgaasacccgaggggcctgcgggtgccggggcgggatggcctgcaggtggagggagcaggaagcaggttggcgactcttttctagccttccactcgtctgacctgcagattgggttctctacacaacctagaagttcctgaattctaaccacgactgggaagagaggtagtgtgaaggaagcccggcgttgcccggcagctgcaaccattacgccccctgagatcgctaagagcagggatctagaggggatggttctgttaggagagctaagaaaaggaagggcagaaacgtgaaagtaaatcaattcggcctcattacatgtgktgttgttctcagtggagtatttggaagtcaacagaaatgtttaaggatgggtgagcttttttgaacgttgactttgctttctgtcctagacggattctragatacttccgctttaatccgagggraattttaggtggaaatggacttcatggatgagtatccatgccccgagaagcataggacgggatccgtataaacaataatctttgttacgaagcttagcattcgtggaattttttcagcttgaagagcctcactggtagaccgctgtatttcacaacaaccctgaataatcacagcctctgagtactagtttatttggccagtaaatatttcagttgtcttctcagtggcaagctattcattttattcctgaagtgagataagctaaattgacgtaagtttttcctagatgtgctgtattccagtaagtgactgaaggtcggatctcttaacttttgcctacgtttatgaaatgtgaatagaaagcagaacttcaaaaaaaatgtaatactttctagcctattttgctgtgtttgagtttggtttgggtattttytttttctttctttctttttttttttttttttycctagaagacagggactcactctgtcgcccaggctggagtgcagtgcagatcacagctcactgcagcctccacctcctaggctcaagcgatcctcccacctcagcctcctgagtagctgggatcacaggcacgcaccaccacacccagctaatttttgtatgttttaagagacgggatttcaccatgttgcccaggctagtctcttaactcctgggctcaagggatcctcccgcctcggtctcctaaagtgccagagttacaggtgtgagccacagcgccagccgggtaatttatccattctctcctcccttccctccatcaccagccaaactatgagttattgaaggctgtcctgcagaacctcacagcctactagtgaaacattttacacattttcccaaataatttcataagcttgcaagaaaatcttttactttactaagattgttaagatacctgtcatagagctctacaattttatataaatcaaaagagatggccctgcggcggtagcttacgcctgtaatctcagcactttgggaggccaaggcgggcagatcacttgagggcaggagttcgagaccagcctggccaacatagtgaaaccccatctctacaaaaaatacaaaaattaggcaggcttggtggtgcatgtctgtaatcgcagctacttgggaggctgaggcaggagaatcgcttgaaccccggaggcggaggttgcagtgagtcaggattgcaccactgcattccagcctgggcgacgaagcgaggctaggtctcaaaaaaaaaaaataataatgctggacactgtggctcacgcctgtaatcccagcacttkgggaggccaaggcaggtggattacctgaggtcaggagttagacaccagcctcactaatatggtgaaacctcgtctctactaaaacagaaattagccgggcatggtggcaggcgcctataatcccagctactcgggragctgaggcaggaaaatctytttaacccaggaggcggaggttgcagtgagccaagattgcgccactgcactccagcctggcgacagagcgagactccgtctaaaaaaaaaaaaaaaaaaaactaaagagaaaaaaggattagaggcttcactctggactttgtgggtgatttaaggcacaattcttaatatttcaagtggattttttttctggtgtggctttcacattttttaggtggcgcatattaaggaattgcaaactaatttttgtgatctaaaaagaaaagtaacaccaaggtaatttttttgttatgaaatatataatatgaacccttccctccgttgtaaataattgaaagataacttgttattcttccaaaagtacttagaaaggaggactcaactgggctggaatgttaacgtggaaatacattttgctttataacatacataggctagtgtattaaatgtgaatgttaaatatttaataaaaattactgactatatctgttaattcccctgggggtcaaaaaagcttatggaaataagtaaatttatcatcaggtttgcctaggaagatcatagaatctgatttttttttcccttaactgtagactttatttgtatttcaatagtttttccaataatctttcagttccgggatccaatccagtgtaccacattgcatttagtttctatgtcttcccaatctcctctggtctgggacagtttcccagtcttccctcatctttcctgaccttgacagttttaaggtatctaggtatcttgtctgtctaggtatctgtcttgtcaaagtatctgtctaggtatcctgaagaatttcctcaatctggatttgtctggtgtttttctcatgcttagtttggcactatggattttgaggaaataccacagtgaagagatgccctaatcacatgtcaggaggtatatgatattcctgtgacatctctggtgatacaagctttcatcacttggttataggttcctctactgtaaagttactgtttttctctccgtgttctattctatagaagcaaataactaagcctatcccataaaggcaaggtgtgattacagtggggggattccatcccctgtaggagggaatatctacataaatagaatttttctgtgagaaagatttgtctcttctccatttatttatccagtcacttattgtatggacttgtacattgatttcatactttctgtatcaaatactgtattattgctcaaattatttcagccttggctatttgggagctctttcaggttagcacctctgtccctttgacataccgcctccctttctgatactacaagatgcttcagatttatattgtattttccctgtcccagccctagaatcagccatttctccaaggaaccttagttccttttattggacaatagaattgagaaactaaggtctgggtgctgtttatgttccttgctaccagaatatcactacttctaggtcctctcatttgacaggaatatagatatgtatcagtatagatgtgtgtatgtgtawatacawgcatactaagccatgtawatacatgcatatatrtatawataattatttctgtgtctgtcagtctgtgtatatattaagctaaacctgagtccaactctaacccagtactgtgggatttattcttgctgcttttcttgtttacctgtaacatsactcaacctccactgagaaatctagctcccattatctaccattcattatgttttatctcttgtatacatgtaaagcagtttcaaactctaacctgtatcccctaagaaacaaatttaccacctaaaataytgtttatgtacagtatactgattcattttttttttaaggatgaaatgtctgtgtgttggagataatattgacaattgattgacttatacaagattgtgctttttttttattgtcccatctttcaggcattggcagttctgtttggaactatctcttagagctttgtgtctgcttaaaggtatgcccatatccccaaacacagaagatgagggagatagtaattcagaaatactcaaatggaggccrttaatatgaggaaaacaccaagagccttgggtaatctgtctttgaacagtagacactttatgggctttcatgctatttttattacgtttctcttgtaatttttgaaacagagtctcattctgtcccccagactggaatgtcatggtgagatcttggctcactgcaacctctggctcccgtgttcaagcaattcttgtgcctcggcctcccgagtagctgggactaccggcacacaccaccatgcccagctaatttttgtagttttagtagagacagggtttcaccatgctgggcaggctggtctcaaattcctggccacaagtgatctgcccgcctcagcctcccaaagtgctgggtttacaggcatgaccactgcacttagcctctcttataattttttaaataaaaaatgtcttcctctttctgaaatcactactgcagtctcacaactaccctggttgttaatgatctcttctcttgaaatagtaaataccttgaggaattccagcttggtaatagattctagttttggctcttcttaactatacatgtagattttacttttattatttgtggtgcctttaaaagaggagcagctgtgcttttgtcagagaaacatttaatccagcacatattgatgaggataccaaaatgggtaccagttgttttaattccatctggatttgtggataatattatgataacttttcatcttgttcttaagagtgccattctaaatccttcatccctttcttcacctctttcttcaaatttgctggtctctctccaagaaaatatgaataaattgactgttctcttgtttttaaatccaattcctagcatctttacagttagctagatttgccattcataaatgaagtacagtactagctggccactagtgaagtactggcataattgaatgtgcttatagcatcctgcctgattgaacatccctgtggcacaggtgttctgcatctttaaaagcctcttgttaccagggagcagctttgacttttcacaccgggtgcacatttggtacaagcagtgaatgaaggtgatgcatgaataaatatttgtgtccagcccacacatctgcttctttcggtctctagtgagttcatcctggttttttgttttgttktgttttgttttccagctgctgtgacttactcgaagcctcgattggccacattttggtactacgccaaggttgagctggttcctcccacccctgctgagatccctagagctattcagagcctgaaaaaaatagtcaatagtgctcaractggtagcttcaaacagctcacagttaaggtaaccacgggctaaatgaaaacggatgtgcataacagaaaatgtcttcccttgggatttttctgattgttttgattaatatatatgtttccaatgaggctgaatccagcataatgaggaaaaaaattttgactgctgaggaagatacttacttttctaattttgtcacctgggtagaaataattagcccattttatgtcttagtttcctaagagtcttaaacctagcaaaaaagtgaccatttttattgggaawttttttttcctttcctatattagatagtatactaaaatatgatggcttgctttgctgagtctgtacttttttcatctggagtcctgagattgtccccaattcagccaaaacatctcttgaactatgtcacagtcaggaagctaacacttcttatatataagataaaaataccaaactgggttattgaattgtgtgaagataaaatctaaaaactgtaagaattagaacttgcagccatacgcagtcacttcctgcctgtaatcccagtactttgggaggccaaagtaggaggatcgcttgaggccagaagttcaagaccagcctggacaacatagcaaggccctatctctatccaaaaaagtgaaaaaaaattgccaggtgtggtggcatgtacctgtagtcccaactacttgggaggctgaggcgagaggatcgcttgagcccaggagttagaggaggcagtgagctctgattgtgtcactgcctgggtgacagagtaagaccctatctcttaaaaaaaggaaaaaaggctgggcgcagtggctcacgcctgtaatcccagcactttgggaggccgaggcgggcagatcacgaggtcaggagatcaagaccatcctggctaacacggtgaaaccccatctctactaaaaatacaaaaacttagccgggcgtggtggcggaagcctgtagtcccagctacttgggaggctgaggcaggagaatggcaagaacctgggaggcggagcttgcagtgagccgagatcgcgccactgcactccagcctgggtgacagagcgagactccatctcaaaaaaaagaaaaaggaaagaaaagaactggaacttggattttatttgcatgatccaagcacagagtacaaaaagcctaaacaattgctagttttagagcctacatcctgggaagtgtggttgtttttcagaagacttccataaatttctggtctaatttgatggggaaaattcacttccagaagtgctaaaaggaaaaggtccagttttgttatggaaagttattttttcaactagaatttcaagatccatattattgctccatgtattaataacagtgctttcctgagccatatgtgcatatttctctttgggacaacaaaatgttgatatgaataccagatacttagtcagagttaagtcaaatactgaatgaataaaaatgaggtctaaaggggaagacagcacttcatctttcagcagattttcttttgccagacaaaaatgtctattcagagactcggccttcctatagccatcctatctaaatgcgccagctatatccaggatgtggattgttttagggctcataaagtgtctcataaacttataatgaaagggttaagtcagttcaggtctttaaagaatgctttgaaagaatttatataagctttgactacttaccttacaaaattgaaagttcaagggttctcagcagttgaagagaagtaatgttagtaattctcaactttgactaaaactgccttctagtttgaatagcatcttttatgttctttgtctccttaattctggaaaagaatagtttcaaatatatatatatatatataattatatatatatataaaaggtaccttaaaatgtatgcttcttttttcaggaagctgtgctgaatggtttggtggccactgaggtgttgatgtggttttatgtcggagagattataggcaagcggggcatcattggctatgatgtttgaagaccaatctttaacatctgattatatttgatttattatytgagtgttgttggaccatgtgtgatcagactgctatctgaataaaataagatttgtcaaaactcagtgttttctccatcagayactccatgaaaggtcacaatttctcttgatattaagctgggttgtctttaaacaaccctaaatacacgtctgtttagcccgcaattggaaaggatatatgtggcaatattaacctggtacatgaatatatggggataacattttaatttgaaggtttggaatatatatatttaagctttatttccagaacagtgagggttaggtcttgggaaaactataacttgccaaagtagaagaaatagtagtaccatatgccaaagtgatagagatgaatcatgtcagtagttagaataacatttcaactgttttctttgctaaaatcacagaaagaccctattgacaacatctatgtctgtaaaaatgttagagtacttgtcatcttgaatatagcctccccaagagagaacagggtggtattctaagtatgtttytttgtaacatctttagcagtaggacagagccatacatgtgaaatctgatttttatgtgtgttattcgtttgtctggttttactacctttgcaaaaacaaaataccccaaagatatttaaacaaggttataatttagcatcttccctggatctaaatagtatattatatcctgaaataaatgaaatgattgctatagtctgtcttctggagcgattttattgggtatataggagagattgatcattccttagcttttccccgggatcttagaatccttaattgactcattggtactttcctaaatccactgttattcttgcagccacagcaaaacatgcaataccaactgatgataaccaaaaggtggttgcatatttattacaaaagcattatggctcacaatacagtattaatcctttaatagtgttgaacctttatccggtcaatcccaaatttacccactgcatttagaacactgctattttagcctaataaacgtcacagcttatctaagtgataggcaagaaagtctccatagagactgccacgctgctaaaatgtgaagtaatgcctaacttactcctgcaataaacaggtggtcaaaactgaaatgacctcttttcaaaaagtactcaaaaagactgatatgagaaaggcaatcagtttctttttcatacagtgcatgattattcaaattaaccagaaaaaaacaaggtaggagatcagctagtactagttaaaacctacagacacctagttgattaatgatatgtaatgtgattgtttttaacgccacggtcacaccagaaggtcctcaaaataaacatttactactcacttcactgcaacttcctcctgctttgccatacacaacacctctggtctcccctgtggctaatagtgcatgtacggaattttcttaggttaaaatagcagtgagctccttgaagtggccacttgacttcaccaggcttgtttctctttttttttttttttttttttgtcctcatcaaccccaaatatcttctaacagaactgttgaggctttcaatgaatgtgtgctgccaagtgtttggcattggcaaactcggtgtttattgtgcacctcctaagttctaggcacaattaaaatggcagaaacattcatgaacaagactgttacctgtttcacagagtttgatctggtaagacaggtaattaggcatgcaattactgtaataagatgtgagaagtactataatgagggaaggggaaggtatacttgaaaggctaacccagggcagggtgcagtggctcacacctgtaatcccagcactttgggaggccaaggcgggcagatcatgaggtcaggagtttgagaccagcctggccaatatagtgaaaccctgtctctactaaaaacacaaaaattagccaggcgtggtggcacacacctgtagtcccagctactcgggaggctgaggcagtagaatcacttgaacctgggaggtggaggttgcagtgagccgagatcacaccactgcactccagcctgggcgacagagggagactctgtctcaaaaaaaaaaaaaagaaaaaagaaaagctaacccagacgagaaggacgttcaagggaggttgtcagagaaaatagtagctatataaacaaggaaagtacattagccaagaagaatggagcaaggtatgctggccaagtgaaacaacctgtgcaaaagctactgtcagaaaaagtgtagtacattgagggtctgagagtgtaagtgtggccaaattgccaggcagaggagagcactgagaggtaaagccagagatggtggggaccagattgtattttatgcctgttaaggcttggacttctttaaggacattgaatagaaagccattgaaagattttgacaaggcacagtcctgccctgaagtaacttgggtagtctaacatcagcaggtaatttcaattccatgtaacaaaagccagaatagaaacctgcaaacttgcatagggttcatataacagtgcatgtggtcctacaattttctcagtatgtaaaagtagaagtactcatttagtagtaggcatcacgaggagagagaacataatggttaagtcaaagccagttatgcaaatatttgtcactgtggtccaaaggtttattcctaaggaaactgctatctatatataagtaaatgaggctttttgttgaggctttcatcatttcaaaactaatgtggccaagtgcggtggctcacgcctataatcccagcactttgggaggccgaggtgggcggatcacgaggtcaagagatcaagaccatcctggccaacatggtgaaaccccatctctaataagaatacaaaaattagctgggcgtggtggcacatgcctgtagtcccagctacttgggaggctgaggcaggagaatcgcttgaatccaggaggcagaggttgcagtgagccgagatggcaccactgcactccagcctggcacagagcgagactccgtctcaaaaaaaaaaaaaagctaatgtgaggccgggtgcggtggctcacacctgtaatcccagcactttgagaggccaaggctggcggatcacctgaggtcaggagttggagaccagcctgaccaacatagtgaaaccccatctcttctaaaaatacaaaattagtcgggcgtcgtggcacatgcctgtaatcccagctacttgggaagctgaggcaggagaatctcttgaacctgggaggcggaggttgcagtgagccaagatcatgccattgcactccagcctgggcaacaagagcgaaacttggtctcaaaaaaaaaaaaaaaaaaaaaaactaatgtgaaactgtccacattgcatattccatccttttttttttttttttttgagacggagtctcactctgtcgccaggctggagtgcagtggtgccatctcggctcactgtaacctctacctcctgggttcaagagattctcttgcctcagcctcccaagtagctgggactacaggcgcgcaccagcatgtccagctcattttttgtatttttagtagagtcagggtttcaccatgttggccaggatggtctcgatctcttgacctcgtgatctgcccgcctcagcctcccgaagtgctggaattacaggagtgagccaccacgcccggcctcatcctttgttttatacatctcagcattgttcttagattaacagtttctcctcttttccattcatctcttacatacctaagtattctaccctgatttctaaggatagctcaatactttctttttaaatatttcatatttgtataacactttaccttttcaaagcacttgcaccaactatctcatttagccctcaactttcctctgaagcacgtgccataaatgatataccatttaacaagagaggaactgagcagaaaacataaaacaatttggctaggatcccaagagcaataagtggtggcagcataagctgggcccaggtcatgatcctgtgttgtagtctgtgccctgactctacctgtgaccagcttgtggatcctgctttgtatttccacagttccattctgtattatatattcttggtcctgctttgccctactattaagttatttaagatttcttgtctcattagatatcaacctccctaatcttatgtaaagtgataggtagtttagtaggacttactatttcctaattagtgtggtttttgtttctactaggacataagattgtgatcacccttgtgatgaattcagtaacagttccaccagaggtaatcccttagcagggaacttacactagacctgtttaccaaacaaaaggccctgatataataaaatactaacatgcaaagcccttggcaatctcccttctgcctcatcttaatctcacttagctgccaaccattgtttcagccaccatttctaaccaatccccataaaacctagctttaaatatcatgttattagagtgtgtatccactgtccctgattgttgcaattttccactaatcagttcattcccctttctttctttttgtcttttgagacagggtctcgctctgtcgcctgggctggagtatagtggcatgatcacagcttactgcagtctcaacctcccaggctcaatcaagatcctcccatctcagcttcccaaatagctggaactacaggcgcatgccaccacacacggctatttttttgtagagacagggtagccacattgcccaagctggtctcaaactcctaggctgaaagaatcccccaccttggcctcccaaagtgctgggattacaagcgtgagccaccgcagctggtcccctttatttcttgccaattttgtgtcctggctcactgtcactttataacactacttctatcttaattcttgacaattgcaatttcaacatacacatgggtcagtagtttccaaagtacagtccctggaccacagcagcatcagcatcaccagggaatttagaaatgaaaattaccaggctctaccccagaaactaggagtgagatcttgcaatctgtattttttttgttgtgttgttttgcatttttttagagatggtctcactgtgttacctggactggtctcaaacccctgagctcaagcaatcttcttccctcagcctcccaagtagctaggactacaggcatacgtcattgcacctagcacaatctgtgttttaattatctttccatatataagtctaatgcatgctaaagtttgagaactattaacataaatgatccttcaaccaacctggccttttgattccctaaaaacttaacagttaatacctttcaccttccttaaatactgattcccatctttttaccaaaaacatcaaccatcttagtttcaatttcatgcatccctctctctgaccacctatgaccttcctagcccattctgtcaaataactacacaaattcagagttttcatgaccatcaataaattgatcctaccatctccctcacccccttgatttcagcttttctctcctgttacaacttaggttccatgatcaatcataagcattctcttgaatacaccttcaacttccttgcctctcactcacttcgttgtactcacttaccaaaaccacctccttggcttaattcagctgtctacctgctctgcacctatgcagccaaatgaagttggagaaaacaaagtaactagtctggccaggtgcagtggctcacgcctgtaatcccaacactttgggtggatcccttgaggccaggagtttgagaccagcctggccaacatggtgaaacccgctctctactaaaaatacaaaatttagctgagcatggtggcacgcacctgtagtcccagctacttgggaggctgaggcataagaatcgcttgaacctgggaggcagaggttgcaattagccgagattgcaccactacactccttcctgttttggcgacacagcgagactctgtctcaaaaaaaaaaaaaaaaaaagtagtctcactttatattcatgatggtcagaaccttaagagagcacttaatactaccagccaatcatattatgtttcttcagaccgcaattacatccttcaacagacgaccttacttcctacttgactgagaaaatttaagcaattggagaacttccagttactcccacaacatcattatctcatcttaccatatctccacctatatatatacaccaccttgcctgtactatatggttcgtatcacatgctgcaagcacacagaagtcactcaatgcaaatgtgatgaataaagtgaatgtatccattaattaatctatataaatgttttcccctctgccttcattcctggcactttctacctagcacatccactttcaaaaccacttcatcaccttttcagagaagtttttttctgattttcccgaattgcttccctttaccctcctgtcgatgcttcttgtagcacacatcattgcactctaatgctatatttacatttatttccttactaaactgtaagcttcttaagggagatactgtatctaatacactgttgtaatactatcccatcatgtaatctggcttctgtgtttttgggtttgttgaaaacagtgaaacagcagactcatcctactgtgtttggtactgggttgataaacagcagagtttagtggcaatttgccacagagggagatgcaggcctggaggacttacttcctgaaggcctgcaggctgagactgctacagagctgatgccagctgagtcactcttgcatctcaacctccaactctgaaacagagatgtggatctctgattagccttctctactgtgctagctaatgcaaagctacctttgcatatgtaaggtctagcaggggagaaccaggaggtaggcagcagaagatcctttataaaagaccaagcctgaaatctgaaaatccctgaaattccttagaaattgatcatcttaactctttctttgccaagcccgcatttcctgatttatatccttgttacagctgaaagaagctcatcatgtaaaggtttatagcaccaccattttcctcagaggattttacatatgcaacctatggatggatttttataagaactataccttggacttcttgcatgaagttaggaaggttatcttcagaggctccaagttttaatgcattccagtgttgtcaaatccaaaagcaattaaatactgttgtgtggttttgaattatagcctgcttgttaaaatagctactgtttcccctaaggacagcctgcatttttacctgatgtcatctgactctgggtctcaagagagtggggaacctaatagaacaactgaataaatgtagttctaagacagtgaattataaggtgatggtggaagagtggttaccaattttagtgacctccaggtagaacaatggaaaggaagtcatgtaagccccagattggggaaaaaatgaaagtaataatgaccaagtaaacattaagtcaggggtgatgtggaagacagtgtggcgattcctcaaagacctagaaccagaaataccattggaaccagcagtcctagtactgggtatatacccaaaggaatataaatcattctattctattctattctatagaatatgaatcattctaacataaatcattctgttatatcattataaattatataaatcattctattatacaatgatgtgtgctacaagaagcatcaacaggagggtaaagggaagcagtttgggaaaatcagaaaaaaacttctccaaaaaggtgattaagttgttttgaaagtggatgtactaggtacatataaagatacatacatattgcagcactattcacaatagcaaagacatggaatcaacccaaatgcccatcagtgatagactggataaagaaaatgtggtacatatacaccatggaatactatgcagccataaaaaagaatgagatcatgtcctttgcagggttggggatggagctggaagccattatcctcagcaaactaacacaggaacagaaaatcaaacaccacatgttctcacttacaagtgagggtgaacaatgtcaacacatggacacaaggaggggaacaacacccaatggagcctgtcaaggggagggcagagggagggagaacatcaggaaatacaactaatgcatgctgggcttattacctaggtgatgggttgataggtgcagcaaaccaccatggcacacgttcacctatgtaacaaacctgcacatcctgcacatgtaccctggaacgtaaaatgaaattttaaaaagtcaggggtgatattttgctcattatagctttaccttaaacccctgtatagtttcatctgcctttagaatatgctggcagaaatatactttattatctgatacccaagttactactgcaacagggaaactaatttctacctcaccctaggctccaaatttcacccccactgcactgagggtaaacactgaagccaaatgggccttgatttgggacctttgtgttcctttgctctcccatcaccatctgaccccaccgcacgcctcatatccacccatcccagaaggaagctgcctctaaggactaagtagtaaatctctcaaagttatttgtggaaagtcctaaggacacaaatcagcaacaaaatccgttgggttttttcccacctctcttaaaacaatctatagttgcatattttccttatttgttcatctcaacttcagcaaaagccttacaggttagtccaacccactcacctaagaaaatttgaaacaaaatgttactctcctcacttttcagtacaaaatgaaatgaagtggaaccatttgcctgaggtgaatgagtcaggggtaggggactggaatgcaggacttgattcctcggtgtcctaactctaaccacattccctctattctgcgatatttaagttgtttattgtactgtgaggagcaggaataggtaagggagatggttgactttttatgtttttattcagaaacttgcatctgaactctaacccgcatgtaagacactccattttaactttagcaggagtaagtgaagattcgtaacatataatttgccttggagacagtgacttttcctgggccttaagcaagactattggctatatattgacagagagagctcttactaaagaagagaataaggcaaataggtgttaatacctaatcctaaacattttaaaaagtgatcatttaactccctaatctctacccataatgtttacaaataagttctcagtttttaaactcgacaccaggagcttatatagcttttcatatgagagacattaagaaatgtagcttttaattcaggcttacctttttgcatcagagagtatgaggccttgaacaatgatggccatgttctcttggttttatctgtttttactgtaactattagcaaaatatatactgttttttttaaatctaggaataaacaaataaacacaatgaatgcattataatgtatattcaaaaacatatcaaaacaggcttacccaactagccttgaaaaagataacctttgggaaatcttccaggccagtcatgactgctggaaagaaaataagcaaatacttactaaagggctttctccaagcgacatatttctcttagaatttccagtctttggatactgacaccttcaccttcatctcagatgacgtagaaattcagctcggaattcagaaatggatagcttccagttcctctgagaatactcctcaatcaacaagttgtctacctagctgaggcacagcttcctggaattaagactgcataacctaggttataattaactcagacttcctcctcctcttgtaccttggccatgaccttaatcctcacctagatttccgtcccatctatggatacaaatttgttctaaattagatcaactgaactctattccttttagcctaagataagttggcactggtggccgaaaggaatcctaaaccaattttagaccatatagttagactttaagcatgactcaaaaaaagctagacatctcagtggagagataatattgctcagttttatccattttccctcattaaaaaaaaaaaaaaacttgggaggactttgagaatggtcagtaggattagaataacgagagcaattgaagctgtgggaagactaatagttgatagtggtttatacctgtaatcccaacactttgggaggctgagatgggaggatcgcttgaggccaggagttcacgaccagcctggtcaacacagcgagacttcgtctgtacagaaaattaaaaataaagccaggtgtgcctcatgcctgtaatcccaacactttgggaggctgaggcgggtggatcccttgagctcaggagtttgagaccagcctgggcaatatggcaaaagcctgtctctacaaaaaaaataccaaaattagccaggcatggtggtgtgcacctgtagttccaactccacaagaggctgaagctagaggattgcttgagcctgggaggtacaggctgcagtgagccatgatcgcaccactgcactccagcatgggcaacagagcaagacccagtctcaaaaaataataaataaaaactaaattaaaaacttagccaagggtgatggtgcacacctgtagtcccagctgctcagaaggctgaggcaggatgattgcttgagcccagaagttcatggctgcagtgagctataatcgtgctactgtactccagcctggtgacagagtgagacctatgtcaaaaaaagaaagaaaggccaggttcggtggctcacgcttgtaatcccagcactttgggaggccgaggcaggcagaggcgaggcgaggtcggcagttcgagaccagccaacatggtgaaatcccatctctactaaaaatacaattagccaggcatggtgatgtatacttgcaatcctagctgaggcaggagaagtgcttgaacccaggaggtggaggctgcagtgagccaagattgtgccattgcactccagcctgggcaacagagtgagactctgtctcaaaaaagaaaaacagtaatactaggcttagtgaattttttcaaagtaatttggaggcaaacaaaatgtttacaattctgggagctgcagcattgataatacacagaaataaaaggaatgataaaatgggagggactttggaatttagctgctttcaactgcatggatttaaagttagatttaagtgatgatcagtaggtccattgctgcttacctaaagagctcaaagccctatcctatatgatcttgttggttctcacaactttacaagagatatgggtcaaagagtagaatcaagaattttgctggtatgaaagttgagatttaaagaagctgttacgtaacttcactgacatgcagtgtcttccaaaaaagaggaatgccttacctattacgttaaagagaaaatagaaaccatccagcatgaactccttcagttttctccctttcacttcgaactgatgtactttttttttttttttttttttttgaaacagagtcttattctgtcatccaggctggagtgcagtggcatgatctcagctcactgccacctcaacctcccaggtccaagtggttctcctgtctcagcctcccaagtagcagggattacaggcatgtttcaccatgcctggctaatttttgtatttttagtagagacagggttttcaccatgttggccaggctggtctcgaactcctgacctcaggtgatccacccacctcagcctcccaaagtgctgggattacaggtgtgagccactgcacctggcctgaacggatctacttctgattacaccctctttctgctgtcccttcccttctttctcctatcccagaggaaaacaggacattctttccaaaactgtctttctatgtttgctcttgattctcttccatttcactcttcagtggtctctccctatttattcctcattttcatttgtccatttatttatttgttcagcaaacatttattatattcttgttatgcatcagattgtgcttctgaaattttaaaagacatgtttcctaccttcgaggggctcacagtctagtggaagaggtagtaaaacaactacaaatcattcaactgtgatactgtgatacagtatttaaagagcaacgataaaagtctacacatgatgctctggttgtgcatgtagcagagctgggtctggagcttaaccaagaggacaagaggggaaaggcatttaaacaaaggaaacatgcaccaaaacatgatcacacaagagaattcaaataaaattagttcactaaggaaagaacacaaataatagatgtgttttgaagacaaggggtaagggagagttacaccagataataaagaatctcgaaggtgataaggaattattaaaatatattaaggatggaagtaatatggtcagatttgcattttaggaaattcaatcacatatcagaggagaagactgggaactggcagggcgtggtggctcatgcctgtaaccctagcactttgggaggccgaggcaggcagatcacctgaggtcaggagttccagactagcctggccaacatggtgaaaccctgtactctactaaaaatacaaaaattannnnnnnnnnnnnnnnnnnnnnnnnnnnnnnnnnnnnnnnnnnnnnnnnnnnnnnnnnnnnnnnnnnnnnnnnnnnnnnnnnnnnnnnnnnnnnnnnnnnnnnnnnnnnnnnnnnnnnnnnnnnnnnnnnnnnnnnnnnnnnnnnnnnnnnnnnnnnnnnnnnnnnnnnnnnnnnnnnnnnnnnnnnnnnnnnnnnnnnnnnnnnnnnnnnnnnnnnnnnnnnnnnnnnnnnnnnnnnnnnnnnnnnnnnnnnnnnnnnnnnnnnnnnnnnnnnnnnnnnnnnnnnnnnnnnnnnnnnnnnnnnnnnnnnnnnnnnnnnnnnnnnnnnnnnnnnnnnnnnnnnnnnnnnnnnnnnnnnnnnnnnnnnnnnnnnnnnnnnnnnnnnnnnnnnnnnnnnnnnnnnnnnnnnnnnnnnnnnnnnnnnnnnnnnnnnnnnnnnnnnnnnnnnnnnnnnnnnnnnnnnnnnnnnnnnnnnnnnnnnnnnnnnnnnnnnnnnnnnnnnnnnnnnnnnnnnnnnnnnnnnnnnnnnnnnnnnnnnnnnnnnnnnnnnnnnnnnnnnnnnnnnnnnnnnnnnnnnnnnnnnnnnnnnnnnnnnnnnnnnnnnnnnnnnnnnnnnnnnnnnnnnnnnnnnnnnnnnnnnnnnnnnnnnnnnnnnnnnnnnnnnnnnnnnnnnnnnnnnnnnnnnnnnnnnnnnnnnnnnnnnnnnnnnnnnnnnnnnnnnnnnnnnnnnnnnnnnnnnnnnnnnnnnnnnnnnnnnnnnnnnnnnnnnnnnnnnnnnnnnnnnnnnnnnnnnnnnnnnnnnnnnnnnnnnnnnnnnnnnnnnnnnnnnnnnnnnnnnnnnnnnnnnnnnnnnnnnnnnnnnnnnnnnnnnnnnnnnnnnnnnnnnnnnnnnnnnnnnnnnnnnnnnnnnnnnnnnnnnnnnnnnnnnnnnnnnnnnnnnnnnnnnnnnnnnnnnnnnnnnnnnnnnnnnnnnnnnnnnnnnnnnnnnnnnnnnnnnnnnnnnnnnnnnnnnnnnnnnnnnnnnnnnnnnnnnnnnnnnnnnnnnnnnnnnnnnnnnnnnnnnnnnnnnnnnnnnnnnnnnnnnnnnnnnnnnnnnnnnnnnnnnnnnnnnnnnnnnnnnnnnnnnnnnnnnnnnnnnnnnnnnnnnnnnnnnnnnnnnnnnnnnnnnnnnnnnnnnnnnnnnnnnnnnnnnnnnnnnnnnnnnnnnnnnnnnnnnnnnnnnnnnnnnnnnnnnnnnnnnnnnnnnnnnnnnnnnnnnnnnnnnnnnnnnnnnnnnnnnnnnnnnnnnnnnnnnnnnnnnnnnnnnnnnnnnnnnnnnnnnnnnnnnnnnnnnnnnnnnnnnnnnnnnnnnnnnnnnnnnnnnnnnnnnnnnnnnnnnnnnnnnnnnnnnnnnnnnnnnnnnnnnnnnnnnnnnnnnnnnnnnnnnnnnnnnnnnnnnnnnnnnnnnnnnnnnnnnnnnnnnnnnnnnnnnnnnnnnnnnnnnnnnnnnnnnnnnnnnnnnnnnnnnnnnnnnnnnnnnnnnnnnnnnnnnnnnnnnnnnnnnnnnnnnnnnnnnnnnnnnnnnnnnnnnnnnnnnnnnnnnnnnnnnnnnnnnnnnnnnnnnnnnnnnnnnnnnnnnnnnnnnnnnnnnnnnnnnnnnnnnnnnnnnnnnnnnnnnnnnnnnnnnnnnnnnnnnnnnnnnnnnnnnnnnnnnnnnnnnnnnnnnnnnnnnnnnnnnnnnnnnnnnnnnnnnnnnnnnnnnnnnnnnnnnnnnnnnnnnnnnnnnnnnnnnnnnnnnnnnnnnnnnnnnnnnnnnnnnnnnnnnnnnnnnnnnnnnnnnnnnnnnnnnnnnnnnnnnnnnnnnnnnnnnnnnnnnnnnnnnnnnnnnnnnnnnnnnnnnnnnnnnnnnnnnnnnnnnnnnnnnnnnnnnnnnnnnnnnnnnnnnnnnnnnnnnnnnnnnnnnnnnnnnnnnnnnnnnnnnnnnnnnnnnnnnnnnnnnnnnnnnnnnnnnnnnnnnnnnnnnnnnnnnnnnnnnnnnnnnnnnnnnnnnnnnnnnnnnnnnnnnnnnnnnnnnnnnnnnnnnnnnnnnnnnnnnnnnnnnnnnnnnnnnnnnnnnnnnnnnnnnnnnnnnnnnnnnnnnnnnnnnnnnnnnnnnnnnnnnnnnnnnnnnnnnnnnnnnnnnnnnnnnnnnnnnnnnnnnnnnnnnnnnnnnnnnnnnnnnnnnnnnnnnnnnnnnnnnnnnnnnnnnnnnnnnnnnnnnnnnnnnnnnnnnnnnnnnnnnnnnnnnnnnnnnnnnnnnnnnnnnnnnnnnnnnnnnnnnnnnnnnnnnnnnnnnnnnnnnnnnnnnnnnnnnnnnnnnnnnnnnnnnnnnnnnnnnnnnnnnnnnnnnnnnnnnnnnnnnnnnnnnnnnnnnnnnnnnnnnnnnnnnnnnnnnnnnnnnnnnnnnnnnnnnnnnnnnnnnnnnnnnnnnnnnnnnnnnnnnnnnnnnnnnnnnnnnnnnnnnnnnnnnnnnnnnnnnnnnnnnnnnnnnnnnnnnnnnnnnnnnnnnnnnnnnnnnnnnnnnnnnnnnnnnnnnnnnnnnnnnnnnnnnnnnnnnnnnnnnnnnnnnnnnnnnnnnnnnnnnnnnnnnnnnnnnnnnnnnnnnnnnnnnnnnnnnnnnnnnnnnnnnnnnnnnnnnnnnnnnnnnnnnnnnnnnnnnnnnnnnnnnnnnnnnnnnnnnnnnnnnnnnnnnnnnnnnnnnnnnnnnnnnnnnnnnnnnnnnnnnnnnnnnnnnnnnnnnnnnnnnnnnnnnnnnnnnnnnnnnnnnnnnnnnnnnnnnnnnnnnnnnnnnnnnnnnnnnnnnnnnnnnnnnnnnnnnnnnnnnnnnnnnnnnnnnnnnnnnnnnnnnnnnnnnnnnnnnnnnnnnnnnnnnnnnnnnnnnnnnnnnnnnnnnnnnnnnnnnnnnnnnnnnnnnnnnnnnnnnnnnnnnnnnnnnnnnnnnnnnnnnnnnnnnnnnnnnnnnnnnnnnnnnnnnnnnnnnnnnnnnnnnnnnnnnnnnnnnnnnnnnnnnnnnnnnnnnnnnnnnnnnnn

SEQ ID NO: 96660 - DNA, 13800 bp, Homo sapiens
attttcccttatcacaccgtcactgcaaacatctaatttctgtccagtctctcaactcttttcagctctgctgtcctaactaatcattttttgtattcatctttcaaagtatttgtttctgtcttcattctataagtaacaagattatttaaggttattttgtattacagaaatagtaaaaatcaaataaaatatcaaatgtagaatagtccaccaaaaatattttatttcatcttttccagagaggtacacatataataaagtaaatgagcattatatattttattattaatcctcaataatatatttttcacaggtatgttgcttcttgtaagtttaccttttttaatgtgaaaactacaataaactaaattaaattttaaaaatattttacttactaaagtcaactgatgttttcctggtagattgataggcttcttgtggtagcttttaatcatttgcaagttttgagcccatttctaaaacttttctcattgtaaatatgtatttcctttcttatattaactgagaatttgtttttataaaaataaagtggggaatcagactcaaggtgaaatgttgtagacttagtgccagcaataagcagaattatttaaaatcattcaaatatctttaattcccttgttgtctttttcaaaaactgtacattttaactacattaatataacggaagactttttaaggcttagttttcctttatagatattccctaatttcatttttatttcagtctgtcagggttgtgaatgtgatgttttaaggtacactgtagtgttttcacatcctcagatgaactgaattgggacaatactttgtaggaagttttttaatatagtatgtagacacattggtaaaaatcagtatgtccactggcttattagtttcacagatgcttccataattcttagtgtactcttgggtattttaaattatcatttcctgacagcaatcctgaaacatgccagtcttttaaagccttatttctgagaactaaagcaaggcatcagcgaaccatatctgacatgccatgttaatttccataactatcatttctgggaggtggtaggatttctaaggcatggagaatctcagtaaatctactttaaaaaaaaaaaaagcaaaatatctgttttattactgggtttccattcacgagccctgactgcttcattcccacttaaataatttcaaaaatagtgataagcatattttttctcttatagattattaaatatttactcacgtgcacaatatatcaaaacatattttgaattctatattcttagtgttgggtgttcatgttgtgaatgaaaacctcattctgttatctcatagcatatttatatatacaaataatttttgccttaagtaggaaagaaacagctaaaagatacataggttattttgctttttaaaattttagcaaactattctgtgaatcttttgtgtgtttggggctgtttgtagaggaaaatttcatcaagcaacattttgggaacattggccttttgtactctttcctaaataaacagaaacttgtactccccaaaataaaatgtttctttgtatattgttacctgcaagttattgataatggaaggaacaccttttcaatccttagtcccctttcccccaacacagcttttagattgtcgataaacttcccagctcagtaattaactgagctcagtcattgcaccctgtatcatgtgatttttttttccagtggaatacattattagagcacttacacagccagtctagctgcagcagcccaggcggcaacagcagtgccatttttcacaaagaaaatgttgaacaggagccaaatgtttggtggcagtctgttgctaggaaatcaaggtcctgaggcgattaatgacaaagcaagcaataacaagaaggcagaattacagatttaaaagagaaaaaagtggttggtgttataattacccaaagaaatccgcactcattaaattggctgtttttatgattgactttaattggaggttagctcagatatttagctcctttcccacccctttaaacacacacaggcacataatctgtagaactgcagacttgtttttctaagcattgagaggagcttgccctgtaatttgatccccactgacagatgcattttctatgctgccattttgaattaacctattgtagaacaattttcttcagccctgttgaataaaacatccagtctgattacctccgatggatttgatagagtaaaagaatgtacttctcattgaagtagattgtttgcatggactctactgattgtgaactctgccagtaagcacaatcatttgtaataaattttcaaagaaatttgtgaggaaaaggtaatgagagtcacccttttatagtttaatgtttggcacctccatcaaaataatataattcttataagacagtgttatttttccagtaagcttttcacgtggttttagaaaaaatttctgaatcttcatttggactattcatatatttaggaatagagtcttgtatttacactctaaaatgaccattcttcctccccaacaacagtattttagtgcaagactcaatatgcaaagcactctattgcaaaaatatttttggtatgtacaatatttaaagtgattttaagattggcctatttcagtctttgaagtatttcccccccccaaaaatcccttatttaaattttttagggtgtgataaagcatattactagaaaagcatcaatcggtctttcaggtacaataccagaggaaccatcacagtttatttacctttcagaagctttaaaaataaagttacatgatgcctctgctctccagatttctaatcaaaccctggaacaaaagagccaagcacattctatctgacaatgcacacactgctaatcagatgccaatgccaagctgtctgctttgttaaatacttagcttcctagaggcaggaagacagctgctataagtatgatgaaattttgtagttcaatctatttttgctacccttgggctaccaagatactgttaatttagaccaccccaattggtacattttagggagttttttaaagagtttgtaattaaaatgataaaacatcgttattacattgaagaccttctgtaagttttacatttggcagatacctactgagataaccccagcatgtaatttacaatgatgtaatggttgtaattgcattttagaaaaaaagaactataggaggcaagtgcttccattagaagagtttttaaatctgcttctgtttcatttaaatctacttctatccccaaattacttacttataattgactagagcagctataaaccttaagatgctatctgaatatttttaaaaagttatcaccccagacactgccaccagggggaggaagctaaaatcttaaagttcttaactgatgatgatactgccagtaggtagattatattgcttagccctacatagttaactacttcctccagataataccgccttttgggacatgattctcacaacctgtaatatgtgatacctgtagacttagcacactattaattgtaaataaaatggaaactttcgtactctggtggttggggtcaggaaggggaaagaggaagtacaaataagcaacctggacatttttattgtttttctcttatctgttagtctacttgaagagctatccttgaaagtgagtgctttagatctatgaaactgggcagctatcatagcacatctattaagatctaataatcacataattaatgtagcaaaatgaatagactgtaaggtagttttctattttttgttactacactgtggttttgtttttaataaatagttttggctttattttaaacaattaaaaattcaaaatatttttatgaccaaagcttgtaggttctatccctggaaaatattttataaatgcagaaaatagttgcttaggattggaatccaactctgtttaccatgaacaacttaaaagttgatctcataatcttgcatgttgtggaataataccacgaaaaagttaattaaagaatttagatgtttgttctcctgtctagaactcaataacttttaagtagtaactctccctacagtttaactgttaaacagtaactcttctgacagttttaggttttattctgtgaagactcatgatttttaatttttgcatcttaatttttcagttatttcaggtattgaaattacaaacgacgggaaagaaaagtggttgactaaaaaggggatacaaaaggcaatttttagggcgatgtactgttctgtatggtactgtggtggtggatacatgatactatgcatttgttaaagcccaaagaactgtacatcacaaagggttaattttaatgtatgcaggttttttaaatgttagggatttcaggatagaatgcaagctgtaacaaatgaatctaattgtattacaaatgtatggcataacttcactgaatgggtgggggaaaaggagctgacctaagtaactttggaaaatggtgttttgattggacaatgtaaagctaaagactaaggaacactatagaaacactctattctagttggtaaatttgtttctcataacggtatgggtgaacagttctgaacctctttacatgtatcctggggttgaacaaataagtaaatggatgatgaatggtggaagctaggtttctcactgtcaggaagggatgttacagataaataaacaagaggggagagccagaatgaaacctgtggtactggattagagttggagatataagtatttactcatgtttagcttaatatatgcagatggatagatgcagaaataattatagatgcatgtgtatatgtggattagtatacatgcatatgtttcctagctgtgtttactgagaaggcctagaagcagtgatatcccagtagccacaaacacatctaacgctcacatcctggtttgtaaatcctattctccaataaaaggatccaggactccttttaaatatgactgattctggggctggtgatgggaaaatacaacataagcatggaatatcttgtagtgccagaaggcaagagatttcttaaaaataataaagattaagcatgccaaaagggacacatgagccaatgtgaaagaactccgagtggccgtagctggaataattagagcaacaaaataaaacatgtagcattggattaaggataaattattgagtaaatatacatgagttcacagtgttatgtataaattgtataaataagtaaatggaggagaagagataaatctccctgacagaagaattccaaataacatattgccccctccagaagggggatcctacttcccttctccttgagagtatgagctggattgagtgagtcatatccaaaaattgagtttggaagacagcgaaatactgacttgactatttccattggagaaagctggtaaacaactatgttaactaagtgatcaaggttaacatcacaaatgggaagtcatgctgatgtgaagaggtggaaacttcatctctctgatattctttccctaaacctgtagcctcaatctaatcattaggaaaacatcagacaaatcccaactgatggacattctaccacataagttgagcattcctgaaaactgtcaaggttgtgaacaatgaagaaagactatgaacatctcactgacaagaagagactacagagtcatgacaactaaatgttacatagtttcctggatcaggtccagaatagaaataggatattagtgtaaaaactggtgaaatctaaataaagtcttgactttagtcaataatccaccaacattggtttcttggtttggccaaatgtaccacagtaatgtaagatgctaagatagtgacattagaacaaattggatgaggggtacataggaagtctgtatattaaacttgcaatttttctgtatatctaagttcccaaatataaaataaatttatttgaggttgatcaatgggctgactatattgacaagatactgataggttacatgttgaagaaaacatacaatataaaatagagaaaaagtcagttccatcccttcccactccccctttacctacctgctccccagtactcatcattgtgatttagtcagaacagggtttagtgccagaggtcagggtgactgagggtggaggagttgtgagcaatgggttcatggctgtcacaataatgctgtggcaattctatggtttcccagctgggagttaggagtggggagggggctgcagcctgatgacagccagctgaaggaagagctacctctcccttccctagctgctcatcacctgaacccaagaccacgccaaacaagatatggatgtagatgctcttgctgagtctgttccgcaagagggaaagaaagggtagctgctccaaacacgccgtcctcatatacaagggtgaggggaacagaagcatgtggctgctaccagcaaaggaaaagtaggagagcaatagaaaggggaggaaatgggaagagcagaaaatcaatattatttaaaaagtgacctaagacttaaaattgaattagtatttgtacagaaagatgcaggtggaataactcactctggcctgtgatcaaaattatatggagaaatcatggtgggccccttcctctgtccccagtggtggcaccagttgctgagtgtgattagttagaatggattccagtctagtcgttcaggcagaggaagtagttgcagtgggcaggcaagaggggctcagttgctgcagcactggctcttgctggctgggtggttcttctggaggtccgtacctcagttttggcctggagcaccaggtgcactctggggcttattaggaatcttcttagctctcgccgtgtaaacttcattcacgttcattgcagtctttactgatgtctccatagtcaactgtcgtcgtctgcatagtcctgtgcttcgtggaattctggggctttcttgctggccaggtctgccttgttacccacaagtacagtgacaatgttggggctggcctgcctctctagctccttcacccatttcttggctggtgcaaatgtatcttttttggtgatttcatagtacatgggggctgggctatgataccgctcctgtccagcgctgccccagatctcaaacttgactattgtgtcgtctaarcagacagtctgtgtaaggaaggctgctctgattatgctctcctggtactcttgaaattgtcccttgacaaagtggaggacaaggctggatttggccaccatagactcattgttcccagtggctggtccacyaggtcgtgtgctgtgccttgccgacccgccactacccgtccagctgttgtgataccagagagcatggggacgggagccattgctatgcaaagaggcacttagttgggaagggggtctccaaaatgacgcaagggcagtagtattacttggggctggggctcacacaggctccgcttctctccccccacccctggtggtatctccatataaaaattttacttaaacgcagagaccatatatgtacttaaacacttgtctaaagaaataaaatatggccgggcatggtggctcatgcctgtaatcccagcacagaggccgaggcaggaggatcacctgaggtcaggagttcatgaccagcctgaccaacatggagaaaccctgcctctactaaaaatacaaaattagccgggcatggcagcacatgcctgtaatcccagctactcaggaggctgaggcaggagaattgcttgaacctgggaggtggaggttgcggtgagccaagatccccgccactgcactccagcctgggcaacaagagcaaaactccgtctcaaaaaaaaaaaaaaaaaaaaaaaaaaaaaaaaattcccctgcctctctccaccccagagggtaaccattatcctaaattttattattattattcacatgcttttctttataggatagccatacatgtatcactaactgttctaccatatctcataacctcttatatagtttcccttttttgtcatatttgctgtgttctggataatttcttcagatctatcttccgatattggtaattgtatcttcagcagtgtctcatattctgttttacctgacattgaattttatgtaataatcattacttccattttcatttcttcccctgaaatcagtttactttatcattttgataaactcatttcattctcatatatacaatcctcttgtttatttaaatatattaaacttattttctattttgtgcctagcctaatatttaaagcttatgcagttctgattttgctgtctgttgtttctgctggctgttactcaaactgccttattttcctgtgtgttagcttgtattcattatttgtggtgatttctgagactgagatgaagatacgtttccaaagagagtatttacatttgaatctgccaaaagcctggggatactgtcaacctgggaacacattcaaataaatgttgggcttaaagttttgtgggctgcataggtaacatgagttccagatccataaaccttcatgagggtgggcttgtggttaaattttcagggaagatgtatttacctgcacccagcatcaagtttgaaagaggttaatttccttgtttattccttctgtagggtagacatcattctattcaactcttacactaaacatgtatgtagctctttaggatcccaactttatgtggagagtctaattagacttcgtatcgttaatgtaccctagaatttatcccctaaaccttgggttcagtagtgtcctggtaaatattttaaagctggctgtccagggcaaaaaaaaaaaaatcctaatttctcacatttttctatttcacactatggctgatttcacgataccagcctgaagtcattgaacgtggagttgggaaaagatatgtacagttagctttctcaactccagtgtatcactgccagttctgtacatggctgtgaaaactgaagctcaatgcacagggcttggcatatccctcagaatgaaagaatctgagtgtttgcctacccctctggatttccatttttactttgttttaaccttttgagtattctgtgtcaactcagcaatatacttcaaaaaaagattcttttgttttctttttattttaacccagcatttgttgttgtttttagcaaaagtcctgtgttagggtacctatttagtcagaaatagaagtctctgtgcttgtttgtaagtataatgtattatttttctttttggggaaatatagaaagaaatagaagtctctgttcttgtttgtaaatttaatgtatttttcttttttgagaaatagagaaaagtacagagaatattaaaacacccataatcctatcatatatgttcattttatgtgcatgtatgtctctatacatttttatataatttgcattatatctactatttcagtatatgatttttgttaatatataatgaatgtttgctcatgccgttaactattcctttaaaacagcccccattatatatgagactaaacataaaatgctgcacacataggagttagtataattcagaaatttagtctgtattgcatttggaaataattttgtgaaggttattcatgcagcattattaataattgcaaaatattggaaaccatataaatgaccagttctagaagattggttgaatatactctggaacatacaatagactactatgtttataaaagctatctgtttttataaatatatggagtaatttccaggaaatattacatgaaacaaaaagcagaaacaaatacccatagtgctacttgtcatacaagaaaaagggagaattaaagaatgtgtatgttcaggaaggataaagcagaaaacagtaaaattagttacaagaggtagaagggagagtgaggtggaagggatgtgggagggagtgagacttggatattggggtatactttcttggcatagtttcaacttttgaaagcatgttaatgtccaacatattcaaacagttaaataaaaatgatatcactgggacagggacctaaaattgtaaacaaacaagtgaacttaattcatttttttttcttatttttttattattatactttaagttctgggatacatgtgcagaatgtacaggtttgttacataggtatacatgtgccatggtggtttgctgcacccatcaactatcacctacattaggtatttcacctaatgctatccctcccctaaccccccaagcctcaacaggcccctgtgtgttatgttcccttccgtgtgtccatgtgttctcattgataaagttaattttaaagtaaaatgaatactatatccataccgaaaggggataaagaagaaagaaatgaaggaagaagggaggacagatttatgaacaccagattcaactatatgtccttagcttggggtgggtgggagagaaatgaagaattgcaaacaaatcctgaactcacttttgtaggtttattttattttattttatttttttgaggtggagtctggctctgtcgcccaggttggagtgcagtggcgtgatctccgctcactgcaagctcgacctcctgggttcacgccattctcctgcctcagcttcccgagtagctgggactataggtgcccaccaccacgcctggctaattttttgtatttttagtagagacggggtttcaccgtgttagccaggatggtctcgatctcttgaccttgtgatccacctgccttggcttcccaaagtgctgggattacaggtgtgagccaccgtgcccggcctataggtttattttaatggtatgggcaaactaaatcagagactattttgagcaaatgagtgagcctggtttctcactatggaagaagggacaaacatatagacaggaggaagacaggtaagaattctgtgtagaggaattggattggaggtgtctgtgtacatatggacatttctgtgtgtgtatgtatctgttgatgtgtgtgcatgtatttttgtatatgtatatgtatgtgtgtgtgtgtgtgtgtgtgtgtgtgtgaagagacattcatatatttcttagctctattgctgaaagagcaaaggagcgaagtcacaatagtagtgacacacctagcgttatttcccactgttagtttcctaaggctgctgtaataaattaccgtaaacttaacagaaagttattctttcatagttcaggcggccagagctccaaaccgaaggtgtttgtggggttggttccttcttggggaggcagagggagaacctatccatacctctctcctagcttctggtggttgtgcataatccttggagcttgatggtttgtgacattataacttcaattcctgccttcattgtcatatgacattcaccctatgtttacctgtccaaattttactctttttatcagagtaatccactcattagggccgactctaattcactgtgactttatcttaacttccaaagaccccgtttctaaataagctcacattcacagggttagtacctgattatgactttttgaggagcacagttcagtccctaatgcctactaaaactaaagctcttcactcaaatgactggcttcagtctggggcagggtaggtacaagatgaacctagaacatgttgtaatgccaaaaagtaaggaaatgctaaaaagtaagataagttgtttgttaagtatacagaatctagcttgaagagttccccactggtcaaatctagggcaatttgagcatcaaataattaaatacagtaatgaattataagctgttggaaataaagaactttataagaccattccaatcactaatgggtggatggatagaaaatgaagatattttacttacagtggcatgctgaaagttgaccagcaaatgtggaggttgtgctagagttgggaaaaaacaaaacaaggaaacctcattttgcagtcatcatgttaaagattagatcaggcaaaaatcatcaatggttgtaacatctaagaggacagacatgttgatgaagaacagaatatttacatggtcttgaaatgttgtatgggagaagagaaaaacagcaacaatgcagtggagaaatcagacaacacattgacagggtgatcacaagtatcacctccagtgagagtcaaatgaacattgtttgcctccttatgtgtttatctgtccctgagaagtacacaacatcatctatgcagtttctggcccagaatgcatctcaactcaatcacaagagaatattatgcatacatacagaaaaagaaagaatacaactgaacatagatgataaagaaaatgaggtaaaaatgtgacaacagatgaaaatggataaaggtattttctgtgtttttatttttggaactttttgtacattgaaatgattgccaatggaaaagtttagataaattgtcctaaagttacagagaacttgcagggaaaaacatcttaaagtagactaatagtggagagtcataaaagacacttggcaaatcttcttagttgaatattattcaaactattcagtcagggaactgattttgtgctaattatgaaatgcattattgcattgactttatgtctcttacaacattaaattatgttacctaggatcaatttgagattcaacacatgatagtagtttaatacagtgaagtcataacttgcaacaaactatcccaattttaagaattaattctgagcaatttttatatgcatgaaaaagatggttagaattatttgcagacacttgcatattctttagtcaagtggtcttattaccataattcatatctgttgtgggagtagggaagaaagagatttaaaaaatatctatcagttctttcaatcaagttaggtataatattaatagactttgagctaagaaagttttcatgaccagaagaggagcaggaactgtctaacatagaaaatgtttatggtataccataatcagttatacaaatataaaaggaaaaaatgtttgactagtgatactctcaaacttggatatccagaagagtgattctgtcagtacactaaaagcaaattcatctatcaggagctttcatgttttcattcaacaaatatttatccagtgcctattatgtaccagatagtgttatactgtgaatcgggagcatatgttaaaatagacaatatagtagacattattctctaaaattattaacaatagtagctaatactcatatgatacttactctgggccacataccattctaagatctttacatatagtaattcctttacctcaaacaaccttattagattggtactattattacctctattttattgatgaagaaacagaggcacggaggtgttaactttctccaggtttcacagctaaaagtagcagacccaggattttgaatccatcagactggcttgtgtccaagctttttttaattaattttttttattttgacataatttgtagattcacatgcagttgtaatataatacagagagatctcatgtactttttactcagtttctcgaggtaacttcttacaaaactatagaaccatatcataaccatcatattgacactgatatagtcaaggctccaaatatatctgtcaccacaatgatccttcatgttgcccacccacttccctctgttcacctattgaaagacatcttggttgtttccagtttggagctattacagataaag

SEQ ID NO: 96661 - DNA, 76773 bp, Homo sapiens
aggagttcaagagcagcctggccaacataatgaaaccccgtctctactaaaaatacaaaaattagctgggtgtggtggtgcatgcctgtaatcccagctacttgggaggctgaagcaggagaatcgcctgaacccgggaagtggaggttgtagtgggccaagatcacaccactgcactccatccggcctcggtgacagagcaagactctgtctcaaaaaaaaaaaaaaaaaaaaaaaggacactacacaggtaccaggaaaaaatataaatgattcctttataacccaaaaaaaggaaaagcctttctgtgactcaagatccagaagcaatacatgctgggaggaagggaagatgctaatgagtaacgagtttatgggaggatgaaaatgttctgcaattagtggtggtaattgtacaactgagtgaatataccaaaaatcactgaattgtacatttaaaagagtgaattctatggcatataaatttaactttttaaaaatctaatgaaaaaataaaaaaaaaaacagaaatactgggatttgattattttagtaactcaatttgtgaccttgagcaaatcacttcactttgccctttatttccccatctgtgtgaatagctcattaaagccttcctaagaggcctgatatccataataaatttaagaagatggatgaaagactatctaatcagatatgaataaacatacagcttgtggggacaaaaaagctgataacataagaaactgaaaggagagcttccacataaactatgaaccttcttcacagttctcaatgtataattatctactagctatcattctttaagagcttatgtgtcagtgtcaggaactataagtgctttttatgtattatcttattctcacagcactctcaggtaagcagaagtattctcattttagagataagaaaatagactatgagaagttaaatgactcgaccaatgtaaatacctaagttgggcttcaaacttagatctttgtcacttcaaatatcaaacccttcaatgcaagctatagaaagaacaatggactaaaaatacgaagtcctgggtttgaatgttgttcctgccacataatgattctgtgatcttaggcaagtcaatgaacatttcagttttctcatttattaaaagaaaatattaactcctgccctagtttacctcatagaatataaaaagggactactatatacatgtcagttaaatcactacagagctgggcatgctagcatgtatcctcagtcctacctactcaagaggatgaagtgggaagactgcttgagcccacgagtttgaggttgtaatgcaccaagattatgcctgtgaaaagccactgtacttcagcctgggcaacacagcaagactctatctcttgcaaaagaaaaaaaaaggaatttaagagataataatagaaaagtagaacttttttttttttgagatggagtttcgctcttgttgccctggctggagtgcaatggcgcgatctcggctcaccacaacctccgcctcccaggttcaagtgattctcctgcctcagcctcctgagtagctgggattacaggcatgtgccaccacgccagctaattttgtatttttaggagagacggtgtttttctatgttggtcaggctggtcttgaactcccgacctcaggtgatccacccgcctcggcctcccaaagtgctgagattacaggcatgagccaccacacctggccaaaaagtacaactactgataaaccaaaaacacgttgaataatgaatggctttaatattttatagttcctctaatagtaatagtatatacgaaagcagtgactttcaaaagatacttctctcaagcacaccaggggtgcaaagcaaatagggatctcaaatctactttagtcagagtagctctaaaagctttaataaagaagttcaaaaccactgtttttggcaacatccattggcatctattaaaaggaagagtgacaccaggatttcaggccttacccaagagaaaatattagtgtactgaaaagtgaatggattctagagactaaacttagattgaatcctagctctgctacctactagttgggttacttttaatctctgggtctgaatgtctttacccacaatgcaggaaaatattcaccatgcaggtctgtggacacattaaataacataaagttaccattacaatgtctggcacacagtacttactttaaaaattgctattattaaattatccaacaatactttggaattactaaatctaatctgaaaaactgaattatggaaactcatgaaaaatcaccaactcagaatatgcaccctgaatatgcaaacatgcctaaataatgtttagtgaaattgaaggcaagagatcatgaaaaatagttaagagtaagccacacaagagactatcaagagaacaggactaacttgtgagtaacatagatagagtggaagaatggaagttaagaaaaaagcaagtaagcataaggagacataaagaatgctttgaaattggtgtgagacttcataaattacgactgaagaaaaagactgaatcctagattatatgcaaatgagtaagatacacaactcaaaataagtatccccagatgacaattatgactccaaaatacacaatgggtctcacagtcaagagacccaagtcctagtccttaacggccctaccgctaagcttctagggtaccttaggaatatctgagtctcagttccctcatttattaatacattcccttatagaatacagaactctctgaatattgggttcctcaactacatgaagtggtgaaatgagaccatgtctatgctttctctcagctttatgattctaaggagaaagagaatctatattattactaccatgagacttagatgaagcctgcttatataccaataaagtagaaaagaaagatacgggaaaataagccatttgaggaccacacaaatattcgccaatatatgctcttctcttcacaatactatcataaagaaaggcctttctaaagaactttcttttccaggataagcagttaacctaaaccaagaagaccaaagcatctttttaaaaaggtaagttgtccaggcacagtagctcactcctataatcccagtactttgggaagccaagtggggcagatcacttaaggccaggagtttaagaccagcctggccaacatggcgaaatcccctctctactaaaaatacaaaaattagccgggcgtggtggtgcatgcctgtaatcccagctacttgggaggctgaggcacaagaatcacttgagcccgggaggtggaagttgcagtgagccgagattgtgccactgcactctagcctgggcaacagagtgagactctgtctctaaaaaaaaataaaatgaaaagtaataaaaaataaaaacgataaattactaacaattatacaatcttctaatcagcagattttcctttttttttctctcagtatcttcattcagttcttcaatcttcagagaacttgtttctccaagatgagaagctgagctctaattaagcttatctaaggaatgtataattattaaaaatctgattttcttatgtatttgtatagaagggtgctggtatactgaaaaatcaaatttattttaagaaaggcagcaactaagatatttaacaacaattaatgttacattaatattaaactccaggttagttttcccaaataatgttatgggtcagtttccaaattctctttattcatgttatagtccaacttttctgtcttccaaagccaaaacaatcttcactttaccttctatgtagccttctacctctattgtgcgtctatctctctatctcctcctgctaaagttttctcatttttctactgcgtatcatagcaggtctccactcaattcttagtttccttccctggtttttccacccatttttcccattcctttaccccactgttttataggattctcctttcttttcatccctaggacttactgtcacagtactgcatctcctactctcgcctcctttttgataagtttttacacatattacttcttcagaacctaaggtttctcttctgtagtcctttttcaaagaatatctaccaattcatctctagaatcccaaatatactctggagccctcatacctaagtatctttcctactccttttctctttacagtcactaattcccagaatcctgtttgaaactacaaatatcccctcaaaaccaaatgcctattcaattctctccactttccagcaattacttctcccatgttcacctcattctttctcctcggcccaagtatcccctaacctggcacaagccatttaacgatctaaaattccaaaacctatctcttctacatggctctccttcctttccagcaaactatttctcgaactcccaatgcttcactaattcaaagtcttaggccagtacgtcgcttccctcagatctactagcccagcaaaaactgattgcccaaatcttcctctaagcttcccagaccttacaactgcagcacttccattcaccaaaccgtatttatagtcatctctcaatctttagagcctatggtcactctgtaaattcttcagttctctccttcttctctctcccttatcctgtccagcttctcactctgtaaattcttcagtcctctccttcttctctctcccttatcctgtccagcttctcagcacattcctactacccttaacaatcttcgtggctatgttctccaccttaccttaggcctactccctaaactttctcattctcccttaagagacctaatctcacctctcattcgctgaatctgtctttacacctctgggaattctctagaatcgtctgcttcctagttctcctctttccttctccagccctgtctcgagtgttttctacccccctcagcttttctagtatctagttctcacagtgcagatattagaactctgataatatctactcctcccaaacctttccttagttgttggcccaattcccctcaacttttctctcagtcattccccacttccctccaccttccctggccgattctcctccacctttgtcaccgttctactcccttttctaagcctcctttattgtggaagtgattctcagatcccttatgttagtctctcagcttccccaacctttgcctcattcccctctcccttcaacaacgttatttttcctccaatttctattgacttggcgcctcccctagtaccccaatctgccttctactccatctaaatatctccaggccgccaacattttctcctatcagtagactcctttcccgtgcctctatgaacgcccagagataccattctccaacggctggggcctggcccatagggagaaggggtatgggtcacgtaccccattcgcatcttggctccgctctgactgcccccgctgccgggtagaggtgggcgagagggaaggcggccgaggtgcatgctcttttcgagggccgacatcgaggggaggctgcacgcacgtagtcaaacagtaggcgaagcttcgtcccacgttgagtgtggcccaaccggtcacgactcgctcccctaacgacgccctgtcgcctttggacagcacccagctacccgtagcaccgcctaccgcccaccggctccgtaaactccacccactcgcttcagcgcttccaccggaagtgcgcaacagcactcatacaaaggaagctgggtaacagagtatgagaactccgcagactcccggctgggaacccgacgactttcaccggaaggaggagcgctcttcagggcaatgcaccctgcgcaatggagtccacaaagggcgcatccctatgcgcttgcgcagctggaggcgccccccagccaaccccggagaggtattgtagcaaagcgtcctgggtattgtagtgtattggagggaaggcgtcttggcgccttctcttcgcaccgttttccggagactgttagaggaagagtcgctttttcctgcctcccaggctgcccagcggcgccggttgccggggaacgcaggcgccgtggggagggatggcgggaggatactgcttaggtgctggagacggagttgagctggtgaagaagagctcgggctcatcatgaaacaacgaaaaggccaagggtctgggggcagccgtgggcgcaaaaaaagaggtaacctgagcgatcaaagattgaggaaagcgtaataggagagcagggtgtaaggaattttagggagacccgcacccccgctggataaacaagaaaagggacgtaagaaggaagtagccagggaaccagaaggttaaaaggaagggcaattggccctccagagaatagaaaggaattaggggctggggtaggggccacagacwggcgattaatgagatgaaggttaccggtaggatgactgtagaggagaagaacaaacaatgatgggattggttttgataacgaagtgaaatgtatgtgtgtgtgtagctttcgaggtccacagggacaggaagaaacataaattggcaaagggattatatcatttgttgtgtgattgtgggcaagaatcacgttttatacattactgaatgaccaaggattagtacaaagcaggactcggtaaatgttagttgaatgaatgaagtatgaagggctgactatgagcaggagttgggaaaaataattgtagagtatagagccgggaagagtggggaatgacaggtgtgataggattggagtgggggtaagggcatgacgatctcctgaaggacctgagatcatgaaagagtgtgcagcagagagtcctcatcaggttagcagctcaaggagacacaagctcaccgagtaggggatgttagctgcagtgagaacagtcaacctaggaacccagggcagatcaggaaacttgacattgaatctctacaagactgcctcgaagggaaaaaggacagtgggtgaccctgcctttttgcattgtaggcagtttagcgagaaaagaagtattgggaacagtgataggacattaggccattgggttgaggactgaagctacaatctgggaattactcttatccaagctgtttaaagattactaaggcagttttgagatactgactttcctgccaggaaagataggaggatctgagactgaagcatactagtgctccctgtgtcaaaacagttaagcatgtttggttgataatcggaaagtcaaagtagaaataatataacatagcatagaacagaatacactttttgctataccatttccatatgtagaaatgtatacacaactgtgtataatttttatgttgaaactatccataaggattatggtgggtcttttctccactatagagggcagaggcggtgtttgcattagaagtccaaataattagtcctgatctgatacattccatatattttcttctttgaggcataaccactcctcaaagaaaagtcaaaggaaaaaaaaggtataaataatataggaatggtttcttaaatctcctttaagttttcccgaaaaggtactatgaatgaaagacaatcagggtcattaaaggaaaattttttagaaagtcatgattaattgctttgtttacactttaatgtctttatgaaacccaataaatactaaagccaataaatatatgaacccagcactgtgttaaaaatagtggcagaatctgaagattagatagtctgtgtcctcactgactgtgtgatcttggcaggaaagaaaagttacaatttaagacgttcttcattgaaatgctgagttgtatgatatagtctaaatcgtttgtgagtgaagggagttgttgctgttttatcgttagtgatttttttaaaagagagttagataaagattacatatcttaaaaaccatagatgttgcaataattaaaacaactgtacttagaaaaatttcaaccatacttagaaaaatgtcaactacttctgatatttgtatttttcaaatagtaactcaactaaagaaaagtttatattagtgtgtctttgttggtatgttcttaacttagagtaaatcaaatcaaaccttaaatactaattagttatcagagtggcttacatgaccagatagattattcggtggtctgatttgatagttacttctcatgtattagaataatgggtaggataaaccttctttctaagtggtgataaattgctgaacttaagactaaagtgttctgtttgttttcattcaaaaagcatattatatgttttctatatttagtctaaattttgactcagttttcttggattcctctacaggtttaagtgacatttctccatctacaagcctgccacctctggttgaaggccagctacgctgttttctaaaacttactgttaatagagtcatatggaagattgcaaagcctcccacttgtgtacttgtccgagtgagatggtggggagaaacatcagatggaaccctcttttgtcccagggatgcattgcagactgaaccaaaagctgtgagaacaactacacgttacgctattcgttgtggtccaaaacagtttacctcttatctaacaggtatgttattgttttatcattgcacctgcagacgtaatacaaagcatgtggttatattgtcagcaataagtgttgttgtgtacctagcatatatgggcattcttaattattgaagagtcaaagagtttttatagtagacatttttctttgtaaatttattgagtgttactgtgtgccagcagttttgaaatgtattacttctaatccttacaataaccctgaaagataggtattttctctgttttatagacaattaaacaagttggagagatgaaatgaatactttctaaggtcacaaagttgataaatggctgaattaggatttgaacccacttctgtctgtcaccaaaactcatgctcttttcactacaccatgcttttttaggtaataactgtagtctcaactctggggtttacattatactcaaggaaagaggatatagatgtaaaatttaccaatagtacaagataatacatactaaatgcyaaatgaatggtttagtgagttagtattacagatgttcagaaatggaaagcatccctctgtrgggaaccagaagccaagatgtcttcatttttgtacaagaaaagtattctgagtgtactatgttacttctttattcaggtcaagctttcacataaatacattttggatgatggggttatttatcaagtcaattcagttcaagtcaataaaattcgagcatttatcatgtaaacatggttgggctcagaatattggagagccaggggtgagttaagattaacttgtccttgagtaacttacattctctcgagaaaaaatttttgaaacatcaacatgtaaagaacaaatgctgtaattcagtcattcaaaaaatatgtttagcacatactacacattgttttaggcaccatggggtttacaaaaaatccaaaaaattaataasaatgatcccgaactctaacttcacaaaaaagtttagttattaatagtaggttaaaagcagtaagtgcgattaaaagatataaataatcttggtactgtaagcttaaaaattaaatcctcaggtagtatttttatataatataacaaatgaggagtgattagaaattcaataagagagaaggtatttattaacatggtaatcaacaggtcagacatttatttgaacatcttatggtatattggtgcattggacttggcatccgaacatttacattggtgttaccaactacatgattttaggaaagtctcttcccatatctgattcctgtttccccatctgtaaaatgggatcatatagttgcccttccattttctagatatttgcacaaagaagcaacccggttgaacgggttgacatctagacagtctagagtttgaactctggcttcaggactagattgttaggtgatgctgagaggttccttagcatctcagggccccagtttcctattagttagttgggaaaaatagcacttacctgtcaggaattattgtgaatactaaatgaaaaaaatgtttgtaaagtgatcggtctagtagctgacacattgtaggtacaagtcttataaaaatattaagactcaggcagcgtgtacagagatttgagatgtattccctgcccaaaaggaacttaaagattagttgaaaacaaaactgacatacatgaaacagtattgagcaatgccagacagtatataattaaatgtctgattacttgacacatatagtaatatcatatgaatattctaggaagttaataagggctaatcttatgttattaagaagccagaatcctgcttctactctatgctcttgctgtttgactttgagcaagccatttcatcttcttgggccttaattttcccaccagtaaattgaaagagttaaaacatcaaatgtgccagcacccaaatttcataattctagttaagaaagaaggccatggaaaaggtagaatttcaataggagacacatgaggtgaaccttataagtgacagtccaactgtagacatgacatggtttttttttttttttttttaagacggagtctcactctgttgcccaggctggagtgcagtggcgcaatcttggctcactgcaagctccgcctcccacttcctgggttcacgccattctcctgcctcagcctcctgagtagctgggactacaggtgcccgccacgacacccagctaattttttatatttttagtagagatggggtttcaccgtgttagccaggatggtctcaatctcctgatctcacgatctgctcgcctcagcctcccaaagtgctgggattacaggtgtgagccaccgcacccggccgacatgatgtgttttttagaaaatgaagcgataagaggctgaacgtggtggctcacgcctgtaatcccaatactttggtggctgaggcaggaagatcacttgaggccaagagttcaagaccagcctgggtaaaaccctgtttctacaaaaaaattagattccacatgcatagcaagaccctgtttctacaaaaaaaaatttttttaattagctgggcatggtggtgcacacctgtagtcccagctacttgggaggctgaggtgagagaaatcacttgagcccaggaagtcgaggctgcagtgagccatgttcatgccgctgtactccagcctgggtgacagagtgagaccctgtttctaaaaaagaaagaaaatgacagaaaatgaagagataagacatcaaatattagttcacaaaagtatgtgctctaaccaaaaacttggaaaaagtatgctatttcttaagctgtgtggtaggtattcgcattattattattttatttactcttttgtgtacatatttcacttaatacaaaatgcaaaaagtaaactaattaatatgttgtcacatattagcatgaaccatatttttttctcaagccatttttattacacttaaggtattaagacaagtgcaaaataaccttgtaattaggatactgtatcagtcaaaaaaggagaagtcactattgyatgaagagatttacaaatgagtraaatatataggctgtgccagaattaacatttgaaatgagatggggttgctctttttttctaggctggagagaggtagtaagaacgattatatgagttcctcagataaaaataacatataaaaaaagaagaggaaatgtatcacattttacaatttttgaaatactttcaagtctatcatcttatttgatgtttaaaatcattttatttatttcttcgtatctattttattttattttatttttgagaaaaggtctctctcagacagccgggctggagtgcagcgatgcaaacacagttcactgtagcctcaacctcctgggttcaagcaatcttcccacctcagcctcctgagcaactgggaatataagcacatgccacgacactcacctaatttttgtattttttgtggagatgaggtctcattgttgttccccaggctgrtgtcaaacttccatacccaagcaatcctcctgccttggcctcccaaagtgctgggattacaggtgagccaccatgcctggccactttcttcatatctattttaccttattctaaacagaagttaaggcaattgcaaaaacatgttaagtacagatttctgtttaactaatgagaaaacctttacattttaaatcttcataactttttgtttacagaaagtgaaaatacagtaggagaaataagatgaagcctctgcagagcactagaaagcatgctctgaggccctgtacatttgcaacgggtattatcctgattttctgagtgacgaatttgaggttcaaagagttaaaagtaactaacccaaggttaccctggcaccaaccctaaattcagggaggcacttgactccgaaattattgatacttctattgtattatactgccttaggaaatagaaggattataggattctgagatatgcctcatactcttacatctttcttcctttacgttttattctgttgcagaaaatagcagccatgaaaatgtttggagcatggaackactagagtagaaactgagaaaattatggctacactacgtgatttttacctstctttgatcagataggattcagttagtaggaatgtgaaagacaaatcggagtaggaatagtgctggacagtagggattctaattccacaacaagtgaagtataaaggtcagaagtctactaagaattaagctttttgtcctagaagtgatgaatagtgtagtggacttataattaagtgtagtggacttataattggatagaactgagttttagcccagttctgtcaatttaaagctgggtgaacctaggaatatacatgactttgcggagcctcttttatccccaaatgaagacagaaacaccagtatcgtagagttgttaagagaattaatgagatgtggaagaccctggctgttagtaaatagccaatgaatacatgttagtccatttcccttattcttcatgtgtacatcattttatagtctacaaagcacttttatatctatttgctcatatgactttcagataacccccatgagtggtgtattagtccattctcatgctgctrtaaagacatacctgaaactgggtaatttataaagaaaagatgtttaattgactcacagttccacatggctggggaggcctcaggaaacttacaatcatggcagaaggggaagcaaacacgtccttcacatggcagcaggagagagaaaaatgagtgcccagcaaagcaggaagccccttataaaaccatcagatctcgtgagagctaactcactatcatgagaacaggataaggagaaccrcacttgtgattcagttatctcccccggtccttcccatgacacatggggattatgggaattacaattcaagatgagatttggatgkggacacagccaaaccatatcaagttgttacacagggactatgatatgtcaagtaatttgcctaaagtcatttaccaaccattcagcaactaccatgtgggaagacactggactgtactagtgttctgcttgcagcaaccccagttcctcagaacagcagtgatgcgaatattatgagcctactttacagacaaccatggcttatacagaaatagcttgtgaatattgcagtcagaacacaatcacaagtcttctaataataattcctacatgcttttcactacagtattaacaaatgctgaaaacgaaccattttctcaactttggttaagaaaataccagaagttaaactgttctgaaatgatctgagattccttatgcatacattatatttcttctcctctgggcatgaaggtattagtctaagtgaccaaagagtatagttgagaagtttattttcatttctcttggttccaagtgctctcaatagctcagtggtccagatataacccaagagtatgcaattagatactcctgggaggcagggaccaacccttgcagctgtgcaagggcaatcctttgtcaattcaaaactagaaatggtgagaatgaaaactgagatttgttgctctgtgtgtcaaaaccaaagcctgagttattggcaaatacatttaacaatactcttttaagggtatttttcttatcaaatacttgctatgctaaatatttttggtcagttgatttattttttcctcagtgtgtggtatttgttgttgttctgtgaatctttattgttcttttgatcttgggttcatactcctctacccccagaatggtatgataagtgattatttgaaattaaaatacttttttaagttaaattactttttccagatagttttgttatctctgttatagtttttaaatcagttgtattttctatcagttgtgtcacttttttcattaggaaatacatgcacatggtaaaacattttaaaggtatgaaaggttaccagtctcttgtgtatctttacacaagaatatatttacttataaaataaattctatactaataaaagctctttgcataatttcttttatttacacagattatatacatatacagtcagcacttttttttctacttagcaattcatcttggatgttgttccatatcagtatagagctacttatattctttttattactttatttttcaccattttgccattattaaaaaaacacattttattaaatattctggtacatagatcaatttacagcttgtaaaataaagtttaaggagtaggctagccttggtgcctcatacttgtaatcccagtactttgggaggccaagatcaggggatcacttgaggccaggagtttgagaccagcctgggcaacacagtgagaccttgtctctacaaaaataaaaaaaattaccccagtgtggtggcgtgtgcctctagtctcagctacttgtgaggctaggatgggagaatcacttgagtcctggagttcgaggttgcagtgaactatgattgtgccagtgcactccagcctgggcgacagagaccctgtctcaagaaaaaaaaaaaaaaaaaaaaagtagaacttcatggaaaaaggaatgtgcttttgtacttttttgagttattgctgaattgctttccagttaaccatcctattagcaacttattaaagtacctaattcccctcactttcaccaatgcaatggtgttatccaacataaaatattttttttcaagttagaaagcttttccgcatatacccctctacccacgtcttaaaaaagaaaataaaagtaaatgaaaaatatccatgttgtaattgtttctggttagatatggctgtgctggtgctggaagtaatcaccaaacttgatggtcttccaattggtagagttcagatcaatggactagctcaactttctccaacccatcaaatcaatggattttttaccattgtttcatcaacgtctaagaaacttggagaactccaggtaaaaatatattttaattatttgctgcataaaataaactttttgggcagaaatagttgagtctgtttgtagaatggataggtccatggctcctgtatatcatgctaatttccacctcatgcctttgcccatgtttttacccagtagacctacttttgtttcccacttatccaaatcctcttagtgccttagtgccatctcaagttccgagagtccttcacacctcctacagcattcattcttcttgtactcttttttacattcataaaagcattaattaatcattgtacagttataattctacatagtttccaaaattgtttattagtaggctctctttaattcctcttcgttttagtttctagattccctgagaggcaagcctttgttttctcttttctttgtttttcacatagctcataatatagtactgaacaataattgcttgtttgactcatgtaagtggtatctttgatgtattcatttattgattcagcttactttgtaaattttatttctaattgacgcgtgatacacatatttttagagtacaatgtgaggtttagatacatatatacattgtgtaaggatcaaatcagggtaattagcatatccatcatctcaaacatgtattatttttctttgtggtgagaacattcacagtcctctcttctggctattttgaaatatacagttcattattgttaactgtattcacccaactgtacaatagaacaccagaatttattcctcctaacggtacgatagtacccattgaccaacctctctccatcctccctccctgctaccttccctaatctttgttaactactattctgctctacttgtatgagatctactttctttagattctatctgagtgagattatgcagtataatatttgtccttctgtgcctggcttatttcatttaacataatgtcctccaggttcatccatgttgtcacaaatagcaggatttcattcttttttattgtaaatagtattccatcgtgtatatatacattttttaaatccattgatttgttgatgaatgcttaggttgattccacatcttggctattgtgaatagtgctgtgataaacagagtataggtatctcattgacatactgattttatttcctttgaatatacagtcatgcattactaatgatggggatatattttgagaaatgtgtcctcaggcaatttcatccttgtgcgaacrtcagtgtactgacacaagcctaaatggtatagcctactatacacctaggcttagggtatagcctattgctcctagggtacaaacctatatagcatgttactatactgaatactgttgtaacacaatgaaggcagttataacacaatggtaagaatttgtgtatctaagcatatctaaacaaagaaaaagtacataaaaataayagtataaaagttaaaagatatcagtatagaagataaaataacagtataaaagataaaagatatatacctatatagagcagttatggatagagcttacaggactagaagttgctctgggtgagtcagtgagtgagtggtgagtgaatgtgaaggcctaggacattaccatgtactactgtactgtagactttataaacactgtacacttagaagactacactaaatttacaaaacaatcttgttctttaataataaattaaccttagcttactttaactttttttactttataaacttttaatttttttttaactttttgacttttgtaataacaattaaaacacaaacacattttacaggtatgcaaaaattttttatatccctattctataagcttttttctattttcatttttttttaactctttaaacatttttgttaaaaacttagacacaaacacacacattagcctaagcctacacagggtcaggatcatcactatcactgtcttccacctccatatcttgttccactggaaggtcttagggtcagtcacacacatggagctgtcatctcctatgataacagtgccttcttctggaatacctcctgaggacctgcctgaggctgttgtacagttaactttgttttaataagtagaaggactacactctaaaacaaaaagaaaaagtataatatagtaaattgtaaaccagtaacatagttgtttattatcattatcaagtattatgtatcatacataattgtatgtgctatactggcagtgcaggtttgtttacatcagcatcgccacaaacatagagtaatgcattgcactaccacattacaacactatagtcactaggcgataggaatttttcaaccttattataatcttatgggaccactgtcgtatatgtggtctgtcattgatggaaatgttgttacctggtgcatgactataaagyaagtagtgagattcctggatcatatggtagttctacttttaatttttgtgaggaaccttcatactgttgaccataatgattgtactaattgacattcccaccaacaatacatgagtatccctttctccacatcctcaccatcatttgttactttttgtcttttttgataatagctattctaactggagtgagacgatatctcattgtcgttttgatttgcctttccataatcatagtgatgttgagcattttttcttttttctttctttttttttttgagacgaagttttgctcttgttgtacaggttggagtgcaatggcgccatctcggctccccacaacctccgcctcccgggttcaagtgattctcctgcctcagcctcctgagtagctgggattacaggcatgcaccaacacgcctggctagttttgtatttttagtagagacagggtttcaccatgttggccaggctggtctcgaactcctgacctcgggtgatccgcccgccttggcctcccaaagtgctgggattatagatgtgagccaccacgcccagccctgttgagcattttttcatatgcctattaaccatttgcatgtcttcttttaagaaatgtctattcaagttttatgttcattatttaattaaaaaaatgttttgttgctgttaaattgttagagtttcttatatattctggatattaactcttgtcagatgccaagtttgcaaatattttctcccactcagtgggttgtccctttgctgtgttgattgtttcctttgttgtgcagagctttttagtttgatgtactcccatttgtctatttttgctttgttgcttgtgcttttgaggtcttacccaaaaaatccttgcctggaccaatgtcatgaagcatttcccctatgttttcttctagtcgttttatagtcctagatcttacatttaagtctagtccacttttagcttatttttatgtatgatgagaggagtctactcttattctcctgcatgtgggtattcagttttccagcactatttattgaagatatcaacttatgttttcttcatatactgttacatgccactaacttgggatatacagagataagagatggccctttcatttaattttccagaaccctgtgtaatacatactgtgtgatagatatgcatgagatactaggaaagaacatagaatggtccctcttctgtggggggctcattgggagcactttctagaaaattctgaatattcaaaccccttagaaattccaggagggttatactttgtcaattgtattctaaaatgtatagagaaaattaaatactaaataagaaaatagtctaaaaaggataaggaaaaaacatctaacattaccaaatgtaagaatttattaatattataaaatcataagcatataattttgtcagtggaacagattccagaaatagatccatctaactgaaaaaaaacttaacatttattgtttttatcctattctcatttataatatattaaatgttaaaatagtgacactttatattgatgacttaagggtgaagtgagtctggtttagtcatgcttttctgttgatgatataaatttgcatcagcactgccagacagtttggcattatgtttcaaaagccacatgaattactgtatatcgtttacctcattattccacccctgggaatttaccttaagtaaatactatgaaaagagaaggaagctatatgcttcagtctagtattggaaatacatttttaatattgggaaaatgaaaacaatttattcaacaatattaaagttatagtctatttgtggaatcttttatatccatagaagataaaattacatagttatgattgtgtggcagctggaaaaatgattttggattgatgacaaaggaaaattcaaatttgcatatgtgcatatgatcgatgactagggaaaaaacaaggaaaaatgaaatckggaggagtacaatgttctaggtaaggtgggttttctttggggtttttttgagacagagtcttgccctgtcacccaagctgtagtgcactggcactatctctgctcactgcaacttctgccttctggattcaagcaagtctcccaccacagcctccagcgtagctgggactacaggtgcacaccaccatgcccggctaatttttgtattttttggtagagacaggttttcaccctgttggccaggctggtctcaaactctggacttcaagtgatctgcctgccttggccttccaaaatcctggaattacaggcatgagccactgtgcccggccacagggtaaggttttatgtttttctttttctttcttccttttaagagaagggatctcactatgtttcccaggctagattcaagcttttgggcttaagcggttctcctgcctcggcctcctgagtagctgggactgcaggtgtgctccacagcacctagtttttttaaaaaatcaaggtataatccacataccataaaattcaccttttttttttttttttttttttttgagatagggtcttactgtgygcccaggctggagtacagtgatgcaatctcaactgacttggcttcgacctcctgggctccagcaatcctcctacctcagcctccctagtagtggggactacaggcacacaccaccacccccagctaagtttttgttgtttttttgtttgttaatttgtttgttttttgagacggagtcttgctcggtcaccaggctggagtgcagtggtgcgatctcagctcactgcaacctccacctcctgggttcaagtgattcccctgcctcagcctcctaagtagctgggactacaggcgtgcaccaccatgcccagctaattttttgtattttagtagagacagggttttgctgtgttggtcaggatggtctcaatctcctgacctcatgatctgcccacctcggcctcccaaagtgctgggattacaggcatgacccactgcacctggccagtttttggattttttgtagacacagggttttgccatgttgtccaggctggtctggaactcctgagctccagcaatcttcccatgtcagcctcccaaagtgctggaattacagctgtgagccaccacacccagccaattcacccttttaaagtgcacaattcagtggtttttacaatcatcactgctattaaatctagaacatttttcaccccaaaaagaaacactgtacccaatacagccactccttgtttctctctgcccccgcccttgacaactactaacctactttctgtctctgtgtatttgcctgttctggacattttatacagatggaataatatatgtggccttttgcgattggcttttttcatttaacataatgtttctaagtttcatccatgttatagcatgtatcagaagtgcatccctttttgtggatgaataatacttgacgatatggatatatcccattctaaagttgatagacatttggattgttttgactttttgactattattaataatgttgctattagcattcatatataagttcttttgtgaacatatgctttccgttctcttgggtatatgcctacaagtggaattgctgggccatatggtaactctatttttaactttttaaggaactgccagactattttccagaatgcctgtaccattttttgttcatatttaaatgtcaattcatacaataatatttgtgtattttttatttgcagtcattggatttgttgaagaattgtttttaatagagcagtggagacttttgtcaaattttgaatgactgaggagtacagaaataagtagtggttacagtgaagaaatagaagctataattaaagatttgtttcctctcttgttccactatcttggagcctgtggaggcctgccaggaacaggactcttaaaggcaaatatgtctagaaggctgctrtcaaagaccatttttgctggctataagcagggtctctggaaccattgggaaccacagctgttcttaaaattgaaggtgtttatgcttcaccagctcttgctatggtcactcttttaaatttttgccattctaatgagtatgtactgatatctaattgagattttcatttgtatttcctgatgactaacatgttgagtattttttcatgggctttttggctattcttttatcttcttcaggagttcacagactgcaacccccaagccaaatctggctcatcacctatatttgtaaatagttktattaggacgcagccacacccattcatttatatatggtctatgtggcttttatgccaaacagcagagttgagtaatgagaccatatggcatgcaaagcctaatatattagctctctggcctattcataggaaaatgtatcaacccccgatactttctgtggattgtttgttcaagttttttgcccatttaaaaaataagcttatcttttttagttttgagagctttttaacattagggctataagtatttattcattcattcattcattcattcatttatattcccagcctttggcttctctctttcttttcttttttaataagtagagactttgggccaaacttgaggactacaactcagaagcatagatttaagttgccctgaatatatactccctttgtttaatttttttcttcttttattttcatgattgtgtcttttgaaaaacagaagtttttctttcaatgaaatcaggtttatcgatcttacctttattttgagccaccgtgcccagccatcaatcttaccttttatggtttatgttttttataaactcaggcctacctaagaaatcttcccctaatccaagtttgcaaagattttctccactgttttcccctaatatttttatagttttggcttttagttttaggtataattcatgtctgattaattttggggtatactgtagtgtgaaataaggtcaggattttttttttctataattgtatcttcttgttctgtcactatttattgaaaagattgccctttcccaccccattaaattttgtttgaatataatcaattgattatatatatgtgagtctatttctagactcctttctgtttcattgatctgtatttctttttgtttttaatggaattcttgttgcagattagaatttctgtccttaggatagcaacactgtattactgcagctttattgtaaaccttgaaataagatactctgagccctctaattttgttcttattgaaaatttttgtccattttaagttcttcacatttccttataaatattagaatcagcttgttgatttccataaaaaatatctgctgggatttttgttgatactgtacaatatacagataaaattcagagaattaagttcttagcaatattgagtcttccaatccatgaacatggtatatttctccatttgtttggctctttaattttttttctacaatcttttatacttagcatcatgcaggcttgcatatactttgatttatcccaaagtattcatgctcttcattgactcttgagaattttctctatagacaatgatgtcatctgtggataaagacaggtttacttcttttctaatctatatgccttttatttctattttcttgccttatcacactaagatctccagtatatgttgaatagagaacagatattcttccttcattctttcttttcataggaaagcatttggtctttcacttgcttttgtttgttttgttttgttttgttttgttttgttttgtttttaagagacagagtctcactctgtcacccaggctggcatgatcatagctcactgcaatttcaaacttctggactcaagcagtcctcctgcctcagccttctgagtaaataagactacaggtgcacgctaactgttttttaaaatttttttgtagagacagggtttcgctatgttggctggctggtctcaaactcctggcctcaagcaatcctcctttctcagtctctcaaagtgctggaattagaggagagccatcatgtctggcatctttcactattaaatgtgatgttagatataggtttttcatatttgtcctttatcaattagaaaagtgccaagttttaagaacacttttcccaaattttctgagagattttatcatgggtattgaactttatcaaatgtttttcctgtatgtgttaggatagtcatttggatttttttcttttggtctgttaatatggcctattttattgattcatttctaaaaacaaaaccagaccatcagtcttacgatgaacacaatgaagtcatatagtattagccattttatatattattgtgatttaatgtttcagtgaggatgaaatgaaacattacatttttgttcaggagagatattaatctgtagtattgttttgttgcattgtctttgatttagatgtgtgggtaatgctggcataaaatgattttagaagagttcctcctctgtttattggaagagttaacgtagaattgattaaatgtctagtagagtttaccagtggagttaactggtttctggatttttccttatggggaaggtttttaactaccactttaatttatatagtagattcagggctrtgtaggtaatctttctttttgagtgagctttggtagtttggttttcaaataattcatccatttcattgaagttgttgaatttattggcacagagttgtttataacatcccttttctgtctttaaacgtctaaagcaattgtgattatatctcctctttcattcctaatattagtaatttgttttctcatttttttctggatcaggctggatagaagtttaacaattttattaatcttttcaaggagccagcatgtgatttcatgagacttcaaagtatcttagactgcttgacatttttctaccagtgacttgagtttggttttttccagtcttttcatcctctgtgtatttcgttttatagttactattactctatattcaagttcattaatcatcttgtgcagtatcttacctgcttctaaccccatcagtcatattttcatttcaaatattttcatctctaaaagttacatttccttttttaatgtacattttctttttttctttgcagtcacattttctttcacatccttaagcattaggagcatctatatgatagcggttttaaggtcccatcaattttatcacccatcatttggtgtctgtttctattgattaattgctctgtggttatagggcatgttttcctactactattaaatttttattgaatactgaacattgtaaattttataaattgtgcactttattttttttccccctttaatgagtgttgtctgccaggcacgttggctcatgcctgtaatcctagcactttgggaggccaaggcagctggatcacttgaggccaggagtttgaaaccagcctggccaacatggcaaaactccatctctacaaaaaatacaaaaattggctggacatggtggcatgtgcctgtaatcccagctactagggaggctgagaaggctgagacaggagaatcacttgaacctgggaggcagaggttgcagtgggccgagatcatgccactgcactccagcctgggtgatggagtgagaccctgtctcaataaataaataaataaataaataaataaagagtgttggatgcttacaggcaatttaggaagacttctcagtactaaatacatgagctgccagattgaaaaagcctcctgtgggccaggcgctgtggctgacgcctgtaatcccagcactttgggaggccgaggcgggcggatcaccaggtcaggagttcgagatcagcctgcccaatatagtgaaacctcatctgtactaaaaatacaaaaattagctgggtgtgatggtgggcgtctataatcctagctactcaggaggctaaggcaggagaatcgcttgaagccaggaggcagaggttgcagtgagcggagattgtgccattgcactactccagcctgggtgacagagtgagactccatctcaaaaaacaaaaaaaaaagaaagaaagaaagaaaaagtctcctgtggaactcgtttggatcctgattcatagaaaccaattgtaaaaaatctgaaacaatcagggaaattagaatgttgactcaagttttgataattttgaagaattgttattaattttttaaatgtgataatggtatggtgtttatgtttttttaatgagtcctcatattattaaaactatatttacagaaatggcatgatatctggaacttggttcacaataatccagtaacaaagcagggcttggaaaaggtataaatgaaacatgattagccagatgtgaataattgttgaagctggataataagtacctgtagtcgttatttattttttwctaattttatatgttttaaaaagcttagaaatttgttttgttttttttttktttttttttttttttttttttttgagacagggtcttgctctgtagcccagcccaggctggagtgcggtggtgtgatctaagctcactgcaacctctgcttcccaggttcaagtgattctcctgcctcagcctcccaagtagctaggattacaggcatgtaccaccacatccagctaatttttttttgtatttttttttttaagtagagacagggtttcaccttgttggccaggctggtttcaaactcctggcttgaagtgatccacctgcctcgcctctcaaagtgctaggattacaggcgtgagccaccgcacccatccacagaaacatttttcttgatatcaatttttttttttttttacaaaaggaaagtgtccattaagtacaacatagtggatgaaagcagactttcagcaagttatatcattgtgacattttagagcactgaaaacaaaaacaagattctataaacttccagagaacaggagaaacagtcacacacaaagaattaagtagagtggcttcaaacttctcaatagccacattagcgtccagaagacaattcaataatgcctccagaatgttgaatgaaaatggcctagaattctgtctctctaggcaaactatctagtgtaagagtagaatgaagtttttgtatatacaaagtctcaaaaatttgtacctctcccacactcttcctgacaaagcagctgagggactttctctgccaaaatgagggagtaaacttaaaaagaagacaaggtgggatattgcaaacaagagatacaacacaggagggagccgaagagaatcccttgatttgaggtgaagcagctgtacacaaggcatagatggcagctattccaaattggagtatatgctaaggctctgggagagatttctcaaaaaaaaaaaaaagttacaaaacacctattgtgtctgaaaatcttaagaggagaattcgataactggcaaaaagttcagaattgaattaacaataagaacaataaaaacacaaagcaaatgttagcatgcacctacagtcccagctactcaggaagctgaggcagtagaatcacttgagcccaggrgttcacgttcagcctgggcaacatggcaagacctgatctctaaaaagaaaaaaaaattttttttttaactaagcaaatgagaaaacaagacagcattttgggaaaatgttgtgcaggaaaggaaaagtaatcagtacttctaattgtwcagctataaatggaatacatgttcatactataattgtagtcagatcaataatcagtgtttactatattggcacattgggaggatggaggaaacaagtggatgtgggagagagctaaattcttatctcctgtattaggaagtcaaaaggttatgcctggaaactagaagtcaaagtatagacataatcrtgttatttggagctatagaggtaaataccacaggaatcaggtatagaaattgaaagtggccgcctgtgaggaaagagaaatggtgtctatgtaagggacttgttttatgtaacaaaattatcgaactgtttgaatctaaatgtgcatgtgttatattaattttgatactttaaaaagaaaaacatgcagtgaatgatggaacttgaattcttgttataccactgctttgctgtccccaaggacagtattgagttgactaaccatgggatctctcctgaaaagaggggtaagtgtagccagtaaggagctgatagaatggagatgaaggaagaaaggtggctttacattgttgctgtgaaggggaagatcaggtttggtcagactggggagtgagggactgcaaagaaggcagatatagttcattacaatcaagctgattgagagaggaagctttgttgtattccattattagtatagatcagatgtcaaaaaaaataaatgagtcaagcagactggctgtaaaagaaatcaactgccaaaaatatattcagacttttgaaaagtatcaaaagtatcaaacttatgctattatataagcatgtaacataatatatacacatatataaatatacacacatatatcttatatacacacatataaggtatatgtgtgtatatatacakatataagatatttatgtatatatacacataaacatacgattattttaagtttgaaattgggaaacaggaatacttaactatagcttttttcttttgaaatcattcatttgatctggctagaaatgtgatacatttacttctatgctaagttagtaccaagtattaaatatatgatgggcattacatcattcatttttaaaccctttaattataagatttagtttttattcagtttcataacagatcttaaccattcacaaacatgagtatttccaaacaaaggtagaatcttggcaaaatagttttgatagttagacatttgtaaaatttgtaaaatttaagacatttgtaaaatttgtaaaatttaagacatttgtaaaatttaagatttcaacatcacagttaatcctaaatattgtactgtactttattaacctccatatgttacacttccagtataaattgagaaaggtaagttgaatagtgttagttttcataaagcttgaaaccaaaaaaaatctttttgggttatcagtctttagctctacaattttaggaatgtatttcatgccatcagtttcatttctggaaatcctgtttcagcatggaaaaatacaaaaaagtaggacagatagttccttgccaataaaactttccagagatacagtcatcaagtaatgagtaaattgaatgaaatatggttccttgttaatgcccttgcagataagccatcagattttttacataggcagtaatgtcagttaaaatggccctgtatttgaccagtctgtgctagtgatctgaggctgggatttgtccttggacaacataaaccaggagacttctttaaactcaasctcaaaaacattttttagcaccataactcatactaagtcacctaatatccatgtactaatgataggctacatactgcttatccagtttttcaggggtgttgtckttgttgtggtcgttgctgttgttatttaagacggggtcttgctctgttgcccaagctggaatgcagtggttagatcatgactcactgcagccttgacctcctgggctcaagtgatcctcccacgacagccttcctagtagctgggactaacaggtgcacaccacgacacctggctaatttttgtatttttttgtagagacaaggccttgagatgttgcccaagctggtcttgaactctgggcttaagcaatcctcctgtctctgcctctcaaaatgctggaattatttgtgtgaaccactgtgcctggcctgctttccagttagcaagcaaaatattgaccaagggaattttttttatttcattttattttattttattttattttattttttgagacagagtcttactctgtcatccaggctggagcgcagtggcacgatctcggctcactgcaacctccgccccaggttcaagcaattctcctgcctcagcctcccaagtagctgggattacaggcgtctgtcaccacgcccatctaatttttgtatttttagcagaggcagagtttcaccatgttggccaggctggtctcgagctcctgacctcaagtgatctgcccacctcggcctcccaaagtgctgggattacagacgtgagccaccgcgcctggcaggaatttaattcatatgttaattgtgtgtgtgtgtgtgtgtgtgtgtgtgtgtgtgtgggtttgacttttagccttgtagacaaagtaaataagacagtaaatagctttatggttatctgtctttgcaaagtgttgccaccttggatttagatcttgaaacaagtttattgtcaacaaagaccatttcaggatcatcatcctttgtcatcagtctttaataaagttttcaaaacttttttcagttcagagagctgtatttccttggatatgtttgtcatgagcatcacatccaaaaatttttcccttacataaaagttctcattgatactttaaatggatacaactcttggaaagttatttttaatctgtgttctcatcaactacaaagaagaatgccacaaattatttaacattttcactcaattcaccttttaagtttgtagccataccactaacatgctgaataactaattttggttagatgtgtacatgcaaatcatgctattacacccaaattctgctgcattcactaaacattcttttataaattttaccattgataagagactttgacaccctaaagcttttaatcttaatatgtaactgcatttcacaggtataccactcattatttacttaaaaaaataacagtttaaatgtgtactttctgtttattcagttttcattatttgtctgttctacaggcccatcataattcttactagagtttgtttcctgatgctatcttttgacacagtcatatcttgtttgtatattttaccattagaaatattcttgttgaagtcaaaataaaatataaagacaaatctccaaatttaaagcattttatttgggaagcaagaattgcaattcaggacatataggtaggtggtggtcttcagtatgttcaaagaacaaagagaaggttgggagttttattagaaagaaaaatttgggggaaaggacttcctattcaataaatggtactgggataactggctagctatatgcggaagattgaaactggaccccttacttacaccatatacaaaaatcaactcaagatggactgaagacctcaatgtaaaacctaaaactgtaaagactctggaacctaggaaatgccattttcgacataagaactggcaagatttcatgatgaaaacaacaaaagcaattgcaacaaaagcaaaaattgacaactgggacaattaatctaaagagcttttgcacagcaaaagaaactatcaacagaggcaacctacagaatargagaaaatatttccaagctatacatctgacaaaggtctaatatccagaatctataaggaacttaaagaaatgtacaagcaaaaaataaccccattaaaaagtgggcaaaggacatgaacagacacttttcaaaagaagacatacatgcgccaacaaacgtgaaaaaatgcccaatatcactaatcattagggaagtaaaaatcaaaaccacagtgagaatggcttacaccagtcagaatggctattattaaaaagtcaaaaaataacatatgctgacaagattgcagagaaaagcgaatgcttatacactgctggtgggagcataaatcagttcaaccgttctggaaagcagtgtggcgattcgtcaaagatctaaaaacagaactacgatttgacccagcagtcccactactgagtattgtaagaatttgccagtaaagtgatctggacctgaagatttctttttcagaaggttttacctaaaaattaaatttaaaaaataattatagctttaaataattatacttttagggtacatacccaaaggactataaattgttctatcacaaagacatatgcacatgttatgttcattgcagcactattcacaatagcaaaaacatagaatcaagctgagtgcccatcaatggtagaccgttaagaaaatgtggtacgtatacactatggaaaactatgcagccataaaaaagaatgagatcatgtcctttgcaggacatggatggaactggaggccattatccctagcaaactaacgcaggaacagaaaaccaagcaccacacgttctcacttacaagtgggagctaaataatgagaacagaagaacagaaatagaggaacaatagacactgggacctacttgaaggaggagagtgggaagagggagaggttcagaacaaaaaacctgtcgggtactgtgcttagtacctgggtaatgaaataatctgtacaccagacccccacgtcatgagtttacctatataacaaatctgcacatgtaccccgaacctaaaattaaaatttttttaaaaaagaaaaactgtacatattgtgtgccaaaaaagcttattggcactagagaagctttggggagctggcaagctctttttgatgagtgaccctctcattggtaggtgaaactgctctgagggttacagcaggccatttctgcatccaggcttgcagagaattgcattgttggagcaatctatataccctgagccctttttttcccctggcccctcaactgatttagttggatatgataagaaggacccaatttgtataatgaactttcacattctcttccacaaagaaatatgcttttttcttttgtttgttttgaaattaatgtctcttgttctctttcatgaacacaaatatttcactttccttttgattctactgtaagaaagacagcagcctatagcacccatagatattaaggaaatactgtgaacaactctacacatattaatttgacaacttagatgaaatgagccaattctttaaaaactgtaaactaccaaaactcactcaagatcaaatagataacctgaataaaatgataattatttttaaatttaatttttagcttaaaaccttctgaaaaagaaatctccaggcccagatcactttactggcaaattcttccaaacataaaggagaaaacagttattttaaggcctgcatcaccttaataccaaaaccagagggcaatataagaaaagtatagaacaatatccttaatgaacctagacttaaaatttttcaacgcaattttagtaaattgagccaggcatggtggcgtgtgcccataatttcagctactcaggaagctgaggtgggagaatcacttaaggccagcagtttgagaccagcctgggaaacagagcaagacccctaaaatatataaaatatatattaaatatatatatatawaaatatataaaataaaattagcttgatgtggtggtgcacaccagtaatcccagctactttggaggctgagacaggaggatcacttgagcccaggagttcaaggttacagtgagytatgatcacaccactgcactccagcctgggtgacagagcgagaccctgtctctaaatttaaaaaataataagcattgttaaatagttgactttttaaaaaatgctgcattgaccaacatgattgtgaaaattatacttactaatttgctctctctgatactgatacatgttgtagatatagtagataattgtaggcaacttattgttaaagcgaaccttgagtcgttgctagaagactgatgagtgtccttaaggttgttctcttacggatgtgagaagcatatggtacattcttggtatatgtggatggcgtgggctttggaagaggggtgatatatttaagtgatagaatgatggtctagagatagcaccaaaaaggcaaaagttaactccctttagcctggcaagtgtaggtggtttctattggaagagactttgaggaaatggggacatttaaagaaaaaaatgtttcattaaagtggtaaagtaatttgtataaaatagaaattctacaggactcagtgaagggattggcagaggagtgagcaccaggatgaatcatgattggggaggcaaatgattgaggtggacaggaatgaagatctgggagctaaatgcaacaggagggttaaagtagatggtctcttggacggctaggaattgacagaacattcttctgttttataccgtcaaagtttgaccaatacttttccctctgcctctaatgttctacttccatccccctcagctttttctgcctcattcgtatttaagattctaagctcaaatgtttgtatttcactcctggaaatcatccctggcactccttcctcaccttttccccagcctcagaccccttcttagcattcccataccacctagtacacatccttatcttaaaacttactattttatattaaaattacttttttgttaattgtttatttatcagtagaaactatttcttagcccacatattcatgtttcatagttcaggaacacaaatcagtgacaaacttctacgtaatttagcccaaagaaattctttgtatttcaaaatcactttgtattccgaaagatatcagccttcttcatctcctcacaatctttcatggaatcataatttctgaagaaatctgtgtgtgccttctttcttggtttagccacagcaaacagagagagatctgtaacccccagggatacagcaaatgttccaacaatatgaaattgcaaccatatctaaggtttttgccaaagcactagaagccgtagtcattgtacttgataggtatgtcaccactgcccttcctggccgatagagaaatggaaaaattacttttttttctaacttcctctacaaaatactatgatcctctgaggcagagggtgtttttgtgggggaggagggggttattttttttgaaacagagtcttgctctgttgcccaggctgtagtacagtggcacaatcatagctcactgcagcctcaatatccggggctcaagcagtcctcctgcctcagcctagcgagtagctaggacttcaaggtacatgccaccatgcccagctaatttttttttttaaattttttgtagtgacaggttctcactatgttgcccaggccagtctcaaattcctgggctcaagcaatcctcctacccctgcctcccaaagtgctgggattacagtgtgagtccctgttttagtcctctgttttcctcagggaggtagcacagagcctggcacagagctggtatcaacaagtatttgtttaactaaacaaaggagttaggccactgtgttttgattgtaagatgggcgtggcaagtgtctggactttctctgactctttattcaagggccaatggcagtacaggcctatgagttaaagcaaactctgtggccagtcagcagttcattgttaaggccaggaacactacctttatcctcagtgtctcctttgtttctagaatgcagaggcagtctttggcaagtgatgaatggtaagggaacacttcctggcatttatgtttgagcaaccaggattttatgtgatgctgttaacagtgatcactgcacatagtattcatcccaccgcattgctgtcatttgtctttgtacaaagatcttcatgatgaatagatttgaaggactttatattatggttcatgaacagaattctcatcaagacccaggcatgttttattgagtttgtgccttggcagttcttctggataaaatatttcattgaccttcccagagacatcgtaaaacatctaactgcagtttttcatttttgtgttagggcattcattatttgacggtctttgggtgcttaaacaattccttctgctttctttgtcattgaaactgaactttcagcgctactattcttttcctttggagtatatccttcactttcttccttaaggttttgcttcaaaactccattttatttttcattcctccattaggcgtttctccattgggattttcagaggactagagagtcttttcacaaagaacttgaactcacaggaaggagatgataaggaaacttaaagtaattaccttttcatcttagttgtcctccctcctcacccctcttcatctccagcatagaactaggaccttatttttcccaagcaactaataataagaatgcagaaaatgttatgtccttcttttattcatcagaccattagcattattaggcatattagacttgcatactatttatacacacactatgctaagtagtcgatagaaaaatgaagaagatagcccgtgcttcaaggaatgcataatctaatcaggatgatgaatgaaaggtcgcaagtaccttctccaagtctttgctttaaaaaaaaagaatcttcgaattagggtaatatactttcctgatggccttgtataatcacattatcttctctatatgaggaacttagcacagttactggcctgtagtaaaaggttcagtaaatggtgattatgctaatggatagatacagattaagtagaaacatgaagaaggcagtggacatggcatctctacttagacgtaaagaaggaatactgggggaaattgtatatacaaaggcataaagcaatgaaatataaggtacatttagagaaccataagtaattggtctattggaacagagggatgaaggaaggaagcttagtaagagatgaggcttccaaggtaggcaggaatttagacaattaatgggggacattaatcttgtaaggaatgggggacattccttacaatcctgtagggaatgggggacattccttacaatcctgtagggaatgggggacattccttacaatcctgtagggaatgggggacattccttacaatcctstagggaatgggggacattccttacaatcctgtagggaatgggggacattccttacaatcctstagggaatgggggacattccttacaatcctctagggaatgggggacattccttacaatcctstagggaatgggggacattaattaatattaagcaggggagtcttaaaattagttartcaatgctaaagaaaatttctcatatactacctgtctctcttaggtctcacttgccctggaacctctgtcagaaacttacgacagctaccatccacttcctaccactgacatgacagaaaatgtgcttttatctaagcagggattcagagagaatactgaacccagcagtacccagtttcaggttccatcaaggcctcgcgacatacataccatcaaaattgatggaaaagagttagcagccaacagcagtagatcaaccactccgaggtaattaccatacctaataccagtcaatctgtcagttaactgcactgtagttgtgatttctgtctttcatttatggttgagtaaaagattaacagcagagagaggcacagtcctcatttagcagataactgtgaagcacccactctggtcctggtttgatactaggtgctgggcctagaaataagtaagacatgatttctgttttccaggactactcacaatctagcggagaagccaacatacagataaatgactaaatgatatccagatgcaggacagatgttcatgagggaaaagagggacagggagctattctgtgaaacagaatggaataagaatcaggttttkgttttaagtaattatttatgaagcatttgctttgtgtcaggctctgctgagctcttcgttttattgtctcatttaagctatgactccctcactgtaggtaaagcatctattatttctataatttgggagatgaaaaagagatttacaaagttgtattgcaaataagtcacgctttttgaggtccaaactaccttgccaaaaccactggtctactttctgtctctgacaaaatagaatgttaccataatagattatatattgctgatgttctccctttttaaaaaaacaggggaaaagaccatgtatgctttgcagagaaccctgatacaataaaggattcttcctttggactacagcacagtcttaattcaggacagagtttagagtctgtaactctgaaaggcagagctccacggaagcagatgtcccttctgaacagttctgaattccagcctcaaattagaacagttgccaagagtcacagtgactcatgcattctttcttcaaacaacctccctaccaaggatcttctttcaggtatgtatgtrtttgtgaactgagtcagactaaactacgtttatgggattgctctgcttgttagccagcctacaaagagaaccargactcttgtttgaactaagtcaaataaaaacaggcagtcttgctagagtccagcatctcacaccatttaaagacagccgtattaaaccaccaaggtatttctgaataattactcagtgcttataattgtaagtttggggaaggaatcgtttaaaaggaattggatatgaggggaaaacctttatcatagaaaaggattagtccttactttgtcccaaataattcaaggcaggtaaggtttttgtctcgtgatcagcatttatttatcccactgtatggagactagtacaaaatccatttcacattctgaaaactcttagtcttagtgagaacgttcagtacacagctgctgatcttaatcctgggaattaaataatgactgtggccaaatagaagaagaaaggagacagtttacccttataagggcttagacagaaataaaaaagcaaacaggaacagaattagattacctcatgttaaggagtggtataataaaagcagttgacttacattacactgtaatggtcaaccatgtatctctttgacctcaagatcataacaggaatttgtctacatccctacaagtaaaatttccaaaattaaaatatctgtagcatcagaaaagtcttttaaataactatttgggtacataatttacattcttaaggacattttgtaaaagaacaaaaacattttgtttatagtttttcaactgaattgtcttagattccctactttaaaaaatacacgggccgggcacggtggctcacgcctgtaatcccaacactttgggaggctgaggcgggcagatcacttgaggtcaggagttcgaaactagcctggccaacatggtgaaaccctgtctctactaaaaatacaaaaaattagctgggtgttgtggtaggtgcctgtagtcccaactactcaggaggctgaggcaggagaatcgcttgaactcaggaggcagaggttgcagtgatccaagatggtaccactgcactccagcctgggcaacggagcaagactctgtctcaaaaagaaaaaaaagaaaaaatatatatatatataaaattccaaaaaaaagtatatatatatatatacactccaagattataaactattaatttcagtctttaatgcaaagactacattaacaagaaggaaaattgacccaatgtactcagcacttgtcagctcacttgtgtagacttgagcaccagactttaggaaagatatttgttgactcaataagcagttatctattcagcactaccaaatgtctggcgctcttctaggtatcagggctacagtagttaaatatatatatataaactcctgctgtatggattttatattgattggaagacaaatgatagactaaataaataactgtgtgttacttggtgatcatggcaatggtgatatatgaagccaggaaggtgagagaaggggatgttagttttacataggttggcaaaggaagacctcattaagaagataacattaagctactcaggaggctgaggtaagaggatcacttgagcctaggagttcgagtccagcctggacaacatagcaagatctcatctctaaaaaaaaaaaaaagcaaagagaaagaaggtaacattaaagatctaagggaaaggagatgtgttccttctttttttttttaacttttatttttttttatttacttttaagttctggggcacatgtgcagaatgtgcagttttgttacataggtatacacgtgccatgatgtttgctgcacccatcaacctgtaacctacattaggtatttctcctaatgctatctctcccctagccccctacccccgacaggtcccggtctgtgatgttcccctccctgtgtccatgtgttctggagaggagatgtgttccttctaaggaragtaaccagactggtaaaaggagcagcaagagatagcctggagaaaacagctgccacttattgagcactrattatgtgctagctactatgccaagtgctttatatacataatcttacaaaagtcacgtgaggtaggcattatccccattttaaaatgaaaacacaagctcagacttaggcagctcctgtgctatcaaagggggcagctctcatttattactgtctcagactttaaggtaaagtcctatgcttcatcttactctaggttcattgtttacctaggcctgttttgttttgcttttgctttttaaatcaagaccttgctggccagctattcaagccaaacaaaatatgccatgcacaacccatgggctgtcaatgtgcaacctcttcaataagagttactaggatctgtggatttaaaggtaaaacaaggtagatttcaactcggtctgagttagtagtctgacttgtgcacaaatgggagagggaccacatcactgtaaatggtcaagtgtgggctggataaccttctgatgtgacttttacagatggggttaaattatcaagtacatagctggataaaatcttttttttttttcaattttattttagattcaggaggtatatatgcaggtttctttcctgggtatattgcatgatgctgagaattggggtatgaatgatcctatcacccaggtactgagcatagcacccaatagtttttcaacccttgcccccatcttccttacccctctagtagtccccagtttctattgttaccatctttatatccctgagtacccagtttttagctcccatttataagtgaaaacatgcagtatttagttttctgttcctgacttagttcgcctaggataacggcctccagttgcactggataagatctttaaaggtgtcttscaaccacaagattaagtgggccactttagtaagcatagagttgaggtcatgtgagggacacaacaaatacataaacctaatgatttttctggtctttgatgtactaataacataccagaatagagggtacaaagctgtatcagtcaaccagctagtatttatgaaacactaactacacagcaggatcctgttcttccccattttcaaaataacaatgatacattagattcttctcatacttcacatctctgactatcatatcctttaaycagccagagaaaaatttgctttaaaaggttaatatgattagattctgcctaccaagataatcttcctgtcttaaggtaagcattaattacatctgcaagtccgggcaagctggctcatgcctgtaatcccagcactttgggaggctgtggtgggaggatcacttgaccctgggaggtcgaggctccagtgagtcatgatcatgccagtgcactctagcctgggtaacagagtaagaccttgtctcaaaaaaaaaaaaaaaagttttaaataattacatctgcaaaatcctttcatggtaatacctagacaagtgtttgaatcactaggacgaagtatgagtatatgaggcaatggggatcttggggtagccatcttagaattctgcctatcacagtgagtgagctttattttttagtttagttgtattgccacatcacacattgaacatatgatatttaagattttggattttttttaagtttttaagctatattttgacctctttatagtaacaaatattagatgttttgatgtttatggactttgggaggccggggcaggaagatagcttgaggccaatagttcaagaccagcctgggcaacatagcaagataccatctgtacaaaaaaataaaaaataagccaggcatggtggtatgcacctatagtctagctacttgggagactgagatgggaggattgcttgagcctggaagttcgaggctgtagcgaacttgattgtaccactgcattccagctagggcaacagagcaagactctgtctctaaacatatgtaaataatgagtaagactatggatatatttgacttgttttttttcttggcctaaccatcatattttatttttagaaattataaaattagactaggagttgggcactttctaagcacctgtggaacctcaagaaaataataatacctcctgtatctgttggaacaatactattgggcctgagcttttttattttatttgtttttatttagaaacagaatctcactatgttgcccaggctggaacactgtgactattcataagtgtggttatagcacactatcacctcaaactcctagactcaagcagtcttcttgacttaagcagtcctcctgcctcagcctcccaagtagctgggaccatgggcacatgctgccatgcccagctagtactcagcttttaaaaagaagcctaagaactaagtagggtcatagatagtatagcaattaaaagcataggatgtggaatcatctggttatagatgtattgcgtgtacaacttggtcaagttacctactctctgcctcaattttttatctggaaaacaaaagtagtcatagtacatatctcagaggactgttgggaggattaaatgagtaatacacgttaaaatacttagaatagtgcctcgcatgtggtaaacattccataagtgtattctctgatttgtgttgctgctattgttgtgggaccccttaagggatggggtaaattttacctatcagaaagtcggaaaagtcaggttttatcctgacttttccattaacctgctgtgtgagtcatggaagctttttagcactcttttcttcatccatagaagtataaatttgatatctggatacaaaaacaatatataaacattactaaccttattaggtacaagcaccagttggaagagccagtatatggatataacaacccccacaagaggtgagtctccggaatggagacttcattcattgttacaatgccagcatctaaaacagtgcacagtagaaactcagtaaacatctcttttgcgtaaatgtcctcaaggaattctcaagctaatggggaaggcagatgagcaaactattacagtacacactagtgagtcctctgatagaaggaaatgcactgaatattccaaatgtttctgctgcattttggatttttctgttttctgcatttaccctcttcagctctgttagaacaaggcaataaactgcgtaatgccatggtgatttctgcaatgaaatcaagcccagagaccagcatgttgttggaccaagttcatcctcctattaatgaagattctcttagagcatcaacacagtaagttacaggatagacagaaccttaacagttcayttcttaatagttgttaacctgtgttttttgtcaagttatggactaggtaatcttggaaatgcttatcaaataattcctgatgtggtgggaaagaagcctacactaggagttaagatactaaaaatcttatcctagcactggtactggcagcatgtgtaaatgggtaaattctttactgtctccgaactggtatccttggatgtaaartggggatattctctccctacctcacagaaatgagatgggattctactgtaggaaagagctttgcaaagtgtaaagttttatttaaggcagttaagtctaaagtatgttaaattttctgagtcagaccagctgcatrtacgaagtgattatgatttagattttttccatctgttagccactcagtgagaaagtatttttccacaccttaggatcagagccttttctaggaatcgrtttaaagaccacattgaagatcacctcctcccttcaactgagaatacattttggagacatgacacaaaagctgataccagagctatacagctgctattaggcaggtaagcactattaactggctttcttccttttaaactcttcctccaattcatagtatgcattgttatcagattcatcttcctaaagtaacatgtccttagactaaccaagcccttccctattccttaaactatcactattgcctactaaataaaactccatactttagccctttacttttggcttcacttacagaatgatcccattctaccttaccgttcttatctcccaactctttccccaataccagtgttaacatggtatgatgaaaagagcatggattttaaacagatacaagtggaaattcgaggttcatctctaattagctttgtggccttaagcaggtatctctgaacttcagaggcattggtaaaattggaattgtacctaactttgcaaaattgttgtaaggattaaaaatgatgtatatagaggagtaacacaatgcttgacacataatattttgcggggtttttttttgttttttgtttttttgagacggagtctcactctgttgcccaggctggagtgccatggtacagtctcagctcactgcaacctcctcctcctgggttcaagcaattatcctgcctctgcctcccaagtagctggttctgcaggcatgcagtaccacttttggctaatttttgtatttttagtagcgacggggtttcaccttgttgtccaggctggtctcgaactcttgacctcaagtgatccactcgcttcagcctcccaaagtgctgggattacaagcatgagccacagtgcctggccaacacatagtatttttactgttggtagctgtttatgttaacattgtgaataacatgtgccctccaaccagactcatctatttattgtctcttgaataaaagatactgtctacattcatgtcttggaaagttaatagggcatagtggttaaaagcaatatgtgccgaagttttaaaggttatgggagaacatgtgtttcaaaggctccaaaagctcacgcctataatcccagcactttgggaggccaaggtgggcggatcaccagagttcaggagttcgagaccagcctggccaacagggtgaaaccctgtctctactaacagtacaaaaatgagccaggcgtggtggtgcagctactcaggaggctgaggcaggagaattgcttgaaacctggaggcagaggttgcaatgagccgagaacatgctactgcactctggcctggatgatagaaggagtaagactccatctcaaaaaaaaaaagaaagaaaaacaaaacctccaattagtttgatctgaagtttagatttctattacagggaagtaacaacacaacatactccagaaaatacttgcaaaccgaacccagcaacatataaaaataattttatactatgaccaagcaggatttattccaggaatgagagttagtttgacacctgaaattcaatatatgtgatccaccattatctatatctgtatctataaagagagagagatagacagatagatagtttttttttttttttgagaccgagtctcactgtatcacctaggctagagtgtaatggcttgatctcggcttactgcaacctctgcctcctgggttcaagtgattctcctgccctagcctcccaagtagctgggattacaggcgtgagccaccgcacctggcctcaccatatcaatagaataaaaaacaaaaaccacatgattatctcaagagatgcagaaaaacagccagtcatgatggcacacgcttgtagtcccagctacttgggaggctgaggcaggagaatcccttgagcaacagtgagccatgattactacactccagtctgggtgacatagtgagatcttgtctcaaaaaaataaaaaatcaaaaactataaaacattgttgaaataaagaagatttaaatacatggaaaaaatcctatgtttatctttcaacacaatatcagaatcccagctgacttctttgtggaaattgacaagctgtttctmaaattcataggaaattgcaggggacccagaacagccaaaacaatcttgaaaaaaaagaaagtaggactcacactttccaattttaaagcttactacagaacaacactaatcaagtcagtgtgatactggcataaggatagacatataaatcaatggaatagarttgatagtttagaaaaaaacccatctgtctgtggtcaactaatatgagttagacaaggctgtgaagaccaatcaatggggcaacaaatagtattttcaacaaatggtgctggaacaactggatagccccatgcagaaaaaaagaagttgggaccaggcacggtggctcatggtgtaatcccaacattttgggaggctgaggcagtagggtcatttgaggccaggagtttgagaccagcctggactacatagtgaaacccccatctctacaaaaaataaaaataaaaaagattagctaggtatggtggcatatgactgtagtcctagctactcaggagactgaggcaggaggattacttgagcccaggagttcaaggatacaatgagctaggattacaccacygtattccagcttcagcgacaaagcgagacctgtttctaaaaaaaaaaaaaaaaagttggacccttatctcacaccatgtacaaaaattaactcaaaatggatcaaacagcccctctcccctctcccctctcccctctccctctccctctccctctccccctccccacggtctccctctccctctccctctccccacggtctccgtctccctctctttccacggtctccctctgatgccgactgaagctggactgtactgctccatctcggctcactgcaacctccctgcctgattctcctgcctcagcctgccgagtgcctgcgattgcaggcgcgcgccgccacgcctgactggttttcgtatttttttggtggagatggggtttctctgtgttggccgggctggtctgcagctcctaaccgcgagtgatccgccagcctcggcctcacgaggtgccgggattgcagacggagtctcgttcacgcagtgctcaatggtgcccaggctggagtgcagtggcgtgatatcggctcgctacaacctccacctcccagccgcctgccttggcctcccaaagtgccgagattgcagcctctgcccggccgccaccccgtctgggaagtgaggagcgtctctgcctggccgcccatcgtctgggatgtgaggatcccctctgcctggctgcccagtctggaaagtgaggagcgtctctgcccgcccgccatcccatctaggaagtgaggagcgcctcttcccggccgccatcccatctaggaagtgaggagtgtctctgcccggccacccatcgtctgagatgtggggagcgcctctgccccgccgccccgtctgggatgtgaggagcgcctctgcccggccgcgaccccgtctgggaggtgaggaccgtctctgcccagccgccccgtctgagaaatgaggagacctctgcccggcagccaccccatctgagaagtgaggagcccctccgcccagcagccgccccgtctgagaagtgaggagcccctccgcccagcagccaccccgtctgggaagtgaggagcgtctccgcccggcagccaccccgtcccggagggaggtgaggggtcagctccccgcccggccagccgccccgtccgggaggtgaggggcgcctctgcccggccgcccctactgggaagtgaggagcccctctgcccggccaccaccctgtctgggaggtgtacccaacagctcattgagaacgggccatgatgacaatggcggttttgtggaataggaaagggggaaaggtggggaaaagattgagaaatcggatggttgctgtgtctgtgtagaaagaagtagacatgggagacttttcattttgttctgtactacgaaaaattcttctgccttgggatcctgttgatctatgaccttatccccaaccctgtgctctctgaaacatgtgctgtgtccactcagggttgaatggattaagggcggtgcaagatgtgctttgttaaacagatgcttgaaggcagcatgctcgttaagagtcatcaccactccctaatctcaagtacccagggacacaaacactgcggaaggccgcagggtcctctgcctaggaaaaccagagacctttgttcacttgtttatctgctgaccttccctccactattgtcctatgaccctgccaaatccccctctgcgagaaacacccaagaatgatcaataaaaaataaataaataaataaataaataaaatgtatcaaacagctaaatggaagagctaaaactataaaactcttagagaaaacataaaggtaaatctgtgaccttgaatttgggaaatgattcttagatatgacaccaaaagcacaaacaagaaaagatacataaattggattccatcaaaattaaaaacgtatgtgcttcaaaggacactatgaaagtgagaagacaccacagaaagggaaaaaatatttacaaatcttacatctgatacaggacttatatatagaacatataaataacttatatgacttaataattaaggaacaaataatccaattaaaaatatgggcaatggatctgaataaacatttgtccaaaaaatatattaagatagccaatatggctgggcgtggtggctcacgcctgtgatcccggcactttgggaggccgaggcaggcggatcacgaggtcaggagatcgagaccatcctggctaacacagtgaaaccccatctctactgaaaacacaaaaaaattagccaggtgtggtagcaggcgcctgtagtcctagctactaaggaggctgaggcaggagaatggcatgaacccaggaggcggagcttgcagtgagccgagatcgcgccactacactccagcctgggcgacagagtgagactccgtctcaaaaaaaaaaaaagccaatatacacatgaaaagatgcttgacaccatttgttatcgggaaatcaagacaatgagatactacttcacacccactaaagtcaaatagtctatgcattaatgaggatgtggagaatttgaaaccctggtacactgctggcaggaatgtaaaatgatgaagctactttggaaaatagtctgtccactcctcaaactcgtacctatagatttaccatatgacagaaaacaataaaatttttaaacaaatgtttaccatgtgacccagcaattcaactcctagctatatacccaagggaaactacaacatacatctatgtaaaaatgtgtacatgaatgttcataccagcattattcaactggatagtcacatgcaaaaaaaaaaaaaaattaagcaaccccaatattgaaacaacctaaatgtctatcagctgatgaatggattaagaaatctggagtatccatacagtagagtagtgttttcacctttggccatcaaggtgaagtactgctacatgctacagcatggatgaaccttaaaaacatgctaattgaaagaagccaggccgggcgcagtgtggtagctcacacctgtgatctggcaggccgagttgggagaatcgctttagctcaggagttcaagaccagcctgggcaacagggggagaccccatctctacaaaaagtaaaaaattagcctggtgtggtggcgtatgcctgtggtcctgcctactcagaaggctgaggtaggaggatcagttgagactgggaggttgaggctgcagtaagctgtgattgcaacactgtactccagcctgggttgcagagcaagaccttgtctcagataaaaagaagccagtcacaaacaaatatatatacttttatttcatttagatgaaatgtccaaataggcaaatctatrgaaacagaaaatagattaatagttccttagggctgggagtgatgatgggtagggtagtgatagctgaaggttatggagtttctttttgagatgatgaaaatgttttaaaattgagtggtgatggttggtcacatttatgaacatactaaaaactattgaattgctcactttatttatttagtctttttatttttatttttttgagacagagttttgctttgtcacccaggctggagtgcagtggcgcaacctcagctaactgcaacctccactttctgggttcaagcgattctcctgcctcagcttcccgagtagctgggattgcaggcgcatgccaccatgcccagctaattttttgtatctttagtagagatggggtttcaccgtgttggccaggctggtcttgaactcctgacctcaagtcttccgccggcctcggcctcccaaagtgctgggattacaggcgtgagcaccatgtctgaccaaattgctcactttaaatgggaagattgtatggtatgtgaattatatctcaataaagctgtttatggaaaaagaaagatcaagaactcagaacagtgaatgaaaaaagatacaccaagacacataattatgaaattttaaaatactgagagaccatattaaaagcttccagagagggagaaagaataaaggtcacatatacagtatcaggaattggaatgacatcagattttctaccagttccttggaattcagtgcagaaatgtcttaagattctgaagtaaaattattttcaacctaaaattccactcctaatcaaactattaatcaagtgtgagggtagagtaaaaataactttatttatccatagtctcagaagtttacctgtcttgcactattcctcagaaaaccacaggaaaatgtcttctactgaacatttattttaggaagaaagagtaagacatatagtctaagaaataggggctacaacacagaagagggatagaaggagatttcgggtatatgtcatagagagagagcaaacagtccatattggggcatccctgacttcagtagggatgtttctaaggagtgcagaggtggaggggaatggaacatatattgaccaaattttaagttctctcaaaggaaattttcaattctcttgaagagttcactcgtaaagtagtaatagagtcaaagaaaactaagcaaatgaaaaggcagttaatttataccagggataattagttgtataagaaaaaaggtgcaataaattatactgtacttggctctgatacaatattaaccctgaaaattaatttaaccaaaaaatttgtaatataactaaatagagaagatgggtaaaagggaaatgtgtggttcaagtgtaatggtataagagagtgggtccttcatttttcataataggaagttcatagatcatacagaaaagtgaaaaatcagaaaataacagtatattaatgtgtcacttcaaaatatagaggtaaagccaggcatgggggctcacacctgtaattccagtattttgggaggctatgtcagatcgtttagttcaagaccagcctgggcaacataatgaggcccagtctctacaaaaatttttaattagccgagtgtattggtgtgcacctgtaatcctagctactactagggaggctgagacaggaggaacccttgagcccaggagttcgaggcttcagtgagctatgatcacaccagtgcactccaggctgggcaataaagcaataccatgtctctaatacaatttttaaaaagagaaatatgaaggtaaataccagaagaagcatccaagggaattgaaagtgatcacctctgaggagtcagtcagctactgttttttattataagccttgtagtcgtatttgactttcaaaataggtatgtgtattcttttatttaaaattatgtctaagaagaaaaagaaaaggatagtcatgagaataggcttattttatggccaaggaacacaggcaaattttagcccttttagtatatcatagacaggtgaataaattcaaataaatattaatttcaaaaaagagtaaaaagtggaaaagtcttcataacttttaagggtgtacaaagtggggaataacaagcaactggaaaaattttcataactttaagggtatacaaaggggagygtatatgtgacaaataatacagttatataaaagaacaaaaagtaaagtttcaaaatgaagtaggtctcaaactcctgggctgcagaagctgcagagaggccatgtcgactgggaagttgttagttggattatggcagttaggaagctgttctgacctttgagagttactatagattgatggttttcaaggagggggtgatttttccccaccccaaccccatgagacatttacagtgtctggagacatttctcggttgtcacaactgggaacgtgctactggcatctggtaagtggaggccagggatctgaaatgcataggacagtcccaaagataaagaattgtctgacccaacatgtcagcagggctgagattgagaaaccctgctgtagcctaaggaaaggtgaggaagggaatgttaactatctgcttgttcaaaataatataagaacactgtctaatttgaaggtagtgattatatactattttcttgagaaattaaggaaaaaagtatagcagctagcttgaaaggaagcaacatggaaagaaataataaataaaatgtgtattacagtacctggcatcatgttcattaagaaatcattaagttcactaacaggtgcttattaaatgttaattactgtaggagaaacagaaatatatgcatactttgccctcaaggagcctaaactttgagggaaaatatggaatttatacaaggacctgaaagaaagttagaaagtaaaaattgctatcaaaaaagggaccagtaatcccagcactttgggaggccaaggtgggtggatcacctaaggagttagagaccagcctggccaacatggtgaaaccccatctctaaaaatacaaaaattagccaggcatggtggcaggcacctataatcccagctactagggaagctaaggcaggagaatcacttgaacccaggaggcagaggttgcagtgagcctagatcatgccatggcactccagcctgggcaataagagcaaaactccacctcaaaaaaaaaaaaaaaaaagataccagcgtgggatttcaaaaaaaaaaggagtatttgttccttcaaaattctgagtttatagttacttatatgcttatcttcctattagtttgtaaactgtgttttattcattttttgtattcgatatagaactaatatcaccataattagtcctaaatacacgtatttttgtttattggaagtgggtgtatctgtgaattttttgcaaaatcgatatataatatttaactcattgaattatacccttttttctccctatcagactataaataatacaagagtacagattgtgttagcttagccacctctatatcttccaggacctagcacataayaagtgaccaataaatgtttgttgaatacatgaatgagatcacaatcagtgtcagtagtgtgtttctgaatactggttgttagcatcccagaggaggggtagtataattgggaaatatttattcagtagtcttttgtttaatgtgagtcttttgtttaacatatctccttccacatttagaacctcagaaagtttcactaaagagagaatagttcagctgaaacttctattaaaattcttctgctttgttttcttatctctgcagtgctgaattatcccaaggcaatttctgggatgggctaggctctcctccagattccccatctcctgggagtgatgtgtattgcatcagtgagctgaatgaccctcagtatgaccagagtcttctggagaatttattttatacagcacctgtaagtcactgaacctgaagcattgagaattagagaacaaatgtattaataatattagtagctgcaggcatgacagctatgcattttacataacttaccttacttaattttaatgacaacctcaagaggaaagtattatcttcattttacagatgttgagacaggcctagtaggatttgaatattttgtgcaagaacatatagcaaataagtattagagccagaattcaaattcacatttgcctgagtccaaagcctatggtttaattaatatattttatggtttccttagagcttttataaggaagagctgatgtagttataccctcagaaccatccttaactggtatctgttaaaaatattccaaaaacacttcttactcacaggagacaaaactcttctggcctgtaagacagggattctcttttctggcagctctggttttttcaaagttcttttttctatcaagccttatgctcttttcattggcttagcatcttctagaatctatacatactatgtccaatccctgttccacaagtagttatttatatgtgtgaaggttcatactcctgattttccttttctccaggtcaaaaaaagatactgaaatacaaggtagtttatatcagcccagtagtaagccagtgagggctaccacagtttggaagaagcagggaaaacttttacatgagattgtggggaaaaaccataatgaagaataaagggttttaactgagattgaaagatagtgttttgagaagcagagaaaagatacaaaatgggcgtagaaagaatgacctgtgcagaaaaacacatttttgcgctacaagggacccaattgactagatgagaatttgtgtggaaaaggagttgataaggcaggctggcacattgcagccaatctgtgaaaggcttttcatgtcaggtgaagaggaaatcacatatcacaagagtgttctaggaatctgtgtctggcaaccctacagtggggcagactgaagagggaataacgagaagcagataggaagccactgggctacgggaagcatgagacagaatgcctgaatgagagtacctgcagtggaattggacaggaggtggtggacgggaaagacattaggaactgttaggatttcatgacttcccaccttcacagtcatcactgatactgtgttccctataggataaagaggaaatatttattacacatttattacccattttctgtgtgctagggacttcacatcttatctgtcatttattaaatacttgggggggttgtttgttttgtgtttttatggctgaaactaatagaacactaaatactgtttttaattcattattttgtttaattctttttttttttttttttttttgagacggagtctctcattctgtcacccagtctggagtgcagaggcatgatctcggctcaccgcaacctccacctcccaggttcaagccattctcttgcctcagcctcccgagtagctgggattacaggcacatgccactgcacctggctaatttttgcatttttattagagacaggccttcaccatgttggccaggctggttttgaactcctgacttcaagtggtccgcgcacctcagcctcccaaagtgctgggattacaggtgtgagccatcatgtccagctctgtcttatttaattcttttaccagccgcatgagatagtattatctctcttttacatagcatgaaacaaaagcttaaagaggttaagtacaaataattaagtggcagaactggaattctcaccgtagtctatctgacaaaaagcctgtatgtttttctactagaccacagtgtgtcatcagccttgagcatggtgttagaatctgaccctgactgacctctctaacttcatctcccacttataccctttacccactggagtctccagccatactggagtctcaagccacttgccactcctgaaacattttagctcttttttttttttttctgtagagacagggtctcactatgttgtccaagttggtctcaaactcctggctcaagcaattctcctgccttggcctcccaaagggttgaaattacaggcatgagccactgcacctggccttagctcttgtatctccctattttttgctggtactaatccttctactttgaatgttgaaatgctcttagccatctgataaacttcattcttgaaggagaggatgtggagaaataggaatgcttttacactgttagtgggaatgtaaagtagttcaaccattgtggaaggcaatgtggcaattcctcaaggatctagaactagaattaccatttgacccagcaatcctatgactgggtgtatacccaaaggattataaatcatgctaccataaagacacatgcacacatatgtttattgcggcactattcacaatagcaaagccttggaaccaacccaaatgtccatcagtgatagactggattaagaaaatgtggcacatatacaccgtggaatactatgcagccataaaaaaggatgaggtcatgtcctttgcagggacatggatgcagctggaaaccatcattctgagcaagctatcacaaggacagaaaaccaaacaccgcctgttctcactcataggtgggaattgaacaatgagttcacttagacacggggcggggaacatcacacaccagggcctgtagggtggttgggggctgggggaaggatagcattaggaggaatacctaatgtaaatgatgagttgatgggtgccacaaaccaacatggcacatgtatacatatgtaacaaacctgcacgttgtgcacatgtaccctagaacttaaagtataattaaaaaaaaaaaaggaagtaatcttacaatcatgctgttcaatgtagctagtagccacatgccactgcttaaattagttgacattatataaaatttaaaatttatttttcagttgcactagtcaataaccatttttaaaagctgccactcaaaggataacttaaaggcaaaaatcttkgtaattttgccttttaaaagttgtattgtggtggtgtggtggctcatgcctgtaatcccagcacttcaggaggccaaagtgggcagatcacttaaggtcaggagttcragaccagcctggacaacatggtgaaaccctgtctctactaaatatacaaaaattagccagatatggtggcacattcctttagtcccagctacttgggagactgaggcatgagaatcactggaacctgggaggcagaggttgcagtgagcggagattgcgccactgcactccagcctgggcaacagactgagactccatctcaaaaaaaaaaaaaaaaaagttgtattgcttccaagaagacattcttatcatgcttatttaaattaatttgtccccctatcacagatcaacacattataccccctgacatgctgaaaaaagggtaattttaaatgatagacttaaaataactttgggtttgtgtcctgaatttatattatattagcaagctttatgtctttttttaaaaatggaacccagtaactataatgccatcttctctctttattttacattttgtgatgtagagggctgatcagtccattgcagtagctgccttttctcaaaataaaaatgaattgcaaggggcttagccattggttctctcattaagaaaatttgtgactatagtaaacagttcattttagcaagattaaaagcagaatgaatcatttgtagtatagaatggtgacaaaaagtagtcttggctgggtacggtggctcatgcctgtaattccagcactttgggaggctgagatgggcagatcacttgagcccaggagtttaagacctgcctgagcaacatggccaaacttcctctctacaaaaaatacaaaaattagtcaggtgtggtggctcatgtctgtagtcccagctacttgggaggctgaggtaagaggatcacatgagccccagggaggtcagggttgcagtgagctgtgattgtgccactgcactccagtctgggcaacacggtgagaccctgtctcaaaaaaaaaaaaaaaaaaaatagtctatccagatgattaggtgacatcgtccaagtcatttggcctcaaactatggtagaaatacaggctttgaagcccatggagatcaaaatctggctttacagctatggatcataaacaagctgccttacttttttcagctctgattttctcacttgtaaaaactgacataaaggtaccttgtcggaatgtggtgaatattagaaatatacatgtagcattaagcataataccagacatatggtctatagtcaataaataatagttattattattgagaatttgaaagaagaatctaccttcctttatttgctttgaactgaacttgtaggttatttttgtgaacttcagattatttttgtataaccaggagaaatatgggattatctccctggtgtcagttctttctttaagagaatgatgtatgtacagagaagaacttgctttctttagagaaatgtttcgtagctacaattcccaaagcagcagtcatttagtgtctctgtttcttcctctccatagaaatctgataccagcatcagtgatttcctcagtgaagaggatgatatcgtcccttctaaaaaaataagccagtcaacagctcttgccagatcatctaaggttctggagtcaagtgatcataagctgaagaagaggtcagcaggcaagagaaataggtgagctgctctgactgtttatttaaaggtaaacacaaagraatgttattttcacaagatctcccaaggtgaaatgacccatttgcccagcaccatcagagtgattaattacaataactcagtaaacattgtaattcttaaaaatgtaataatctgaaaagatggctaaatttgttttccataggttttggggaacaggtggtgtttgattacctgaataagttctttagtggtgatttctgagattttggtgctcccatcacccaagcaatatgacactgtacccaatttgtagtctttttttttttttttttgagacggagtttcgctcttgtttcccagactggagtgcaatggcacgatctcagatcaccgcaacctccacctcccagattgaagcaattcttctgcctcagcctcccgagtagctaggattacaggcatgtgcccccatgcccgactaattttgtatttttagtagagacggcgtttctccatgttggtcaggttggtcttgaactcccaacctcaggtgatccgcccaccttggcctcccaaagtgctgggattacagttgtgagccaccacacccggcctccaattagtagtcttttatccctcaccttcttcccactcttgccctcagtttccaaagtccattgtatcattcttatgcctttgcatcctcatagctttgcttccacttatgagtgagaacatatgatatttggttttctgttcctgagttacttcacttagaaaaatggtctccaattccatctaggttgctgcaaatgccattatttcatttcctttttatagttgagtagtattccatatatatatatatatatatatatatatatttgaggccaaatgacttagacgatgtcacctaattatttgggtagactacttttttttttttgagacggggtctcactatgttgcccaggctggagtgcagtggcacaatcacagctcactcatatatatatattcatatatatatattcatatatatatattcatatatatatattcatatatatatattcatatatatatattcatatatatatattcatatatatatattcatatatatatattcatatatatatattcatatatatatattcatatatatattcatatatatatattcatatatatatacacacacacgtatatatacatatacacgtatatatgtgtatatatacatatacacgtatatgtgtatatatacgtgtatatgtgtatatacacatatatacgtgtatatgtgtatatacacgtgtatatgtatatatacatacacgtgtgtatatatacacgtgtgtatatatacatatacacgtgtatatacacatatacacgtgtatatatacacacacgtatatatgtgtgtgtatatatatacgtgtgtgtgtgtatatatatacacacatatatgtataccacaatttctttatccattcattgattgatgggcatttaggctggttccatatttttgcaattgcaaattgtgctgctataagcatgcaagtacaagtatctttttcatatagtgacttcttttcctctgggtagatacctagaagtaggattgctgggtcaaatggtagttctacttttagttctttaaggaatgtccacactgttttccatggtagttgtactagtttacattcccaccagcagtgtaatagtgttcccttttcaccacatcctcaccaacattctttttttttttaattttttattatggccattcttgcaggagtaaagtggtatcgcattgtggttttgatttgcatttccctgatcattagtgatgttgagcatattttcatacgtttgttggccatttgtatatcttcttttgagaattgtttattcatgtccttagaccactttttgatgggattgtttgattttttcttgctaatttgtttgcattccttatagattctggatattagtcctttgtcagatgtatagattgtgaagattttctcccattctgtgggttgtctgtttactctgccgactgtttcttttgctgtgcagaagctttttagtttaattaagtcccatctatttatctttgtttttgttgcatttgcttttgggttcttggatatgaagtctttgtctaaaccatgtctagaagggttgttccattgttatcttctagaatttttatgatttgaggtcttagatttaagtccttgatccatcttgagtcgatagttttataaggtgagagatgaacatccagtttcattcttctacatgtggcttgccaattgtcccagcaccatttgttgaatagggtgtcctttcaccactttatgtttttgtttgctttgttgaagatcagttggctataagtatttggctttatttctggattctctattctgttccattggtctatgtgtctatttttataccaataccatgctgttttggtgactgtggccttatagtatagtttgaagtcaggtaatgtgatgcctccagatttgttctttttgcttaatcttgctttggctatgtgggctcttttttggttccatatgaattttaacattttttttcctagttctgtgaagaatgatgagggtattttgatgggaattgcactgaatttgtagattgcttttggcagtatggtcgttttcatatttttgattctaccaagataggtataatttaaatggttaaggaagaaagcagaattctaggttgtatgtgtactgtgatcacaactgtgtagaaaatatgcataaggaaagcaaatgagaaggaatacacaaaagtgacaatagtagttacattagaatagtgggtaactgaaataaggtctgtgtcccttctagaaaaacctaaatttggagtttcagtttctgtactcatatgtattgtataatgtatgtgtgtgtatatatgttgtgtgtgtataagtgtgtgtatatatatgtatgtatatatatatgtatgtatgtgtgtgtgtgtgtgtatatatctatatagtatttttaaattttttttttacctgggagcatagattcaaattaccctgaatatacactctcaaacctttagattatattttttttttacattttttgagatttcttgtactataggaccagaattctgataataaaagctgtttccaatccttgataacttgtgartcaagatacttggctgggtgtggttgttcacacctgtaatcccagcactttgggaggctgaggcaggaggattgcttgagtccgggagttcaagaccagcctgggcaacatagtaatrtctcatctctacaaaaaatacaaaaattagccaagtgtgatgacccatgcttgtggtcccagctacttgggaagttgaggtgggaggatcatttgagcccaggaggtcaaggctgcagtaagccatgatcgtgccactgcactccagcctgggtgacagagcaacaccctgtgtcaaaaataaaaataaaaaaataaaaacttgctgccctccctttttcctcatcttgcctgtgcaaactagattgtttcatgtgaagcctgtagcagtatgcctcactgcttgtgtgaactcctttcagaaatttggttgaacaacagatgctctcagaaactccagaagatgcccaaacgatgacactaagtgtggatagactggcccttttgggtagaacacattcagtcagaatcatcatcgaaaccatgggagttcytccrgatagtcctcagatgacccctggcaaaaaaagctatgctggtccaccacctaaggtgactacagcaaaaaagcggtatgtctctaacatgagaaagctaaatttgacatttttggaaagtgtgtctgatggtaataatcaacaattgcataatactgtgatttgggatgtgttttcatatgcatcatttaatctacagaaatatattgaatccctgctatatmccaagaactgtgtaagtaagtatgggactaaagaaaattaagatacagactctgttcttacatatcttacagttagcaggagagagaaacatttaaatggctatctataacataaagctttagggcccaaartagatgttttgtattaaaattgctgtgggaacacaagaaagggagcctttgattctctcagacagggttggtggaaggctttgaagaagaggtagggcctctgagtactagaggtcctgaaagtaagatttcaaatatatgttggatttatcagacggaaattaggtttattgtttggttagtttttaatcactttttttttctttttagcactttctttgtagaatatcactttcctgtgggcttttcggaaagcggattgggaaagacagctttgatcactgaggttgttcgactcgcctccagtaaaattacagatggaagtaagagacacactggttttctgcaccttagacattctgactttggaagaatttttgaattcctaattactcatttgactttttttttttttttttttttgacatggagtctcactctttcgcccaggctggagtgtggtggcgcaatctctgctcactgcagcctccacctcccgggttcaagtgattctcccatctcagcctcctgagtagctgggattacaggcgtatgccaccacacccagctaatttttgtattttttagtagagacagggtttcaccatgttggccagggtggtctcaaacccctgaccttaagtgatccgcctgcctcggcctcccaaagtgctgggattacaggcataagccatcacgcccagccaatattttcaaggctgtgcaaccatcaccacaatctaattttagaacattttcatcccccctaaaagaaaccccatacttactagcattcgcttcgcatttccctcttcccccagccctaagcaactgctaatctttctttccctatcaatttgtccattctggatgtctcatataaatggaatcatgcaacttgtgatttttgtgactactgtctttgacttaccataatatttttaagtttcatgttatagtatatatcagtacttcattcctttctatggctgagtaatactccattgcatagatataccacatttcatttatccttttctcagttgctggacattcgtgttatttccacttcctggcaattttgcataatgctgctatgtgaacatttgtgtacgtggttttgtatggactgtgtgctttcatttcccttgggtatatatctaatggtagaattgctgggtcatatggtaactttatgttttaactttttcaagaactgccagactgttttcaacagtggctgcaccattttcccactagcagtatatgaaggttctaatttgtctacatcctcgtcaacacttgttactttccattcttttttattctggtcatcctggtggatgtgaagtgacatcacattgattttgatttgcattttcctgatggccaatcatgtcaagcatcttttcatgtgcttattggccatttatagatcttctttggagaaatgtctattcagatcctttgttcactttcaaatcaggctttttgttattgagttataagagttctttgtatatcctagatacaagccccttatcagatctatgatttgcaaatattttctcccattctgtgggttgtcctttcactctctagatggtattgtttacagcacaaaagtttttaatttttatgtactctagtttatctgtttttttttcttttgttgcttaggcttttggtgttgtcttttttttctaatttgttttaaatatttcagatacagaaaaaggataatataatagacatttatgttcctgccacccaaaattacagccacttttctaatatattctgaggatagctttgccttggttctccagtttgatctatgaatagttagttcatcagtgttaagtttattctctgggaagtagtttgagaaataaaagatgtggtcctaacactcctactacatagtcaaataacttttcctttacagcatagtaacacgggatttttaaatttttactttgctttgttttgtttcctttttgaaatagataatccattcacatggttcaaaattgaacggttgcatccttgcagacaatcaagattgttgcttttatatccttccttaagccattatagatagatagataatgtgtgtgtgtatatatatrtgtgtgtgtgtgtgtgtgtgtgtgtgtgtgtgtgtgtgtgtgtgtgtgtrkatcagcaaatatgtttactccaggggtgtccaatcttttggcttccatgggccacgttggaagaagaattgtcttgggccacacataaaatacactaacagtaatgatagctgatgagcttaaaaaaaaaatcgcaaaaaaatcttacagtgttttaagaaagtttacaaatttgtgttgggctgcattcaaagccatcctgggccacttgtgggttggacaagcttggtttatcccttcccctgcctcccatcccccatgtttctgcaagtrttaatgcaccatacacaagttgagtgtcctttcttcaaaatgcttagaaccagaagtatttaggatttcgaattttttcagattttggaatatttgcatatacattaataagatatcttggggataggacccaaatctaaacatgaaattcatttatgtttcatatagaccttatatgcatagcctgaaggtaattttatacaatatttttaataattttgtgcttgaaataaagttttcactgcattttgactgagacccatcacatgaggtagggtatggtattttccactctggcatcatattggcattcagaaagttttggattttggagcattttggattttgagttttggggttagggctgcccaacctgtacatggttctgcaccttgcctttaacattatatcttaggaatttttgcatatcaggacgtaaagaggaaagaggaaactcacagatgaggaaagaggaaactgagacataaattagttaagtagcttctatgagatcacacagctggtttatggtagaactagaatttcaacctagcaccrtttcgattccaaaatgtgccttaatctgtattgcttcttaaacattattgttgttgttggccacagtgattgatcttctctacatttttctgagaaggattatataggaaatgtggaataagcattgagcaaagaattgcaagactgggttctagttctgattataccacacactaatcatatgccttaggcaaaatcactttcttacctgtgggcctctcttaacaataatatggattagactaggtattaatctggatccctttcaactcttgaaaaaaatcttctctgggacactgttagcaagttatttacctgaatttcttcttcacttactgccttaactcacttttcagtggtaaaaaataatgagcctaagaaacagaattatataagaaatatagtaacagtgcaagaacatacccaagtagtaaggagaaattgaaataggattgtttgtacataaagaattttacagtgttcaaagtgctttttcctttattacctcagttcatcctcccagcacaccaatgaggtgcaggtgttatcttacttccctttcccaggtagagtaaccagataaactgatctagtggatgtgggcttcctggccccagaccttttgttcatagttcctgtgcattgatccacatagcaaggtccagatcctgtccaacagtgccaagaaaagtatagagtcgccagttaatatggccagagatgaatagagagatcagtaggttaaaatgggtcatttgaatgaatgctagaaatagcagattctcttcatacataactgggcctcttgtgaagattcttcagattcatgatccattttaacagccttagcagtgaatggacaggaagatcattttataggtgataaattgtttctgcggtggtaagtaatagtaagtattagaactggagcttaaacttatatcctttgattctggtctcaaattctttttattttattttattttatttatttatttatttatttttgagacagagtctcactctgttgcctaggctggagtgcagtggtgtgctctaggctcactgcaagctctgcttccccggttcacgccactctcctgccttagcctcccaagtagctgggactacaggcgtctgccactgcgcccagctaatttttttttgttgttgtatttttagtagagacggggtttcaccatgttagccaggatggtcttgatctcctgacctcgtgatctgcccatctcggcctcccaaagtgctgggattacaggcgtgagccaccgcacccggcctcaaattctttttatttaccagttaaaactccatggccatgagcacaaactcaaataccaccatcactttatccacttacacttatagttatagcagaaaccccttcctttccacccaagagatagactcctttgcctgacactactagctaacatcagtacctgataacttgtttgtgacagtaagagtgtccagaaggtaggcttatttttgtattatagttttttattccattcttctatttatccctcattgttccacctccaaccagcccccttcttttagtatactacctacaaactagtcttttaaaaacagtgctattacctaaaacccagtgaagtatatagatatgtctccttacacatccagtactcatatgattgacattcatttctcatggcaaagcggassaacatagcactgcctgtcttctgtgtactatctccagagttttctctttgtccctgctcattcaatcctacaaccctagcactttctgtgaaagcacactgactcgatttctgcaggagattttaattaaatttgaaagggaggcaggtggtatcaaggcatraattgatgatgacttcagttgggtggtgtgacatgtctgtgtgtctggttctccttacagaggtgaagttccagcagcgatttgtgtttccagtacagtttggtggcccaatgatagagcactggtggaattccaacctcactttccaaatttatgtaaagaaaactccacagaaaaaggtactttgagtgattttggcctttgccttaccttcacactagggatttggaggatacctaaaattatattcttacctaaactaggaatcttcaggtgcaggcagtactaataatccattgttattattattattattattattatcattattattattactactactaatctctgctgtttgtcatgggccagatataatactaaaggctctacacgagcacactatcaattttaatcaccacaactctgtgaattaggtacattattatatttgttttacagatgaagaaactgagatttagttaacatgtctaagatcactcaatctaatgaaagagccaggacaccatcccaaatctgctgtctttagatctcaagttcttaacctctttattgtgctgttcccttctaaagaaaggtagctatattgatacaggctattagccttaatttgaggttctacttcctgtttgcaggcagaatacataaggtatccaagcccaaaataatatagttgtgagtagcagttttgatcaactaattccaagtttataaaattgcttgcagctggcataatgtaaatcaataaactataacaagcagtttttacttccttcaataaaagagtagtctttataatcttttgacctcttatttggtatggatagcatgaagaacatcttgttttcttttatttttttcagaagacatatacaatacaggtcctttttgaaaaattatagcaaaataggaatggtgggaaaggcacatcatttcataacctcaagataaactctattaacatttcaatgtatttacattgaatcattttcctatacctaattaatggcattttttttcttttcttttttttttttttttgacacagagtctcgctttgtcgcccaggctggagtgtagtggcgcgatctcagctcactgcaagctctgcctcccgggttcacgccattctcctgcctcagcctcccgagtagctgggattacaggctcccaccaccacacctggctaatttttttgtattttgagtagagacggggtttcaccatgttagccaggatggtctcgatctcctgaccttgtgatctgcccacctcggcctcccaaagtgctgggattacaggcgtgagccaccatgcccggccggcattttttttctaattataaaagagttttacgtatttttgtagaaaacttgaaaaataatttttaaaaggcaaaaattgcctgtaattctgtcaccaagaaataactattgttaacatttatgactatctgcattgtctttttccaatgaatacagtatgttgtataattttgtatgtaggttttattcttcctttttatcatttagcatcttgagggtttttattcatttttcttcaaaaatatctatttaatgtttttcacataattttgtatttgaaggtttatgatatatatgagttaatacccttttatcaaacattataacagttaatattattagaaacttttagtaaatgtcattttaatggctacatgttatgccatcatatggatgtgctatataattagcttaataattcctgattattggacaactaggtatatctcattgttaactacttttaacatatacatatttgtgtataagctttttatgcattgtttcttatttctgtgtgtgtgtgtgtgtgtgtgtgtgtgtgacacagtttcattcttgttgcccaggctggagtgcaatggcatggtctcagcttactgcaacctcagcctcctgggttcgagcgattctcctgcctcagcctcctgagtagctgggattacaggcacccgccaccatgcccagctaatttttttgtatttttagtagagacgggggtttcaccatgttggccaggctggtcttgaactcctgacctgaggtgatctgcctgcctcagcctcccaaagtgctgggattacaggcatgggccaccgcrcccagcctatttattatttctttagtacaaattcccagaaatggaattactgggccaaagagcataaatatttaaagcttttaatatctgttaccaaatttgccatccaaaagcatattgccagtttatatttccagctttacgcatatgacagcctcttgtttctccatagccttgatagcattagatatattaaattttacaatttccctagttttaatagcaaaaatttgtgacatctaaattttattttttatttttaatagtgaagttgaacattttgagtaagaattaactcttagtgatagaaaaagataatcttcccaccactttgtggcttataaaaccctctgtaatcttatagagggaagtagcaaaagccagaagagagaccaaaatatgacaaagtgggatctcagagttgtcttagataattaagcttttttcttcctgaatggtttcctttataagccatcatatgttgtcactttaattaagatcacctgtggcttctctttaattaatctaaatgttctctttccttctttctcagccagaagtcattggatctgtgtcactttctttgcgagctgtcattcaatcagagctgctttctttcagtgatcagcttccagtgcaacaagaaaatggtcagtctccatttggccccctcaaggtatgtagatatacattcaggaagtcagaagtatttgctgagtatgcattattggctggcactgaggatatagcagtgaacaagaaaagcaaggtctttgatcttgtgtagcatctcttgaaatagagcagtggaagtactatgaaggaaataaatggtatgatgtgatagtgagtacctgtgagaaagtaggagatggtgatcagggaggatctttctatggaggtgaaatagaaggtgagatttgaagaataagaggagtaagtaaaaaacacagagaccattccagagagaataacaggtgcaacagccctaaagcaggagtgggcttggagtcatcaagggatagaaagttgccagaggatagtgagcaagagagagagtggtagaaagtagggttgaacagtcaggtagaagccatatcatcagagctttgtaggtaaaggtaaagagtttagattttagcctaagatccaaggaaagaatgttgaagcatgggactgacatcatctgatttccattttacaagattactgtgtggagaatagacggcaagaggaaagagggaaatgggctgtggcattagtccagaaaagagatgattgatggtggcttagactagagtaattgaaataaagaaggagagcagtaactaagtgtgcctggtagaatgaattctggtatataattcattggagagagggttatttccttgtattcaggtgagttaggatttcttagatgacagaatctgagcgtgtggcttcagtatagctttgtcctggtgagttttaaaaatcagccgggtgcagtggctcaagcctgtaatcccagcactttgggaagccaaggcgggcagattgccggagctcaggagttctagaccagcctgggcaacatggctaaaccacatgtctactaaaaatacaaaaattagccaggagtggtggcacacgcctgtaatcccagctactcgggaggctgagacacaaaaatcgtttgaacccaggaggcagaggttgcaatgagccaaggttgcaccattgcactccagcctgggcgacagagcaagactctgtctcaaaagaaaaaaaaaaatcatcacagccatgcctaaaacatcctgatggctcccaatcacccaaaggataaagtacaaggcttaatatatgaccctggcctaccatttcaaccttctctcttacagcttctctaccaataactatgtcactctacgtaaagagtcagtaaggtatcatgctggttcatgcctctgtgtttttgttattgattatcatactgccttttcttcttgaaagccttgtctctcttcttggtcttagtaaataccactttgctttaaagacttacacaattattattgcaaaaaattaacatcacctactcttgctatccaagttatagtttttgtctgcctggttcattctgaactacaaagtttaaaatcagaaaggggttataaataggattgatcaactagaaattttttctgttctggctcttttgagagaaatactattctggatagattgctgtctatattcaacagagtaaaagaaccttgctatgtaacacttaggatttcagatcgaagaaacagcaagaaccttttacccctagtaattgagtctcctaacagttagtgaccacttctgttctttaaattcatcatttatcctgcttcccttttcttttttactttttaattatttagacttttttataccctttactgagactccccaattcttactatttgtcacattttctttataattgtctgtctgcctcttctctgcctctctctctctgtccctttatctcctccccccatacatgtacatacacatttttttgtgaactatttgagagtaagttgtacatcatgcctctttccccctaaattctttagtttatattttatgtatttccttagaacaaggacatcatcatgcataatactctagagttacaaaagtcagcatagcattgatactatatctgcaggctatactgagatttcaccaattataccagtgcctttatagcaaatatttttttctagtccaggattatctattgcattttgtcagatcttcctaatctcctttagtcaggaacagttctgcagcctttctttatttttcaatatgctgatatttttaagtaatgccagttattttaaagaatgttcctccactggggttaacctgaatcacttattactgtgatgattgtcaaatggtgatttctaactctaccgtctcttttgcatttattaattggcattctatatagagaagctgtttcttctctcatatttattttatatcaggatggattcatggattcttattcaatagtttataatccattactgttattcattctgatgcttaagttgtcctagatttagccagtgggagcctcttcagctggattctgggtcctttaaacatggctccattcttttctgggaactatcttatattctggcataacttgatcttccaggctcatcttttgttattgataaatcatctgtctagtttttcttagtctagcaagttaatgtatatgcattctgttaatattcttactattagagtgtttgaggatgagttaattcatttcctaataatctgatgttgtttccagcctcaaaattctaattccaattctaaaggacattcttattgactcttctccttttgtgttttacaggtaaccatggagcttattacagataacaaagatttcactggtatcaatactaagttaagtggcaacacccattataccccactttgtgctcctacaagtccaaataaggcactaccagaacttaaccaagatatgacctgtaccaaaaatccacaaaacttaaaccaaattcatgaggaaactgcaaagaaagcacagaacttggtgctccccaaccgaaagtcaccaagccctgtagcaccacatccttcaaccttcgtagctacgccagcctcccataatttagtcaatcagacaaatgggacaacaaaagagagtgctttgctgttgcatgtgctgttgatggtgccagatgggaaagattttattagtggagaatctgagaaacaatcaccatgcaatgtttatttaaattgtaaactcttcagcacagaggaagtcaccagatctgtcatcgcatggggcacaacacaaccggtctttaacttttctcaggtaactttgtacattccatatccattagaggaatataggggtgagagacaaatgcctcccaaattattatttcgtcttaaatctagaatgttcagactagaaggaaccttcgtaattatctggtgtacagattcagtcccactattggatgggaagagggaaaggcattgtcaacattttaaaactgtttgtctttatttctattctgtctgagttcacatggtttctcactgtttcttttgcctgagttttgggattctattcctttctgcttcctctaagactttgattagttaaacctccccatctttctccaatctctccttctttattactttattttatatatttctcctcacatttattcttctgcctacttcagtattcatcttaacttgatttttctgtgtaatgtggtgcttaaattgttttctttcttggtttttgtaactttactgtcttaatttcttcctcactcaaagctgttctttttcagtcattgggccagaaggaaaactaggaaaagggtggtaaccccagtacttcttcctttaactgttggtgcttccactcttactctattgctggcactcttccaaatcaacccacttctccccatggtcatcacatctatcaacacagcttcagcactcatttttatgaagataacttccatgtctacatttctatataagccagacatttccttttagtttgagatttctgtatctaactgcctgctggtcattatcacctggatatctcagaagcagtttacacttggcacctaacacattgcctggcacatactgggtattcaataaagatgtgtaaatgaaagaatgaattcaaacatgttcaaatctgaatttatcacttcttccaaatctgttcttcctctttttgtctgccctaattcaaattataatttactcaggcacctaagtagaacctgttatttgtccttgactctttcttatgtaattacttaccaagtctaatagatactactaacttaattatctggaagacatccctttaccttcactgcactgccactgcttccattcaaaccttcaccctccttccaaatagccttcagactggtatagctgtttcccagctctctttatgtccattgcctcctttatgcaccaatgagaatgacctttctaaaacactaacctgaacattttactttcctgcttaaagcctttccgtgattccctatatccttcaagatggaatgtaaatccttggcatccaagaccctttgaaaactgactgtatgtacttctccagcctcagctcctgccactcttccccttatactagatagcccagctgtgctcagctacttagactttcctgaatattctcttctcctacttctgtatcttcatatgtgctctttcttctgccttgaatttcctttaagccttcttgacaccacttaagcagagctttttgtatcagttaactcctgctcagccttgagatttaaggttactttgtcccagaagtagttgcctgcaacttccttatttggaggttaggttgctgttctagttttactttttttggtttcaaggaacagaaatgtgttcaggatataaacactaggtttgtatccaccttgtgtttcttaggtggatacaaaagtagctctgctctgttttctggtgtcttcctctcatcatcccttttctaatttcacactttttgcctctcatgttttctattggtttcaacattggggcttattgaccttctactgttacagttgtccctacagcttgggtttcttcaaattggtgggcccttgattctaccactaatttgacaaaggtgcttttggcttagatctctgattctctttgtgacctgtctttttcaactatcaactggccaattctggagtaattttatgttgaaaatccagaggagcagttggctttgctctttactgtgacacctgttgggcagagcttttggcacttggccattttattaaatgctatccagccagtgaattggctgccctttgataaaatactcaactcttgtcaagtcagtagcatacttgtttcaaaaacatctttctttcagtggggtttactagtggatcactttgccttagaaagggttggacgagtttggcaggcaccatgtttgacatatttaacaaccttctctgtgtcctcaaagctccacctgtatgagctttgtcatcagagaactcactgttttgtatctggcctttatgtgttagtctctaacagcagactgctacttctcttgaggatacagagtaagttttatttgaatgtctttagctcataacactgtgtgttaacaataggctttctgtaaatgcttattgaatgaaagtataaattaatatttgtctcaggtatgagttttttgtttgttttggttgttcctctctcttaggtgattcctgtctctctgtcttccaaatacctggaaaggcttaagaacaatgtgatggtaattgaaacttggaataaggtgcggagcccaggacaggacaagctgctcgggctggtgaaacttcccctccaccagttttacatgtcattcaagtaaataggaccttttggagtattctttattgtgcatctttaactttgcatggactgaaaaggaattcttttgatttgcaaacatgaatagcccagtaatcccttgaaggactttttccagtttcaacagagttgctgctctttctcctattctaaagcagtcttagagatattgcttaccatgtttcaggcactatgctaaaaaccttgcaacatcaagtcatttaatcttcttgacaaaccctctgaggcaggtacttctatttgcttttttgtacagatgagttaacagagattcagagaagttaaattacttgtcacatacattataaagtgaagggttag

SEQ ID NO: 96662 - DNA, 12335 bp, Homo sapiens
accctgtttaaagtggccactccagcccagtgtggtggctcatgcctgtaatcccagcactttgggaggccgacgtgggtggatcacttgaggccaggagatcgagaccaatctggccaacatggtgaagccctgtccctactaaaaatacaaaaattagccaggtatgatggtgcacagttgtagtcccacctactcaggaggctgaggcaggagaattgcttgaacccaggtggcggaggttgcagtgagctgagatcgcaccgctgcgctccagcctggggcaacagagcaagatgtctcaaaaataaataaataaagtggccactcccaccatcaacagtccccgtccccatccccaaacacacacactcagcactcccaccctgctccctgctttatttttctccatttcatcgatcaccacctgacaagctgtacattttacttattcgcttgtctatttctggcttctccctccagaatgcaagctctgccatgagggtagggttctcagctgttttgctctttgctgtatccccagtgtctagaacagtgcctggcacatgatacgtgcttgctaaatagttattgaatgataagtacgttaagtttacaaagatgagtaggagttgagtaagacaagaaagggagggaataacagatgaaaagggaacagggggagggagagagagacagagaaagagagagagagattgaaattagtgagtttaaggaactaaaagccttcacatccagcttattcccaggaatgcgttaggggtggtataaggcaaggctggcgtaggttgggggccaagctgtgcgaggccatgtcctgtgaggggagacaggtgcctctgacttgggcggatgtgctatgtgctgttacagaggttaggaagattgacccaggaaaaaaggaggaagccatgaactctgctggggagctatcagggaaggtgtctcaaaagaggaggcacctcctcttaggcccagggaaaaagtttcagtgttattctagacgtgacggacattctgaaggcctgttcccacatcccctgtcttaacagacagacactgggttagaaacttttcggtgcttgcacgggtggatttcactttgcatttggtcctcgtagtgcctaacgggacctctgcccacaaaattgctcaagaaagatttgctgggttggattgggattgaggcaggtggagcggccttgaattgtagatgattcaggctcatgagcctagaaccttgggcaccatctgtgatcttgccaggcagagtgacagcctttcctagggtttctccctcctcaaaaaaagaagggacattaaccatgtggaaaaacaagtagattttaaccagttagaaaaagagagtggagagcattttaggtggaggaaaaacaacagaaacaaagacagaaaggaaggttagttcatgggagatttcttaagagtgaacagtttaatggattacatttttcaaagataaaacatgtatttgctatgaagttggtgtgtggattgccttcttagccaaagttatggtgaaagttgaacttgagcctgttattaaccaatagctgtaacatatgtataagctgcatgtgcatgctaggctgacacccagatagaactagtggtgtgtatctttacaggaagctgccaatttacagcctggctgaaacccacttggggctgcttctacttccacatttaattggttcatccatcccatcattcttttattccacaaataattatcagccaccagatatgcattaggggccgggtgcggtggctgacacctgtgaccccagcattttgggaggcagaggcaggcagatcatttgaggttgggagttcgagaccagcctggccaacatggtgaaaccccgtctctatgaaaaatacaaaaattagcccagcgtggtaatcccagctactcaagaggctgaggcaggagaatcacttgaacctgagaggcggaggttgcagtgagccgagatcacaccattgcactccagcctgggcgacagagggagactccatccaaaaaaaaaagaagatatgcattaggccctctgctacctgctaataatataacaaagaacaagatgaacatgtttcccgccctcagatgcctatattctaggggcaggcataaggcacatgagccataaacaagtaagtaaaagagagttaaagatgacggtcagtgccatgaaggggaaaaacagggtgaccttgggtaggtagtcaggggaggcctcctggagaaggtggcatttaaggcgagacctggaggataaagaatcaaggactaagtattctaggcagggggagcaggaaatgcaaaagctgttgttggaaaagctcagagagttcaagaataagtcaattcgagagcacagaatgtcagagcctgcgggcatcctggagcccatccacttctctcatgctggtcattgctcttgtaacatatctgcacacgactctggcctgcataaactgttgcagggagggggtcctacagggcagggagcacaaaataattgacagctctctccatgttacggagcaactgaagggcttatgagttttctttgtttttgaaccttggcaaaatgtaattttaaaaacattttttacaggatagaaccgaggcttcataactgacgaagctgacttcatgagctttgacagatcttgtctgcattttaagtgtttccaacacttaaagattaagttccttttcctgagaagtcgagcgggggcatatcccacccactcagtgcccacctcccatgcgacatttcttttcctaaaaagtggcaaataaaaagtgccttccggggagaggaaactcaccactcccaagacagctcattcaattcccaggacacatgagctgttagaaaaacgttcttggattgagccaaaatctgactgcttagcgcgtccgtgcctggtgggtgttggttccgcaatctggagccacatgggacagttctgattcctcctactccccacagcccttcagagatttggagacagactgggtacccccagccactttccaaacccaagtcagccccaattccctcccttctgtctcctgtgatccagacacctcctaagcctcctcacatgggggcccagggccaggcacatccctctgggtgtggcctgctaggaaccctcgttctgggcaccacagtcctgccaccaccgccaaagatgaccactgcctctgtgatgtgactagtactgggtttgggggtcacgcatgtgattgctgagctgtgttacccaccctgtccttgtgcagttcagctttgggggtctttggacagggcctattcactctcttcttatagaactcaggttatcttgttcttgatcaagatcaggataagatcaggacaagatcaagatccaacctccttagcctgacccccaagggcctttgtgacctacccagctccatctctttggccagtccttcccaccattcctgaattcctactaaacacttgaagaaagtttctgagcagtcacttgggggcatgtcccaccatcctgttaaaaataaccagtatttattgagaccttactatgtgcctaaacatctaccgtgtatcaactcagaacatagacatgagacaggtacaattatttacccaattattcatgatggtgaactaaggcacagagcagttaagaaagttgccagaggtcacacagctaataagtggtcgttccagggcatgggcaccatgcatccagcctcagtccatggtgtgcagcttgtattggcttatgagggctgaccagtgattcctccaggcagagagcaattgtgaggcagattagacttaagactgtaaggagtggttaaggactagggcagagcaaaacacataccacatctatgggggcagctacttcttggcaatggccagttgttgcctgtaggagtccagacccaggattcctagatcttttaaaaagaaactggaaatggaaatgtggaaatgtggatttctttctctttttttttttttttttttttgagacaaagtctcactctgtcccccaggatggtgtgcagtggcgcaacctcggctcactgcaacccccgccttccgggttcaagcgattctcctgcctcagcctcccaagtagctaggattacaggcactcgccaccacacccagctaatttttgtactttttagtagagacagggtttcacctcactggccaggctggtctcgaactcctgacctcaattcgggcctgcctcgggctcccaaagtgctggtattacaggcatgagccactgtgcctggcctggaaatgtggatgtctgtctaggatctcttagcatttatacattggcagctaattccattttgttttttttaaagcaccgtgtagatcaagcaaagcatttcttagggctgtatggagccctgggctgaaagtttataaccaaaaatccagttccactcatcggcaattattggaacactgaaccaacttaaccaactgtaactcagctctcacttttccaccttgtttataaggaaaccacgtgacactctggttagatgtcttgtgaaaatcccaatcattatgtccttactgggtctcaacccttttttgtaaagaacacagatttgacagacagatgggtcaggtgtacgattctgggtcctccttttactaactgtgtgaccttggatgaggtacctaacatctgcccctctgtttccttgcttacacgttgggatcataatgccccatgagattttgtgaagattaaggaataccatgaatgctgaacttgccttgcacttgtagcatagcaaatgttcattaaagaccgagttcttccctcattcctttctgagccatcagccttgtaatcccctccaacaggaaatgccagagtggacagcatatcagatgagttctataacattccagagacaggtaagctccctgtggaaagaaggatcatggaagacttcccggaggaggaggacttgatgtagattttctgccaatgagctctgggtaatcctgttgcatgtgccaataaaccatttgacaaggccagggatatctcagcagcttaggttctcagggtgagggagtttccaggtttccatggctacccttggcagggctttagccctggggcgagcctgcatgtgatagacccagcaaatgacagagaacaagtgtgtttatgtgatgtttaattagttctacaaatagttcttgaggatctataatgggtcagacattgttccaggtgctaagatcagaaatggatcagaggacaattttgccctcaagaggcttccattcaattggaggtggaagtggctggggcatctttaatcaccgaagtgtgaatgattggatccattgccaagaaaggggaactgggaaagactgttttgaggggacagtgagtttagttctgaggttcccaagggttattgggatagaatatcagactctatctatcatctgtctatctatccatccatccatctctgtgtaatcatatttgacgtgtggactgggcagtggggtgagaatggagctggagccagaggagtcgtgcattcactcagcaaactcttactgagcacctactatgtgccaagtgttgggttacagaggcgaagcagacgcagagcctaccctcatggagttctcagtttactggaaagacataatcacaatatttatggtagttatgacttactgagcacctacagggtgccaggcactgtcccgggccgttctgcctgacttatctcatcgaattatcagcgttactaagtgagtctggttctatgattatcctattttacacagataaaactgagacccaaagaggagaaaaagctggttcaggtgacacagtggtcacagctgagacacagatttgaacacacgtctctcctacgttggatcttggatctgacattgtgctttctcctggttgctgtattcagtcattccttcattaagcattgtttgttgagtcaaagctagggccaaacttctctgtccgggacacccccggatgcctgcatagaaataagagctaaatccctgaactcgaatgagctcatccagagagtggctgagacagagaagggcaactccagagggcaggtcccacaaacayacctgcatttggggggccagcagagatgggatgggsggattagccacaggagggcaggcggcacagtgcagccttgtgaagcccagagggagagagagtttcgagaaggaggaggtggacttcaagatgagtgccctgaaggactgaggaggtgacccccaagcttgggctatgccaggctttgggggtccctgagggcaagctcaaggatgcagcagatgccaggcagtgaagggttcagagtgggggatgacgaagggcagccttctctgtttagaaatttgacttttagagaaaaaaagaagtagaattgtccctagaggcaagggattttttttcttttttgtggcttggttttgtttggttgagaatggcggagcaggtgtgtgttcgtaggtgggggaagaaactggttgagaagaagaaacgaaaatacaggatggggagaggactcttccccatggctctgatcaccgccagacaccatctgtgtttacttctgtcttcacgatctgtttcccaccagccacaagggcagctctgtgaaggcacaagttctgtctcattcaccgtgggatcccagtgcctggcacgtagtagacacttcataaatatttttgatattgagttgaattcacagggttcttccgggagcccagtggttagtcctaggaagagaagggttcatgggggccttaaggaggggcttctctctgatgctaccatgacaagagagagggagagaaaaagaagtcaacacaagtagaggcaggagccaaaaatccaagtctttggcggggtacagtggctcatgcctgtcatcccagcactttgggaggcacgggtgagaggatcacttgaccccaggaattcgagactagcctgggcaacatggtgggaccccgactctataaaaaatgcacaaagaaattagccaggcatggtggtgcccactgtagtctcagctactcgagaggcagaggcaggagggaagatggcttgagcccaggaggtggaggctgcagtgagatgtgattgtgtctctgcactccagcctgggggacagagacagaccctgtctcaaaaaaaaaaaaaaaaaaaaaatccaagtcttctcaaaaaagtgtgtgtggggtggtggtgtgaagggtggaattaacagaagtagaaaatggagaatactagtagctacttatgtcctgtgagaacattctagaaggtgagctgtcattgatttattagcattactctgcctttgctatggctctaagttataaatttaagaattcatttaatcctaacaacagctctctgaggcaaatgagcttcagtcagccctgaggtgatgtggctagtggtgaggaagccaggatttgaacccaggacttggagctgatatagagcctgtgatgttacccactgggccatatacttccccaactgacattagtttatatgccttatttttatttttatgtattcatttattcattaatagagacaggggcttgctttgttgctcaggctagagtgcagtggtgcaatcacagttcactgtaacctggacctcctgggctcgggccatcctcccacctgagcctcccagggtgagccattgtgcctgacccacatgtgccttgttttatatactacattcctcaccaggagcctctgggtttggaggggctcataattctcatgttttacattaagaacagagaaatatagtgacttgcccagggtcacacagatactaagtggctgagctgggactccagcttgcatctctctaaccgcaagcctggcactttccccttccctgagagaagaactgtaggaagttagcacagagtcaggtgccaaaaaagggctaccacctggacgtggcaggcaacattctgtggtgtttctgcaggcatctcccgagtcaccccagctcaggaacaaggcagaaaaagttgggggttggcaagttaggaacaagaggaagaggacggggacaaagctgcaagtccgggagcggggctgcctgtcttctctggcagttcctgggttgaggctgagcaaaacaggataaaatctgagcaggagcccacggctgggggacttggcaaagacccagtgtggtgggtgggagggaggctgtgccctggagggggattccagggttcctgttcttagtggggaagagccctggatcgagggtggcccaagctcaactctgatcactgtccctcctgatagccacctgggcactgtgacctgcttcagaaaacagctgcttctgtggcagtaatcccagcactttgggagtgtgaggtgggtggatcacttgaggtcaggagttcgagaccagcctgaccaacatagtaaaaccccgtctctactaaaaatacaaaaattagccaggcgtagtggcatgcacctgtaatcctagatacttaggaggttgaggcaggacaattgtttgaaccagggaggcagaggctgcagtgatctgagatagggctactgtcctccagtctgagggaaagccagacttcgtctcaaaaaaacaaccaaaatcaacaactgcttctgaatacacaatggaaaaaaatccccaggggttgtgccagggtgaggggaagtagggcttcctgtgtgacttaccaggaatcttggagctggcccatgcaggggtgtgggaggtgacagagaggtctttaaaaccaggtgggcccagccccggcctcttctgtgggcctgaggacggagaaaaggtctcactggtgaggaatctcatctttggggctgctttgcctgagggaggtgcagagagcagggccgagagaggggctatgagaggagacacctggcccccttggtcaggggagcagggcccgaagaggagtgaacccccatcacctctctcacagacagcaggagggctcagcagtgccttccgtgcaatgaggctccgcactgtgcgttctttccagccaggagacctgaactgggaggtcttggagctgctgcatgtggacttgggggacccgtcccttggcaacctggccacgtcctggcctccacatcttcctatgggctgtccgtctctattctctcccctctcattactgcaaccgctgccctcctctgaaattctctcgcggctatgcgcttcctctctgtggtcgtttgattaaaatagctgagtccacatcctcctcctggcgcccgctttgggctctgctgagtggatggctctccactcttcggggcagccactccatgcctctgccacctccaccatgaaactgcttttttactctttccagggtgtgggttttctccaggtatggggaggccaacagatcaagaaatgattgccattgaaaagatagcttgttatttacagctcccagaagaaggcgtgcttccacccagggccacgcaggaagtgccaggtcggcaggtcaggaggagccacgggaagcatcgcccagggcctttgctgtgatctctgggaaaggctggtggggcaggggacacagtttaggaccggtcagtttgaatcatgtcagtggaactccaggcttccctagttgtccagtttctggccctggggtgatttagggcaggagaaaccttggcttggagtgtgagagtgagggaaaggtggcccgggtgtaccaaggcactggttgtgtcagcagtgggacgtatccatacaggcctcagcatcctcaggtcttgcctcctcagaagaaagaattctcatggctgtaatcccagcactttaggaggccgaggtgggcggatcctgaggtcaggagattgagaccatcctggctaacatggtgaaacccatctctactgaaaatacaaaaaattagccaggcgtggtggcaggcacctgtaatctcagctacttgggaggctgaggcaggagaatcacttgaacctgggaggtggaggttgcagtgagccgagatggtgccactgcactccagcctggcgacagagtgagacaaaaaaaagaattcgactgagggacataaggcagaaggagagactgaggcaagtttcacagcagaagtgaaagcttattaaaaagctttagagcagggatgaaaagaagtaaagtacacttggaagaggggccaaccaggcgacttgagagattcaggggttctgtttgacctttgacttggggttttatacatggcatacttcaggggtcttgttttccttatcccctgattcctcccttgggttggtggggtgggctgtccgcacgctcagtgacctgccagcacttgggagggagcatgcacagtgtgttgactgtagttgtacgcatgctcccttgaggcgttcttcccttaccagccgaacgtccctagcaggtcatataccagttaaatgccgccattttgcctcttcatgcacatgtgtgagcccactcacccagctcctgagatcttactggaagctgctgatcacctgcttcaggtattcctgtttattgggagactacctttccctggtgctggctgtgaccagttattattttagagagatggttaataatttcctgcccatcacctgatggttgcctgacattcctgccctgctcctgtctgaccagctacctactgtcacagttggtctgtatatgaaaggcatgctcacagaggagccatctgaggtgtctaggaattaactagcagccctggaaggagcaggctgtctctggcctccaagatgtcaaagcgtcctaaaatatagaaaatcaaaagcatgtttagtgcccagggatgctcagaggcagtggagtagagtcagtcaaggaaatagattcacagttctgggctaaacccttggggaactcacttcaattgtctgagcctcaatttccttatctgtaaaatcaacaactgttattcattgaacaagtgactgtttaaaaggacagacaccgggcctgccaaggtcattgatgggtttagagagatagaggatagtgcttggcacaccagaggtgctcagtgagtggcaggtggtgtccttgtgccacagctccagggagcagcagagaaagattggtgtggaatggtggggtctagggccatttctttggctgtttggagcccttggagcagaggctatgggtggacagaaccctcaggaatgttcttgggattcagagttgctgctggacaagggttgtcccagaggccagctgtggacagaaccttcaggaatgttcttggaattcagagttgctactggacaagggctggcctgccagcccagtagccaggagcccaggggagtctgaagcatgtttggaggccaggtcttgggaggcgccaggggttcaggtagagctctggcacaagcgaccgttcaactcagggacttgagacaacagagcactgaaggggagagccccaggcctgccgagctgtggacaaacaaggactttggatcctaggaggaaggcaatcaggcagctgccggcaaggaacctctgagaagccaaattagaatcaggtgctggcctgagacacatggaatttcctggactctaagctggcaatggctgtttttaccaaagacagattctaaggagtgaagccaagggctctggcctgagaggtagagcatgagaaggaacaaacacagacccctaaaggattcatgcctctgggaagggaggctgcgtggtgcagtgaggggtgcagaaggacgcggctcgaatccagcctccactgcttaatggctgtgtgacctctggcaaggtccctgagctttctgagcctcaactttcccagtggcaaaatgagaacagtaatacctaccctgcagcactctcgtgagcccccagggttgacttattctttaggtagacacagtgcctgggtcccaggagagtgtcttaattttataaattcttttaaaatcaagaggaaggaaatgaacataataatgaatatataataataaatccagcttggattacatttttctttatagcatcatagttgtcaaaaataattatgtgaatatagatataaagatatagcagaaagatgcctacaaaggcaaaagcgcttggggcc

SEQ ID NO: 96663 - DNA, 21121 bp, Homo sapiens
gatcatccttggatcttgggttaaaaatctgtattctagtctgaaccatgggaagaaaaaaatagtcgatctgtggtttttctacttgaaggacacaatgttttccaaactagcacctttgcagaggtttgctgtacttagtcgtggagctcattcttcagtggcttctgctacatctgttgcaactaaaaaaaaaaaatccagaccgggtgtggtggctcacgcctgtaatcccagcaatttgggaggccaaggctggtggatcacctgaggttgggagttcgagaccagcctggccaacatggagaaaccccatctctactaaaaatacaaaattagcccggcacagtggtgcatgcctgtaatcccagctacttgggaggctgaggcaggagaattgcttgaaaccgggaggcagaggttgcagtgagccgagattgtgccactgcactccagcctgggcaacaagagcaaaactccatctcaaaacaaaaaacaaacaaacaaaaaaaacccgaagaaaacagtccaaggccctccaacctctgactacatttttgaaagggaatctaagtgtggtgcgcacaattaccatcctttacctgtagccctggagagaggaaaatgtatttacttatgggatgtagaaggcagaaaatattttgactttctgagttcttacagtgctgtcaaccaagggcattgtcaccccaagattgtgaatgcactaaagagtcaagggaagaaattgaccttaacctctagagctttctataataacgtacttggtgaatatgaggagtatattactaaacttttcaactaccacaaagttcttcctatgaatacaggaatggaagctggagagactgcctgtaaactagctcataagtggggctatactgtgaagggcattcagaaatacaaagcaaaggttatttccgcagctggaaacttttggggtaggacgttttctgctatctccagttccacagacctgacgagttatgatggttttggaccgtttatgcctggcttcgacgtcattccctgcaatgatctgcctgcactggagagtgcttttcagaatccaaatgtggctgcattcatggtagaaccaattcagggtgaagcaggtgttgttccagatccaggttacttaatgggagtgcgagagctctgcaccaggcaccaggatctgtatattgctgatgaaatacagtcaggataggccagaactggtagatggctggctgttgatcatgaaaatgtcagacctgatatagtcctccttggaaaggccctttctgggggctgatactctgtgtctgcagtgctgtgggacgatgacataatgctgaccattaagccaggggaatgtgggtccacatacggtggcaatccactaggctgccaagtgacaattgcagcccttgaggttttagaagaagaaaaccttgctgaaaatacagaaaaaaaatgggtattatcttgagaaatgaacccatgaagctaccttctgatgttgtaactgccgtaagaggaaaataattatttatttatttatttatttatttatttatttatttatttatttgagtcagaggttcactctggttgcccaggatggagtgtaatggcgcaatctcggctcaatgcaacctccacctcacaggttcaagtgattctcctacctcagcctcctgagtagctgagattacaggcacgcactgctatgcccagcgaatttttgtatttttagtagagatggagttttgccatgttggtcaagctggtctcgaactcctgacctcaggtgatccagctgccttggcctcccaaagtgttgggattacaggcatgagccactgcgcccggcgaggaaaggaattattaaacgctattgttattaaagaaaccaaagattgtgatgcttggaaggtgtgtctacgacttcaagattatggacttctggccaagccaacctgtggcgacatcatcaggtttcacctctgctggtggtcaagggggatgagattcgagagtccagtgaactcattaacaaggccatcttatcattctgagggtagcagctgttttcaatggtccctgggagccggctggagacaggtggtcctgtaaaagctctgctctaaatgtaggcacattccactcccatgtgccgtcaaaatctttttgtgtatatatgtttttttcagttgatacataatagaagaacgtttatgaacctgccgtttgcttttgtaatataagtaagagaatgtagtggcatctatattcaatgaaagtgttttgatgtgcatatgtactttctaaggtgaaatgcatctatgtatacagacagcctttaaatcacatccttcagtataatttatatatgctttcataatttccttgctggtataaatgttttgtatttgaaaaagttatctctagcatattacataaaaggcttcaccttataaagtcaaatctttgttatcattgaattttaggaaggatgaatggttaagcatatataaaatactaatattaagtaaacttcatgttggccaacatcaggatgtattctatggatgtcattattttcaattaagaattagtgtttaaaattcctaaattgtttgagtgtttgattataatttgtaaaagaaagtttaatatttctttgaatttaaaataaagcttatatttcagaaaaaaaaaagatacagaacatggctgggtgcagtggttcatctctgtaatcccagcacgttgggaggctgaggcaggcagatcacttgagatcaggagtttgggaccagccgggccaacatggagaaaccctgtctctactaaaaatacaaaaattagccaggcatggtggcacgtgcttataatcccagctacatgggaggctgagacaagagaaccacttgaacccgagaggcagaggttgcagtgagcagaggtcatgccactgcactccagcctgggagacagagcaagactctgtctcaaaaaaaagttacaaaccattttcatcaccacaatgctatcccttgtgctactcatttttggtaatactgtcctcccatccaccatccctaatccctggcaaccacaaatctgtttttcatttctacaattttgtcttttctacaatgctgtgcaaatgaaatcttatagtatataacattttaggggcttatttcactcagcataattccctggagattcattcaaggcattaatatttatgtatcaatagttcatttttattggtgagtagtaattcgtggtatggatgtaccacagtttgaccattcacttattgttggacatattgattatttcgagcttctggcgattacaagtaaagctgctatgaacaattatgtataagtttctggatgggcataaattttaatttctctgaagtgtaattgttgaattgtgtgctcattgcatgtttagttttataagacactatcaaacagttttccatagtggctgtaagattttaccttcccagcagcattttacaaggtgtccaatttctctgcatctttgtcaccatttcgtgttgtcactatgtcttttattttagctgttgtaataagtgtgtagtgatacctcatcatggtcttaatttgcatctagtgaagcaaattagtgttgaacatcttttcatgagcttatttgcttatttcctcttcagtgaaatgtatgttcatatattttgatcattttctaattggattatttgtttgttttttgccgttgagttttttgttgttgttgtttgtttttgagagagcctctcgctctgttactcaggctggagtgcagtggcatgatcttggctcactccaacctccgcctcccaggttcaagcgattctcatgcctcagcctcccaagtagctgggattacaggcgtgaaccatcatgcctgtcaatttttgtatttttagtagagatgggtttttgccatgttgctcaggctgatctcaaactcctgccctcaagggatctgccctccatccacctcaacctttcaaagtgctgggattacaagcgtgagccatggcctactgttgagttttgagagtactatacatatccattatacattctggatgtgagtcctttcttggatatgtggtttgcaaacattctctcccattccataccctgttttttcatccttttaacagggtttcttgcagggcaaaagttttaaattggatgaaatctaattttttttccttatggattatgctttttgaactgtttactatgccctagatctcagatgtttctcctatgttttcttgtaaaagtttctgttttagttttatattttagatttaaatctatgatccacttgagttttttttttttgtataaaggtatgaagattaggtcttttttttattagcttatggctctgcaacttctccagcaccatttgttgagcagacaatccttccttctttttgtcgctttgtaaaaagtcagtgtggggctatttctaggttctctattttgttccagtgatctgtgtgtctattcttcgccccatacgacacagtcttgattcctgtagctatataagaagtattgaaatatggtagagccattcctcccaccttattcttctttttcaaaaagtgtcttagctatatatatatatgcatatgtatatatatttttgagatggagtctcacttgtgtcgcccaagctggagtgcactggggtaatctcgcctcactgcaacctctgcctcctggattcaagcgattctcctgcctcagcctcctgagtacctggaatttcaggcgtgagccaccacacccggctaatttttatatttttagtggagacgtggtttctccatgttggccagactggtcttgaactcctgacctcaagtgatctgctagtcttggcctcccaaagtgctgggattataggtgtgagtcttaatggtctccattcacacacaatgattttaaaatagactcccctctgcctttcccttccccagaaatgttcccctctgcaccgtgcaatggtacctatgagaaagaactgtcccattcccaaatcactgtccccaccccagcccccaggcccttggttggtgagacccttgatgggcagtctcatgcttctgtccaggggactttcccaccgttgctcccctgcatggagactaagtggactcttctattccctggccatcacagagtctacagtgcacacatctgcctgattcctccacgttacccagatgacgatttcatctgtgtctcctcccacatactcccaaatggaccatcccagaccttgaacccaaaaatggttcagagagcgaaggccaagatgcccaaccacatgctgcagaatcctgctccaggactgaagtgtatagtctctatcaaaataaaaactggaggccaggcacagcagctcacccctgtaatccctgcattttaggaggccaaggcgggaggatcgcttgagcccaggagtttgagaccagcctgggtaacatagcgagactttcttgacaaacctaaaaaagttagtggggtgtgatggtgcatgcctgtagtcacagctactccggaggctgaagagggaggatcgcttgagcccaggagttcaaggctgcattgagctatgatcatgccactgcactccagcctggacagagcacgacccaatctctagaagaaacaaacaaacacccagcaactggaaacatcctcctctagaatggtggtcaggaacatctgtctgccttgttccctgatgtctctccagcacctagaatagcgctcagcacgaggacacactcattagggttttgttgaataaatgactcctttgacacatcaattccacttctaagaatctttcctaaagaaatattcacacatgtgcacagagctgtgtggacaataatgagaggagcaaacaactggggaacgtttgcaaaggtttattaactggcagtgactgatacaggggaatyggatgaggggagtacatgctgaacaggaaacagagtgaggggggcttgaccaggacacgtggcaatggagaaaagcagatgggagatacttatactggtactcggtgtgtgtgtgtgcatgtgaggtgtgtgtgtaaatgcagaggaaaaaatcagaaattaaacactcagacctgatctcagtagtcacatctggggagagaggagggtagtgctgttctatggagagaatacctgacaatacttgttttctgaggtaggtgcatggatacacaagccgaaatatgcattaagcatgtcttgctcatcaaaagaaaacgctaatgtctaacagaatggcacactgcaagaaaatacaacggaaacgccaatatcgaactcttggcacactaagaaaaatgatgctcaacttttcactgttgtgaacacttgctttcacttgctatgcacctgatgacgaggggtccgcagccatgcccatgttcgtgaaaggtcaccacgttctgcttctcatcatgggcatgtgtcatattccctgaggctgaggcaagaagagggaaggaaagtaagtggcagtgagttcccaccacgtgacaactcaatctcaactcctcctgacctgcagaccctgcccactccgattctgccctatctcaggacctgcacacaccttccacggttcctcgaagtgaaccatctgttcatgccacagtgacttcctcgcctaggctatcaattcctaggctagaggaaggtgyggcctgcatatcagggctgacctggggtttgggagcccacagcatcctgggtagggagcatccctggacctacaggccagggagtaaaaagagaatgcgaaatcggccgggcgcagtggctcatgcctgtaatcccagcactttgggtggccgaggtgggccgatcacgaggtcaggagatcgagaccatcctggctaacatggggaaaccccgtctctactaaaaatacaaaaaaattagctgggcgtagtggcaggcccctgtagtcccagctactggggaggctgaggcagaatggcgtgaacccaggaggtggagcttgcagtgagccgagatcgcacctgggtgacaaagagagactccatctcaaaaaaaaaaaaaatacgaaagagcatgggaaatctcatcattcagcctcaatgctgtaccctagaaaattatgagaagggaatggtttggggaacaagtgagaagatgggataccagtatcataacagaatagcacatctgcagggatgtgaggggtgagccgaagattcacttatggagttactcgtcatcttcctcagggtcgctgatctcttcataaatcaccagctgctttctctcacgcagtctgtgggtccagtcatgtttccgccttttgggtcctatgatgaatagttggaagatgagggttgggtaggttggagagtgttaggctctgttttctccaaaaaaggagatgcctaccccctcccaagtgcccatgggccttctttatccagtttttcacattctctggcttagagaggctgagaccttagatccacaccaatacaggccaaatgcaaactaaaattttagcttctggctccttccattgtgaggtttagattcccaacctcttcacttacgggaacattcaccgatacctcctttcattcagcaagcatttgttaagggcacacaggcacactttgttttattgctcctcatttttacagtgcttcacagatgctgcaattttttttggaaattctcaccaattttatacttttccattattattatgtctgttatggtgatctgtgatcagtgagctttgacattattactgcaattgtttttgttgttttttagtcttttaaaataatttttgttctttattttgtgggtacgcagtaggtgtatattcttatggggtacgtgagatgttttgatacaggcatgcaaatgcgtagtaatcacatcgtggaaaatagggtatccatcccctcagccatttatccttgtgttacaaacaatccaattacattctatcagttctttttaaacacacaattaagttattattgactataatcaccctgttatgtgtaattgttttgggggtaccatgaactgcacccatagaagatgacaaacttaatcgattaatgttgtgtgtgttctgactgctccaccgatgagctcttccccatctctcctccttttcttgggcctccctatttcctgagacacagcaacactgaaattaggacgattaagaaccctacaatggccgctaagtgttcaaatgaaaggaggagtcacatgtctctcactttaaatcagaagctagaaatggctaagcttagtgaggaagcatgctgaaagccaagacaggatgaaagctaggccgcttgcaccaaacagccaagctgtgaatgcaaaggaaaagttcttgaaggaaataatagtatataatgtaaaggaaaagttcttgaaggaaataataatactaatactccagtgaacacacgaataagaaagcaaaactgccttactgctcaaatagagaaagtttgagtggtcaggataaaacatgacaccagccacaacattcccttaagccaaagtctaattcagagcaagaccagaactctcttcaagtccatgaaagctgagagagttgaagaagctgcagaagaaacgtgtgaagctagtagaggttggttcgtgaggtttaaggaaagaagccgtctctataacataaaaatgcaaggcgaagcagcaaaccctgatggagaagctgcagcaagttatccagaagatctagctaaggtcactgatgaaggtggctacacgaaacaacagattttcaatgtagataaaataaccttctattggaaggagatgccatctaggactttcatagctagagaggattgactccaactttgaaagaagttctactgtgggtaaaatgctatccaatagcatcacatactacagagaaatccttcatgaaagggagagctaattgatgtggcaaatttcattgttgtcttcttttatgaaactgccacagccactccacccttcagcaaccaccaccttgataagccagcagccatcaacaccaaggcaagatcctccaccagcaaaaagagtgtgactcactgaaggctcagaagattgttagcattattgacaatgaattattttaaaattaaggtatatatatttttagacataacactattgcacacttagtagactacactgtagcgtaaacataatgttttatgcactgtcaaacaaaaaacaatgtgtgtgactcactttattgcagtggtctggaactgaacctgcaatatctctgaagtacacgtgtattgggtatcaggcattgagctgagtaagatatgatcccaggttatcacagatagaattgcttgagcacctttcatgtcatcaggccttctagattaaatttaatgcttccaaacaatttatgaactatgattctttatttccatcttatggactaggaatctgcagctgaggaaatttgggagacttgccccaagtcacatgttttttttttaaattacactttaagttctagggtacatggtcacaacgtgcaggtttgttacatatatatacatgtgccatgttggtgtgctgcacccattaactcgtcatttacattaggtatatctcctaatgctatccctcccccctcccccgaccccatgacaggcaccagtgtgtgatgttccccaccctgtgtccaagtgttctcattgttcaattcccacctatgagtgagaatatgaggtgtttggttttctgtccttgcgatagtttgctcagaatgatggtttccagcttcatccatgtccctacaaaggacatgaactcatcctttcttatggctgcatagtattccatggtgtagatgtgccacattttcttaatccagtctatcattgatggacatttgggttggttccaagtctttgctattgtgaatagtgccgcaacaaacatatgtgtgcatgtgtctttatagcagcatgatttatagtcctttgggtatatacccagtaatgggatggctgggtcaaatgatgtttctagttctagatccttgaggaatccccacactggcttccacaatggttgaactagtttacagtcccaccaacagtgtaaaagtgtcagatgggtagattgcaaaaattttctcctaatctgtaggttgcctattcactctgatggcagtttcttttgctgtgcagaagctctttagtttaattagatcccatttgtcaattttggcttttgttgccattgcttttggtgttttagtcttgaagtccttgccaatgcctgtgtcctgaatggtattgcctaggttttcttctagggtttttatggttttaggtctaacgttgaagtctttaatccatcttgaattaatttttgtataaggtgtaaggaagggatccagtttcagctttctacatatggctagccagttttcccagcaccatttattaaatagggaatcctttccccattgtttgtttttgtcaggtttgtcaaagatcagatggttgtagatatgtggcattatttctgaggactctgttctgttccattggtctatatctctgttttggtaccagtaccatgctgttttggttactatagccttgtagtatagtttgaagttaggtagcatgatgtctccagctttgttcttttggcttaggattgtcttggcaatgcaggctattttttggttccacatgaactttaaagtagttttttccaattctgtgaagaaagtcattggtagcttgataaggatggcattgaatctataaattaccttgggcagtatggccattttcacgatattgattcttcctatccattagcatggaatgttcttccatttgtttgtgtcctcttttatttcattgagcagtggtttgtagttctccttgaagaggtccttcacattccttgtaagttggattcctaggtattttattctctttgaagcaattgtgaatgggagttcactcatgatttggctctctgtttgtctgttattggtgtataagaatgcttgtgatttttgcacattgattttgtatcctgagactttgctgaagttgcttatcagcttaaggagattttgggctgagatgatggggttttctagatatacaatcatgtcatctgcaaacagggacaatttgacttcctcttttcctaattgaataccctttatttctttctcctccctgattgccctggccagaacttccaatactatgttgaataggagtggtgagagagagcatccgtgttttgtgccagttttcaaagggaatgcttccagtttttgcccattcagtatgatattggctgtgggtttgtcataaatagctcttattattttgagatacatcccatcaatacctagtttattgagagtttttagcatgaaaggctgttgaattttgttgaaggccttttctacatctagtgagataattatttggtttttgtctttggttctgtttatgtgatggattacgtttattgatttgcatatgttgaaccagccttgcatcccagggatgaagccaatttgagcatggtggataagctttttgatgtgctgctggattcggtttgccagtatgttattgaggatttttgcatcgatgttcatcagggctatgggtctaaaatgttctttttttgttgtgtctctgccaggctttggtatcaggatgatgctggcctcataaaataagttagggaggattccctctttttctattgattggaatagtttcagaaggaatggtaccagctcctctttgtacctctggtagaatttggctgtgaatccatctggtcctggactttttttggttgctaggctattaattattgcctgaatttcagagcctgttattggtctattcagggattcaacttcttcctggtttagccttgggagggtgtatgtgtccaggaatttatccatttcttctagattttctagtttatttgcatagaggtgtttatagtattctctgatggtagtttgtatttctgtgggatcggtggtgatatcccctttctcattttttattgcgtctgtttgattcttctctcttttcttctttattagtcttgctagcggtctatcaattttgttgatcttttcaaaaaacaagctcctgggttcattgattttttgaaggcttttttgtgtctctaactccttcagttctgctctgatcttagttatttcttgccttctgctagcttttgaatgtgtttgctcttgcttctctagttcttttaattgtgatgttagggtgtcaattttagatctttcctgctttctcttgtgagcatttagtgctataaatttccctttacacactgctttatatgtgttccagagattctggtatgttgtatctttgttctcattggtttcaaagaacatctttatttctgccttcatttcgttatgtacccagtagtcattcaggagcaggttgttcagtttccatgtaattgagcggttttgagtgagtttcttaatcctgagttctagtttgattgcagtgtggtctgagagacagtttgttataatttctgttcttttacatttgctgaggagtgctttacttccaactatgtggtcaatttcggcaaaagttcaatgtggtgcggagaagaatgtatattctgttgatgtggggtggagagttctgtagatgtctattaggtccacttggtgcagagctgagttcaatttctggatatccttgttaactttccgtctcattgatctgtctaatgttgacagtggggtgttaaagtctcccattattattgtgtgggagtctaagtctctttgtaggtctctaaggacttgctttatgaatctgggtgctcctgtattggatgcatatatatttaggatagttagctcttcttgttgaattgatccctttaccattatgtaatagccttctttgtctcttttgatctttgttggtttaaagtcttttttatcagagactaggattgcaacccctgcctttttttgttttccatttgcttggtagatcttcctccatccctttattttgagcctatgtgtgtctctgcaagtgaaatgggtctcctgaatacagcacactgatgggtcttgactctttatccaatttgccagtctgtgtcttttaattggagcatttagcccatttacatttaaggttaatattgttatgtgtgaattcgatcctgtsattatgatgttagctggttattttgctcgttagttgatgcagtttcttcctagcatcgatggtctttacactttggcatgtttttgcagtggctggtactggttgttcctttccatgtttagtgcttccttcaggagttcttataaggcaggcctggtggtgacaaaatctctcagcatttgtttgtctgtaaaggattttatttctccttttgcttatgaaggttagtttggctggatatgaaattctgggttgaaaattcttttctttaagaatgttgaatattggccccmactctcttctggcttgtagagtttctgccgagagatccgctgttagtctgatgggcttccctttgtgggtaacctgacctttctctctggctgcccttaacattttttctttcatttcaactttggtgaatctgacaattatgtgtcttggagttgctcttctcgaggagtatctttgtggtgttctctgtgttttctgaatttgaatgctggcctgccttgctaggttggagaagttctcctggataatatcctgcagagtgttttccaacttggttccattctccctgtcactttcaggtataccaatcagacatagatttggtcttttcacatagtcccatatttcttggaggctttgttcatttctttttactcttttttctctaaccttctcttctcacttcatttcattcatttgatcttcaatcactgataccctttcttccacttgatcgaatcggctcctgaggcttctgcatgcatcacgtagttctcgtgctgtggtttacagctccatcatatcatttaaggtcttctctatgctgtttattctagttagccattcgtctaatgttttttcaaggtttttagcttctttgcgatgagtttgaacatcctcctttagctcagagaggtttgttattaccgattgtctgaagccttcttctctcaactcatcaaagtctccatccagctttgttccgttgctggcaaggagctgcsttcctttggaggagaagaggcactctggtttttagaattttcagtttttctgctctggtttcttcccatctttgtggttttatctacctttggtcttttttgatggtgatgtacagatggggttttggtgtggttgtcctttctgtttgttagttttcattctaacagtcaggaccctcagctgcaggtctgttggagtttgctggaggtccactccagaccctgttttcctgggtatcaccagcagaggctgcagaacagcaaatattgcagaacagcaaatgttgcagcctgatccttcctctggaagcttcgtctcagaggggcacccagctgtatgaggtgtcagttggcccctactgggaggtgtctcccagttaggctactcggggatcaaagacccacttgaggaggcagtctgactgttctcagatctcaaactctgtgctaggagaaccactactctcttcaaagctgtcagacagggacgcttaagtctgcagaagtttctgctgccttttgttccgctatgccctgcccccagaggtggagtctacagaggcaggcaggcttccttgagctgcggtgggctccacccagttcaagcttcctggccactttgtttacctactcaagcctcagcaatggcgggcgcccctcccccagcttcactgccgccttgcagttcgatctcagactgctgtgctagcagtgagtgaggctccgtgggcatgggtcactccgagccaggcgcaggatatactctcctggtgtgccgtttgctaagaccactggaaaagcacagtattagggcgggagtgtcccgattttccaggtgccatctgtcacggcttcccttggctaggaaagggaattccccaaccccttgcacttccccggtgaggcgataccccgccctgcttcgggtcatactccatgggctgcacccacggtccaaccattcccaatgagatgaacccggtacctctgttggaaatgcagaaatgcgtcattcatgctgggagctctagactggagctgttcctatttggccatcttggaacctctcccctgtcacgtggttttttatatggatgacaactccaccctgtgtctctggaagtcaagtctaacatctcatctggagctgagcaagctcctcagcccaggctggacccaggcttgtctggggtccatgccacacacccagtccacacacctgaacatagccagggaagccagaggggttgttcccaaaytgtttgctcttaccagatgtcttgttaatcttctcaggggtacttggttttcctgggggcacagctgtttcccatcgttttgtgggatcccatataagcttgtagacagctgctgggagaataaatgtaaaaacatagggaggggagaaaacactgtggggaaagatggtgtggggagatgaatacagggatgggagaggtaaagaaatggtttgctgaaattaaactaggcagcaaagaaagcagtaccagatctggcataccaccctaccgaggcatcaacattgaatgtggaattaagtgagatggtacccataccaattctggttgcattgggatatgtcactgaccaacaatcttaagctagtttttttttttttttcttcttttttgagatggagtcttgctctgtcgccaggctggagtgcagtggcacgatcttggctcactgcaacatccgactcctgtatttaagtgattcttctgcctcagtctccagagtacctgggactacaggcaggtgctgccacgccaggctaagttttgtatttttagtagagacgaggtttcaccatgttgggcaggatggtctcgatctcttgacctcgtgatctgcccacctcagcctcccaaagtgctgggattacagttgtgagacaccgcgcccggcccttaagctactttttattcagcttcctcacttatgaaatagtgaataatacatgtaaaataggctaagggaaagtcctctctgagcttgtaaacactgtttatgtgtagtaataataacaattaatacctttcatgatccttctttgaatttggcctccatactggcaacccaatcccagatccctttaccctctaaaccagagttgaatctgcacttgtggggtcactcattcaggggcctccgaggatcccctgggctgggactggggcttctcagatgccccaggtgcacacaaggccatcaaggagctcacagtagggaggggccaacagtcaaagcgattcctaagccatgtgagtggccccggtaacagagcagaggccagctggtccttcctgttgcgagagtgggtgtctcaacggaagcaccaggaggccctatggggtgaagccctagtgagcaacatctgaacttcataaacaaatgcaaacgtgaatgagctttaaatggcttggagctctggattagactaccactgccactgtgccccaggaaaattctttaacatctctgtacaatgatagcctcattttattattatgctgctgataactatgatctaaaacatgtccaacatggtgaaaccctgtctctactaaaaatacaaaaattagccaggtgtggtggtaggtgcctgaaatctcagccatgtgggaggctgaggcagaagaatcacttgaacccaggaagcggaggttgcagtgagctgaggtcctgccgctgtacttcaacctgggtgtcacagcaaaactccgtcaaaaatgaaaaaaaaagtaacaacaacaacaacaaaacaatagaaagactggagagaaggcactacttaaagaaataacattctagaattttctgaactgaacaaagacatgaatcttcaaactgaaaagagccatctagttctgagcctgattaacacacatgtgcacacacacctgcgtgcacgcaccacacacacacacccttggagtaaaatttctaggatagagataaaatcctgaaaggtcccagagagaaagagagaagagagaatgcaatggagaagtttttcaaggagctgattaaaaataagtttgggccaggtgcagtagctcacgcctgtagtctcagcactttgggaagctgagacgggaggattgcttgagctcaggagtttgagaccagcctggccaacacggcgaaacccatctgtacaaaaaatacaacaagtagctaggtgtggtgccacgtgcctgcagtcccagctacttggaaggctgaggcaggagaatctctgagtccaggaggtggagattgccatgagctgagatggtgccactgcattccagcctgggtgacagagccaggcactgtctcagaacaacaaaacaaaacaaaaacaaacaaacaaaaaaagttgaacctagatatctgtatacagccaggataatccacaatgagggaaaaaatagttcagaaaattaatgacacatatacccttcagaaataattattggtatacagccctatgagaaaagaaaagtaaatttaagaggaaggtgatttcaataagcaattgttagaagaaaaatagtaaaatttattaaacagtgtaaacttttgattgtaaacttaaaaaattatagtcttgaaataaaattcccagtattataaacatggaagatgggacgagggacaggaaaaaaaaagagaagttcttttgttgttcaaggaatggataccgacactaatgaatgatagaatggtagagtggctaaaagcattagcattttattttgttttattttagagacggcctcactctgttgcccaggctagagttccatagcacaatcatggctcactgtagccccagcctcttcagctcaagtgatcctcctgcctcaacctcccatgtagctgggactacaggcgtgcaccaccaaggctggctaattaaaaatttgtttttttggtagagagagtgttttcctatgttgcccaggatgatcttgaactcttatcctcaagcaatcctcccacctcagcctctcaaagtggtgggattataggagtgagtcactgtgcccacttaacgctagtattttagagtgcaaactctggagccagacagcttgggttcagtttctggcttctcaacttattaaggtatgtgaccttgtgtaactcatataacctttccgtgtttcaggctactcaagagtaaactggggataaccacactatctaactcacttgattgctatgattaaatgggtaagtacgtgtaaagcacttagaatagcgcctgtcatgtggttaagttagtatatatcttttaggtgttgttagtaatgacttcaaattacttttaaaatgtaaaggcatatctggttcaagaagaagatggtgaaccaggaatagctgctggcttccttcccaaacccaaccctgcagatgccacagaagaggtgggaagtggttggagttcagaacagttcccagtaacaaaacccttgatggtttagccccactgggggatgagatggcttagagtgggaaaggtcagaggccacagatggagaatcagcccaggcggagctttctaagttgcattctttttttctccttattttctagaaggcttattacctgttctgtaaacatacagagcagaaacttggcagggctggcccagtgctagcccaaagtggcctgataacattaaagaataaggggcttggaaagctcctagaaaaagtgcagactcatcaaagctggtcagtaactgagcattcctttcctacttctccctctgccctctgagctacgcaattacaaccggtatcactcacccgtagaccccctccacgctgtaaggcagaaatcctgtaagggtctctgggggctcataggctagggactggaaagaattggctcagctcagctctagaggctccctatcctacgacctatcaatccagaaaccctaaaactcacatggagtgtctgggcttacacatcttcccaggaagaaagggttatatagaaaaactatctgacagcccaggcagggtggctcacacctataatcccagcattttggaaggctgtggtgggaggatcacctgaggtcagcagtttaagaccagcctggccaacatggtgaaaccccatctctactaaaaatataaaagtagttgggcgtggtggtgcacacctgtaactccagctactcaggaggctggggcaggagaatcacttgaacctgggaggcggaggttgcagtgagccgagatcacaccattgcactccagcctagccaacaagagtgaaactctgtgtaaaaataaataaagaaaaaaaggccaggtgcggtggctcacgcctgtaatcccagcactttgggaggctgaggcgggtggatcacctgaggtcaggagttcgagatcagcctggccaacaaggtgcaaccccgtctgtactaaaaatacaaaaattaacctggcatagtgtcacatgcctgtggttccagctactcaagaggctgaggcaggagaattgcttggactcgggaggcagaggttcagtgagccaagatcgtgccactgcactccagcctgggtgacagagcaagactctatctcaaacgaataaatgaataaataaataaataaataaaaagaaaaactattggatagattggatatgaaaacattaactgctcaaataaattattcggtggaatagattggatattaaaactgatagagttgaaaaagcaattactgagctgaggaaatgcgtctaaagaattcatgaaagtaatcggtaatggatagagaagaagtaaatgaaagaaaagttaattaatagggaggatagaagaataaatgtcaaaacacatctaatagtagccttataagaagagaatatagtcattaaaaaggagagtgtacttaaataagtaatcaatgagaattcctcagatttaaaaaaatgacttaagatttaaaggtattatagtacacacacaggaacagtgaaatgtaaaattgtgaaagacaaggaaaaaatattttaaaatgatcggagagaaatagcaggttacttacagaggaaaatacaatgtcaagcatgtaagacttcaggagattgaagacacagggaaatgttaaagcaaacaagtatttattgcacttattaaagactgtaaggaagggtcagctgcagtggctcatgcctgtaatcccagaactttgggtgcccgaggcaagaggattggttgagcccaggagttcaagaccagcttgggcaacatggtgaaaccctgtctctacaaaaaatagaaaaatccgccgggcacatcaagttcctgcgtctgtagagaactgaaaaaaaaaaatacctgggtgtggtggtgcgtacctgtagttccagctacttgggaggctggggcaggaagattgcttgggccctggaatttcaggctgcagtgagctaggattgggtcactgccctccagcctgagttacagagtgagactttgtctctgaaaataaaaagaaaaaaagatcgtaaggacgattttactcagaggggggactactgtgataggtacagggaccactgcaatggggtcttgcagtgggagagtgatattgggatcgacttcaactccacaaggacaagtggggatttgtagtcaggggagtaggagc

SEQ ID NO: 96664 - DNA, 15550 bp, Homo sapiens
gtgtgccggtttttattactgtcttcggagccggccccgcaccgcacagcacctttctgattaatgatgctttggttgtaaagaatactctaacaacaagagccctggggaattagggatggtcaaagaatgagccctggtggcaaggttccagaagcaccccaggcacgtgcgtcttattaaagggctcagcatagtcatcgaaataacacctgacgcgtggcacattataaaaccaacatgaagatgcctacacatcagatcccagaagcagacggacatctaaggaaatctgttcactggtctttaaatcacccattttgagatataaactggcacctgtctacatttaaaaatcatacttaaaataaaatctggttttcttttctgaactcttctctttggtacatatatggaactaaatatgagtaatgcaggaagataaacgctgttctgaagctcatgcactgctttgaatctgtgcaatcaagcaggaaatcagtcagcaagcagttaacatacaaactgctgtgtgtgtgtgtgaaagaaatagatcacacctagagaaaagggcagaaaacgtaaatgtgtacagttttaacaaattgctccaaaaattccctggaacttaaagcactttggaacaatgtttccagattataactgccactcccatatccattccgacagtttagctaaaccaactctagctctaactgacaattggtttgtgataccagaacactgtcaagatgagcctataaacgtctttctggggccgggtgcggtggctcacaactgtaatcccagcactttgggaggccgaggcgtgtggatcacgaggtcaggagatccagaccatcctggctaacacggtgaaaccccgtctctactaaaaataaaaaaataagccgggcatggtggcaggcgtctgtagtcccagctactcgggaggctgaggcaggagaatggcgtgaacccgggaggcggaggttgcagtgagctgagatcacgccactgcactccagcctgggcgacagagcgagactctgtctcaaaaaaaaaaaaaaaaaaaaaaaaaagtctttttggaagcttcttagtaactatcatctgtttctttaagaggtttcataaaaggctttactacttgccatgtcactgcagaccaaagaaaaatctatatgaagagattccatgacatcaatgtcccagtgtcgggggtatgcaaacctgagtacactcaggtgtacacgcacggtgcatggcagagctgggagacacgtccacaggctaaacactgtgcgtcctgcagctaattgtgtagagaacaacattttaatggcaaaatacagataaaatgaaaaattacaagttgtttttgtttgtttgtttgtttggcaaggctgcaggggcctgagcacgccagagatgccaatcgtccttgagggcgggaggtagtgcagccagcttaggccttagaaccctggagccgtccccgtgccagagccaggaggcagagtgggcagccactcttttggtttcagaaggtcactggctgctctgtcttcacgacactcccaggtcatcaggacacagtaggtaccagtgcaccttctcacacagaccttgtcttcaacacaggtcacaatggacacttgccatcaagagatgcttctgctacctccaaggcacctggcagtgtctgagcggacacttccaagaggctgggaccccgccagtctctaggagggtaatgaaacccaccatgggaatctgaccctaactccaggacacctggcttctgacaagcacattgtggactcacacaatctcgtgagtccagccagggtcctgcctggtcagaaataccatggcaccctctgctcagaacatgaggccacctctgctctctctatggagctggcaggactgtggctgttcctttaaaatcaaatggtgctccccagcctctagacaacgggaatgcattagaagagaagagatttcacagtccccaaatcccgtgaaagcaagacggattccacggtggagggaaccccaagtcttgtgtgagccagggagctgtacccgtccacgtcggcagcccggccctcccagcagcatgggcttcgagacccgcctatgaatctcttcaagctgaccccaggcccgagacatccgagacctcagcacagtctcatgcccgattgaatcatactacacttgagccttcatcaagcatgattcctttagtttactaggaaaaagacaatgagaaaacaccatgttttccctcatttttaactagtcccgctagaacttcctacgctaacatccgcgataatgccaactgccttgcagaagggaaagaagctgccccggccgtgtggcctggccaggatggcgctcatcccacagggctctggcccgggtctcccgcctgtgcccgccgaggcccccgccgggtcgcacatctcaccccaccagcagcacactcctcacaacctgggaattttctggcacttcaggaaccaactaactgctgcgctgcacagtgacagtctgtcatgaggagtaaagaggtggcaggctggtgttcaaaatgaaatgtcacttcttaaaactgttatggcttgggaagcttcagcttaaatatgtcatggcagaaaataacctcattctttatagcctctaaagttgggtgaagtttcactgacttcttagagaataggtaacatgtgcgaacacaagaagatctgacggaaacatcaactttctcaattaagcaaggtggccaaagccaccaattcctgccccgagcaggtgccgggggctctctgtggccattgtggagcagcctggacagtctcgtccactggctgaggggaagttcctctttctcctcgtccagacatcgacatgggattacacccctccccaccaaggaaggaccttgtactagcaaagtaccaagtgtttgtttgcaaagaagccatgtgaagaaagccatggttaatacaaatttccacctgcactgggatggaatttgtacattcagaacgtgtggtttttgtgtcatgtgacccacttaatgatataatcagtcaacactgggattcaccataatgtgtgtctccaggttcaacaaccaaacccttgtgtgcgcagatcctacggacaaagagcactgtgggatgggggctccaggacgggcacccaccccagcctcagggcaatctccggcaaccgtccaggagtcacacacccacacaggaaaggaacagtagctttctgcaaagcctacaggcacttctggccacctgaggcaaaggcattacctgtgtccaggggcccaaggcagtaagcccctcctctcccagcctgtgacccctgcagggcccccatgcccttcccaggcattccttggtgcattctacaaatgctaagatgcaccctgccaagaagatctgagtaaaacttgggaggagctatttccggtgacctccaacccccaccagactcagcagcattctgatggcttctttatctcccactcacccttacccaattcttctccattacgttctgtggttctgtggttctgtgtgcattaagtcccagcagctcagttcagcacacagggccctttgctgcctgctcggtccagaccactggtcagtccatctcccatcggccctgcgtgccctgcaccggcacgcttccttctgcacccatgggcctcggtctgcaaacagcagagggatgttctcatggcaggcagcctgcatgtcctcctggagctgcgactcctgtaccatgctggcactagcaccggggaggctgcacaggcctcagctgcggccccctggacagcaaggtgcagcctcggcctcgtgggacttgccctgggcctggggtggacagcacacacttcttgagccgacactgtgggcggatggagaccccctgaccccagcaggtagacgctccctccagcagctctggtcacatctccccaaggtaccaggtggaaacaccctccctgggggcctgggagagagcctggactcctgcaggactgaggtgggtctctcagcagctgctcttggatacagtttgaatctagccccggctgtgagccagactgccagaggttccctctctgaggctaccagtgggtgacttcctttcttacatgaggtcactgaagtcccttccatccagtaatctggaagaatcttcacactgcaggtctctgaattgcagtgagctgtgaggccagtgactcccaccaagaggctgggcggggcctcgctcactgcatccagagcttccctgaactcaccctgcatgcagccaccccgggcaacagggggacacacggattgaaatcccgtgtccagcctggtgtgacctcctcacttcccaaataatgaaactgagggaaaaggggcacttggagctggtgaggtcactctgacgatgtgcggggcctgagctctgagaggcccagacaccagctctccatccccacctgagatcagaactggccctgaaactgcttccaggagggccatgcccagtcaggctgggcacccggacatctgacaggaatccggggacagcaggtggcggggcaagcctgcgtgccgtaggggccccgtacgcgcaccgtaggggctctgcaccctcaccgtaggggctctgtaggcacaccttaggggctgtgtacccgcaccgtaggggttctgtatgcacaccataggggctctgcacccgcactgtaggggctctgtacccgcaccgtatggggtctgtacatgcaccataggggttctgtacccgcaccgtaggggctctgcacccgcaccataggggctctgcaggcacaccttaggggttctgcaccctcaccgtaggggttctgtacccgcaccatagggggtctgcaccctcaccgtaggggttctgtacccgcaccgtaggggctctgcacatacactgtagggattctgcacctgcactttaggggttctgtaggtgcaccttaggggctctgaaagcataccataggggctctgcaccgcaccatagaggctctgcacctgcacggtaggggctctgtacatgcactgtagaggctctgcacctgcaccgtaggggctctgcacctgcaccataggggctctgtacatgcaccacaggggctctgtactcgcaccataggggctctgtatgcgcacggtaggagtagacaaggagatggaaggagatgctttaggacacgtgcatacaatgggacactccagtttcggcaacctcggtctagcatcatgggtagcagccccactcctcctctgggtcctgtctgcagcagctctaacagcagggtcaggtagctgtgccagcggctgtacatcacagagccagaaatatttctggcctggcccatttcaggaaacatttgccatcctgatctgaaggatcctgaaagcatctgttttgtctgatcccatctttttctgcccactgatgaacacgtcatgagctcacgcagataaaccagatgcttgctgcactgcctgtggcactacaacctcaacagtgatgctgtcacaaacgttttctggaattttctttattctttttcttttttggtagagatagggtcttgctatgttgcccaggctgaactcaaacttctggcttcacgcaatcctcccatagcactgagattacaggtgtaagccactgtgcctggctggaattttctaagtcatggtgtagagaggccggctatcctctaatgcaaagcaatgccaggagccacaagtcaacacccacgagccactgatgtgccggccaccagtcaacacccatgagcattaagcctgcacaccactgagaacaaagagaattaaatcctctttacccttagcaaagactaagtttcatgaaatttctgcagggaagaattcttgcatgagacacatgggaygatttatgactcagtgtcccgaatggargagcctggtgttccagacacgttccagcggctcccggtgttcccaacatgctccggtggctgtggacaagtgggccttgacggcacygaactccgtaaaggtctcgtgctcctggagcgacaggctccatctcaccgcraggccacgcagcagaggaagtgcgccccgcttccaaatgattaatccgatgctctagtccacaaggcaggaaattttatgttctaaattagttacattatacccaaaacctatcagtggcttgataacttgaacatataattctataccttttactctttaaacaataattcagtctaatcctgcagctgaagccaagatttccaggctgaaagtgcactttccatttgattaaatactaataaatgcaagaataaaataccagtcttttatcttacagtaaattcttcaaaaaccatatactctaacaattaattatttctctggagaaagggacaggcctttcccctcgaagacagcttggtagtctccragtcttaattatgacagataaaacataatttatagtagtccagggcttacagaaaaatgacatcatagtcgaggttctttgattcttgaagtgacctgtcagtagtcagggctctgggaggagtgccccagacaatcaccaccaggcccaagagtcaggacagtccctcttcctgcrgagacatgccccatgcacagagctactataatacaaacggcaaaatatgtatgtatacagctgatgctcggacagtgcaggggttgggctgtygaagccccacacagtcaaaaatccacataaccttttgactcccccaaaacttaactgctaataccctactgttgaatggaagtcttaatgataacataaacattcaactaacacatattgtgtatgttacccatattatacactgtattcttacagtaaaataaactagaaaaagttattaagacaatcctaaggacgtgaaaatctatttactattcattaagtggaagtggattatcatgaaggtcttcatcatctccatggtgagtaggctggggagggggagggggaagggaggggaggagggggagggggaagggaggggaggaggggcagggggaagggaggggaggaggggcagggggaagggaggggaggaggggcaggggcagtcttgctgtctctgcggtggctgaggtagaagaacatctaagtgtaagtggatccacacagttcagacctgtcttgtccaagggccaaatgtgtgtgtgtgtgtgtgtgtgtgtgtgtgtrtgtgtgtgtrtgtgtgtgtgtctgtacacacatcatttagaattttctcatctttaagatttataaagttttttcacatatttcgtgaattaaggaagtaaaccaagtgaaatgctgctgaaagaaggtggcaaatttcagagatgaaaaattttttttctatcattataaacagagcatctggccaggacaccaatgctggacacggtgagatasgcttyctgatgtggagaccatgtgagagtggtgcccggtgcagccatcccacatcctcccaaaggacgatggagacagcgctccctccccagagatrcctgccactgggagcccacagaggtgcgaaatatctccaaataaggcaggcaggcccgagccacacaacatctgctaaagcattcgcatattctcactgcgggtgacaaagccacaacccatcatggtagggaactgggggaaaacttctgtgggaaacccaaaggagaatactcattcattcaatcagcagtcccgggctgcggcgtcgcagttacatttgggaatatgctttcccgtggggtcacagtgagggtttggagtcagggtgtggagacaggaagctggtctgggcctcagcccaccctgagcaaacagggccccagactttttcctcctctgcaacaggaaaaggacagaggcgagcgctctcgctcatggccaccccaccctcaagaagccttgtgcgacatacggcctcatgagacaggtgagccccagcgcaggtgccatgcccatgtgtgacgccgtgacacccttcctcccgtgaacagtaaagcagactggcgatccagcactgggcagccaaaaggtaaaccgaggtagagaaagttgccagagccatcaaatgagccccaagcacgtgtcagtcatgtggcaactgaggacacaggaggggcacagtgcagggaggccacagaacagaggtgaggtggggcagggaggcgacagaaagattcacgatgtgctctggggagcctgtgctgggctgcgtgtttcctcctaacacccacccatcccattactagaaatgagctaagggggcccgtgccctctggccaaagaggaccacaggacctctgaggtccattcagaagactgcccctcgctgtccaggagccatgggcggagcaccagaaacccccaagcggagctccagctatgacctctcctcccattctaaggtgtccctaaggccttcttctaccctctgtgctcacatggccagtcttacctggagaagctggagtgggagggacggatgcgcagacagctgactgctggacaccagtttgtttccattggagccccaccaccaaccgcactcggggtagaactgtcgacattgctaaccccaatattctataagagttggtatttacattttgatgctgcataaattctcaaaggtctccactttcaccgatggcggatttccatttctgctatgagtgcacataacattagcgacccataagctaacgacaaaaacctggctgagtttccaaagggaaggagatgagcaggtgccaagaataccgctccttccatctcattagaaacaagaaatactgggcctgaatctgtaaaatgttattggtggtgggggctggggtgggggaaagctgttttcccaagctgcttcgtattgattcagctttttattaaaattaatctgataaaagtttgaagtagatttccattgaagaggaattctttacagtattgggaaagggaaggcaacgtgctacacggttttgattctgcttctatagcagctcacctgggtccagccagtgtctcacctgttcatcacacagctctcccatctgctttctggaaacaccatgccgggtaagargagggacacacctgtatcccttcaccccaccccacgccactgtgatatcagcacgcccccggccccactaactcttccttgctctgctcagccatgcacgtttcactgaggcagccacwgcctctagaaagaattcyctatttggtgatttcaattatgaaygtgctcctctrtggcaacacgtttctaayrgcaaagctgatgtgggtcgtgatgagatcttgcccaccatacagacatcaaagacagaaagggcctgggctattggctggaacttcaaatggagcaataaaaatagcaagaggggctgggaagagacgaacttacaataaaatatttaaagaactaatataaaaactgtcatgagctcttccttggacgtttaagctgggaaccagcacagagtgaggctgctcacacccaaacctgtagacaccacatacagagttcaagttcaaagactgcgtttagatcctgttccctggatgatcaccgtctcattaattaaaataaaataaaataaaaaataaaacagacccttcacagaaagactgttttgctcttttcccttgctgtggatttctcagtagcaggcagagacatttaaatgtgaatttgaagactgcacctctgttagaggctgtcatcaacatgggtaactactcccgctaagtaaacctgcttttacagtccacaggcccacctgtatgcaggccacgctagctttcttcccttgaggtcataccacttacaggatgcctcaagacgtcaaggtcacaaactctggcatggccacattcaaaggtccataacccagagccagagcccaaatctgcaggcagaaactgccccgcgctcagccaggaagggataaatatccgcaatacactctgtatctaggggactggagcttccactaaagcaccaactttcccattaaagagccagctgaaacatgtgctatcaagtaatgagacaggacacgtgctatcaagtaatgagacaggaccctcaccccaaggactctgcactgtatctaaggagcactgcccttcaacggggccttgcggaaatcccccaaatctgggaacaccacaagtggagtccccaaccccacactccgccctgtgctcaccacctcctggctggactgtgggctcccagggccgcagctgctgctcctgacggggccttggcgagtggggaagcagcagctgtgggtcccgcctgtcctgcacacgtgtcctctcagacgagacaccaggctgcactgtgcctgcaggtggatctgctgctgctggacagtcagcacacgtctctcaatcccctgaactgtgccctccttcctgcccccagccactgcaggaagctgaggagcggagaaggggcagaccccaaccctttctctcaggtcccatctgtctgctgggtactggttagagtccaatgacccccaatacctgacacagcttccggaaaatctgcatgggcccagcttctgtcagtcctgatgctgacagcaagaggggcaaggccatctccgggtggggcatgctcactgtgttaggccatctgagctgccataacaaaatcctatagactgcgtggctcataaacaacagacatttctttctcacagttgtggaggccaggaagtctaagaccaaggcgccggcagattcagtgcctggtgaggccccacttcctcgcagatggcgccttcctgctgcatcctcaatcgtcgagggctctacctctttggagtctctttcataagggcactaacctaatctccccccaaaggccccaactcttaataccaacaacttacgggcgaggtttcaacatgaattttgtgggagaacaaacatttggaccatagtactcactgtatgcaaaaaagcaagaaggaatcagactgaactaggagaaattatagtggtttaaatgaaaatataatgtttaatatagaaaaatcatttggccaaattatttgatttgaaatacttctaatatacacggggaaagatatacataaaatccacatttatacatggaatctatgtttcaataaaaacaaaagactacaataaaaataaatgacacaatgacaaagtattgtgcattgttcttccttggaaataggaattattacaaaattatatgtaaacaatacccaatctttgttcaaataattgattgatataattgtatctctctcatattgatatattctcactatcacgaggaaaacctctattgtatatttcaaacacgaacaaaaatataaaactttgtgaatgttattacaaaattcagcaggtacattttatctaaattgcagcagaatgaattcttcaaacaacattcacagatgaaaatctcagagatctgcagtgttcatttcaaaggtagcctgaattagaggaaaaatgctggttgtcaagaatgaaaaagctttgataattaactacttctttaaactctaagaacctaacctattagcaagcaaactcacattaagtatctgtttgtaaacgttttttagagaaaagatactgccattttctccacttctacgactacccacaggacttactgcacactgactgtaactggggctcagccgtggagtttggaagcctctgtccgcaatgaagaaaagacgctccaacatcctcatgaaggtcacagcaagagtgtgataaaactcactgcatcatggccttcccttgttttacaacaacctttagaaagtcaagacattctagttctccttgttttccgatgctgaacaccaaggccaggataaagtgtcaagaactgccttggtggtccccgaggctctgaagaggagccgcggggtcacgtttcctgccacacccctgcactcctagacctggcactgtggattctgggcctcctgctctgagctgctgctccagacacctgccagcagccaggggtcgccggtggtgccaaataaccaggtgtgtcagaggtaacgtcccagacactccttttgtttaaatgttaggaaatatatttttattgtggcaaaatgcaatatttatgttaactattttgtaagtgtgtaattcagtggcattaaatacattcacaaagttgtgtatccatcacctctatctatagccaaaattttctcattaacctcagcaaaagctatgtccccatttaacaatagctctccccaccccccagcacccactattctacttgatctctgaatctgcctgttctgggtgcctcatgtctgtggacccatatagtacttgtccttttgtgactggcttatatcactcagcgtaatgtctttaaagtttgtccatgttgcagcatgtgccagaattcccaccctttctaaggctgaataatgttccattgcatggataggccacatttaatgtatctgttcactcacagatagacgtttgtgtgtgttctccttttggccactgtgaatgatgctgctatgaacaccagtgtacaaatatctactcaagaccctgctttcaattttggggggtatgtccttaggggtagaattgctgggccacatgggaattctatgcttcatgttttcaggaacctccagaagtgtcccacagcagctgctccatttcacattcccaccagcaacacacagggttccaatttctccacatcctcaccaacacttatcataaacgttatcaaatatacttatattcaaggcactgaacggcacagactacaattcaacaactgcttcacgcatcgctaagccacaactcaactcagaaacacttaatagtaagagttgtttagtgacattgatggtacttccttcatgccaggcactcactttcctcttctctaatccttacaagagccctgcaaatgagacacggtccattcctctgatgatgaaagacccgaagctcaaaggcatgagaacgacccttccagagacctggtgtggggaagtcacagggaggctgtggtctgactctagggtgttgaacacgcctcaggtggtgagattagttgagacactagtttattaactatagatttaaattaacgtgtaacagaataaacaaaatgagcatagcaaacacttgttctcactgcaattccttaggaagaagttaaagcgggtgtttaaaaataagttgatataaagaaaacaagaagcaagcagtactacaggcagtccgcaaacaggtgaaactgatcgctgagggaatgacaactcaggtcaattaaagcagggatggctgccaacacctcgccgcctctaccccaccacgtgcgagggcagaatcagggcctgtttctttctgcgccccccatctccagcatcctgcatctgcagagcagacacttagcaaattgaattcactgccctttcttggccagccacacacccaggactgagccctgagctaggcggctttaaatcctcgacctggaaagaggacagccagactcagacctaaggaagagcagcagccagccttggggagaaggtaccacgagacagcgccattccctccacagcggccagtgctgggagcttgtgcaatgcggattccgatacagcaggagtgggtaggcccaggtgatgctgccagcccagacgccactttgcataggggggctctaggcctgcacagataaaactagtcccagctctaatgggatctagggctcttgttaacctattcagagctctgcccttagtatatgctaggcccctcatctgatccccaatagccctgggaaggtctcctcactaaaaaactgatggccaggtgaatatggctgtgttaaacaaaacacacaacccagaaccttggtgctggcttaacgcaactactttgggtgccatcagtgttctgaccatcaagaagctcactgcttaattcctggcatattcaaagatgtttcccattacaagaagcacgtggctgcgtctggtatacggggttcccatcacatgaagcatgtggctgcgtctggtatatggggttctcatcatgggaagcaccaggctgcatctggtatacgggttcccattacaggaagcacatgtctgtgtctggctgcagatggtatacggggttctcatcacagaaagcacgtggctgcatctggtataccaggttcccatcacaggaagaatgtgcctgtgtctggtatacggggttcccatcacaggaagcacgtggctgcatctgatatacagggttcctactgcatgaagcacgtgcctgcatctaatataccgggttcccatcacatgaagcacgtgcctgcatctagtataccgggttcccatcacatgaagcacgtggctgagtctggtatatggggttcccatcatgggaagcaccaggctgcatctggtatacgggttcccattacaggaagcacgtgtctgtgtctggctgcggacggtatacagggttctcatcacggaaagcacgtggctgcatctggtataccaggttcccatcacaggaagaatgtgcctgtgtctggtatacggggttcccatcacaggaagcacgtggctgcatccgatatatggggttcctactgcatgaagcacgtgcctgcgtctagtataccgggttcccatcacaggaagcacgtggctgcatctggctgcgtctggtatctggggttcccatcatgggaagcacatgcctgcatctggtatactggtttcatttattttcctgcccttattctgtacctgaacccatcatctatttcttacgaatttttattttcatcaatatgtacacttctatcaacttcctaaaactctttgacacatatctgttacagatcaatgaaattactaaactgaaataaccagcaagcccccaatgcatgacagagcttcagatctgtcagccataatttccaatagagccaataatgtatccattctcactcatcaattccagtgttttccccaagacacgtggttcctatcatatttgtcatccaccaaaacccttcctcaagggcacccgcaggccctcaacgtgctcccaccaccaggtgtggctctgcaccgattcagtcctctcacctgttcaacatcttccaacatttcacccattctcacgtgtcaattccagcgttttccccaaggtatgtaacttcctacaaaaccacatatttctaacaactatgttatattttagcctctatgaaagaccggaaaatattctccgagggatcatctctgtggcgcatcccatgaacatttcctttccttagatgcccccacctggcaactcctggcgtcctggt

SEQ ID NO: 96665 - DNA, 62518 bp, Homo sapiens
tcttaagatataaaacagagcaaatcttaaagtttaagaaaatgacaacactttgggaggctgaggcgggttgatcacgaggtcaggagttcaagacaagcctggccaagatggtgaaacctcatctctactaaaaatacaaaaattagctgggcgtggtgggggttgcctgtaattccagctacttgggaggctgaggcagagaattgtttgaacccgggaggcagaggttgcagtgagccgagatcacaccactgcactccagcctgggcaacagagagagactctgtctcaaaacaaaacaaagcaaacaaacaaacaaaaaccaccactaccaccaccatcaccaccaacaacaaaaaaacaaaagaaaaagaaaaatgacaaacaactggattaaaatgaacaacttttgctttactaagagacaacaaatagagtgaaaaaacaagccacaccatggaagaagatatttgcaacaattgataaacgattagtattcagaatttaaagaatatgaatgaatcaatacgcaaaagataaacacccaaatcagagaatggacacacaggcatgagcaggcacttcacaaaggagggaacaggaatgacccaaaatcatgagaacagatgaacaactgtttagtaattaggaaactgcaaattaagacaatacttttgtctattgattagatgtcaaaacataattaaaaataaaataaaataaaatatggcactaccaagggtcacgaaggatgtgaagcaggaaaacctaatatgctttcagaggaattacaccaactctacccattctaaaataccacttatttaaaataatccattgttttaaacaccactccaaagcaagacagaaaccccccaaagtccactaacccagtgctttttatcacttgtaattttttgtttttttttttggaggaagagtctcactcaggctggaatgcaatggcacaatcttgcaatctacaacctccgcctcacagattcaagtgattcttctgcctcagcctcccgagtagttgggattacagatgtgcaccaccacacctggctaatttttgtatttttagtagagatggggtttcaccatgctggccaggcagctctcaaaatcctgacctcaagtcatctgctggcctcagcttcccaaagtgcagagattacaggcatgagttacccttcctggctatcacttgtaatttttgtgtcaaatacattgaaagatctattttagacttattgaagaagaatttttaatcatatatcacttctgcatacaaaaatgaagaaaataaaattaaggtatttctaactatcacagtctaacttttctgagtccaacttgaatcccatcatcagtacccacgtttttccacacactgtaacgtctctgccattcaaagcatttgtcatacagtagttttgacactgggatgtgaactcatccacacttctgccctagagagagggcctgtgttccctcccattgactcttggcagctgtgactgcttggaccaatagagtacagtggaagtgacactgtgtgacttccaaggtgatatcataaaagtctacaatttctgccttgctcactgaaaatactcactcttggacctctgggccacctgtaaaagcccaagcatcctgaagctgccatgctgggaggaagcccaggtcacacagggaggctacatgcagggtctccattcgcagtcccagctgagcccagcttttgagccctcctgcccaggagccacacttgtgagtggagcagcctccagataattccagtgcccaatccttcaagtcatgttgggctgctcaagccttcccatctggggccccagacacgaggagcccttcccactctgccccgagtgcctgatcctcagaacctgtgagcataataaaatgggcctgctctgtgtccctaaatgaaggtggtctggtgcacagcagtagagaaccggaatgtccctcattcacaaagactctggcaacactgcagtttccgtctccttccagatctgctaccccctgggggacttcagtgtcacacaaatgacctgtcactgccaacactctggcctcccagtccttgacctcctcacccacagcaatgtcctcacctaggtcacctgggctaactcttccagtaaacaaatggcagggtctgggggttttaagggacactatgagggctgttgtaagggaaatggaggcttcctcttgtggcccctccaaaggtcctgtgcctccccctggtgttgtcaacatgcaggacactgggaagagctgcaggtcacaaagtcaccatgtcaaccttcctgttaatcacaacagggaattcataacagagttggggtgggaggtggggaactggcatcactcaccctggcttctgagccagtgcctccggcttttcaccagtacttgattccttctcagcgcaaatatgcggatgtcttttgtcacctactccacagatggcgacactgtcttgccactcacctcagacaagtgagtgctgctttgagccccaaagggaggcctgatgagctgagccatagggagctccagggagctgaagggctcccagagaccttggttgggagcctgacagcacacggggaaggctggtcagggcaactcacagtacccaccctgaccttagccccggatcccctgcatcctcctacccatggctgcaaggttacctgcaggcccctgtgctccagaatttctcagcctccccgttcacactcccctgccctccctctaccctgcctccttccctgggaggtggctgtgaagattcctggggtgcaggggctggcagggtgggagtgtgtgtcctgtgaacacacacctgtgctggctgctgctctgtgcctgttcctcctgccctggccagtgaaggagggagacagggtcagagccagtggtgagagtcatggggctttagtgcagggatgctggcaggcccagacaggggagtccctgtgtggggttctgagctccaggccaggctgggaaactggtgggagggaggtaggaggagcaagctcaggtggcttgaggtggcctagagaggtgcccagacctagcagggtgcactgcagagttcctgtttggcgggagatgagggcacttccaatgcacatgcccagaactgggcccagaggaggtgaagtgcaagagagaggtgaggatactgaggactggatgggggcctggaccctatttgcagcttcgaggggatacaaggtgggctgccacatcttgagctagggggaggcttggatctgtgtgtcctgcgctgtgggtttggcagagagactggagtgggtgtgaggtggtaaaaagcaagtctattggggaggactgtggcgggtgacccagaaggggagtggggtttgggcatggccagaggaaggccaggccatggcctcttctgggtatggatgggtctggccttctcccctcctgagctgggcaggcagggctcttagagctccggccatagcagggactgtctgcccgcagtgggaagccatccttcagggtccatgctctgctcagccttgctgtgcaggctcagcctgtcacattggattagcctgaccctaagtccccagcctgtcccagtcctgccaccagagccagtcctggctgccccagcccattctgtctgctttaacagcagctgacaggccacatcccccagccagtctgcagatcagtgttcagcccctgcatgcacagccgtcagggctgcctctccagcttttggtctttttgtttcaagggcacaggaagtcaaggagtccaggcagtctaattaagcagatttggtatttcctgtaccagggtaaagagagaggaagaaactgagtcagggtcaggggtctggggctgtgaggtctgggtgcagggctgggggcttagcaggatgacttttcccaaatgcagccctccctgttaaaggacggagtgcccaacacaagagagtccttcttgggttagagtttggattagagttagagttagagtgttagagttgggttagagttagagtttagagtttagagttagagttagagttagagttagagttagagttagagttagagttagagttagagttagagttagagttagagttacagttagagtgaatgtcaaccccattgtcagtgactgactctcagttgcccatccccggttcagggttagggttagggttaggaatatcggccccattgcagttcctgactcacagttgctcatccatgggaagctcccactgtcaccagagatggtctaagtggggccctggtgagattccccaggcctacattctctggaactaggatgagatcagaaggcctgtcatctatggtcaacgtcacagtaaggaatgagcaggacagagcccttgcttggccccctcctccatccccgaggccttgcacagtgagcagtggctcccagagagcttgagaggtaatttttagcagtccacgtctttccacgtcaaccacttttttggagttttttcaggaagaaaataaaagagggtctcgacaaacttcagaaaatggtgcctgaaggacacatattcatgcaggcagggtttagaaatgtatacaccccttgagctccaagaatcgattctagttgacaaggtcttagagcatcagtgggaacatttcactgtccaggctcaatatttcttcattttcttgcaggcaattcggcagatggaaaatttcaactccaggtttaagcacctgccgtccccatggtggtcccataggtggaacagagctgggcgtgagcctcagagagctctgtgtgcagactctgcaaggccacacctgccctgcctcttggagcaagttgctcacctgttctgaggtccaggtccctccctggtgcaatgagcatagtaagccctcgccccatggagttctgagaactgtgtgggatcctgcgtgtgcagttctggtgctgataaccctgaggtgcttgccctccagctgggctgtgtgaaaaggaaaagagaagagccaaggggttttcccccttgcacacaccttagtcttcctcctcccttcctcatttcccctctgagtgacttgcatcccttgactgtgtctcagatgatgcagaaggctgtccacagctgccgaccccctccccacagtgtgcctgcaactcttgtcaggaaaaggcatggttggtggggaaaggcattgaggtggatgtggggtcccctgcccaggtaccacttacctggaatcctgtactcctgggcccagagatgctggcagggctgcccgcaggctctgcccacaggagagcccagctgctcctccccctacccatgggacaggcctgtgcttgtggagtcctggctgcagctgccctcaggcagaggtggtgcaggctgctagtgggtgagggttcaggcagcctggtgagaaggagcctgcccctctcagctcctcttttgtaaaatgggtgctgggctgagacctccctcactctaagggtctctgtgtagcaggtgcttggctcttggcagcctctcccctggaggatgagatgggggcacctggacatgccctggagtgatcagtgctgtgggcccagcagcccgcaggggtcctggagtgttgggctaatcagacccaacaccatatcgtgggagtgatgaagtctggtggagtcaaaggaatgagaaaaagacagtttgagagagaaagtgggaccagtgggccatcacaagtgtggaggctgcaaaggccctgagctctgggagcccatgctgtttattggtgctcaaacaaaaaacaggtggtgaggatgtgggggttgaaaggaaacagtgtatcaagtgaatgagaaacatacagctgcttgagataacggaagtgctagaagcaaggagccagcaagtctagcagacatgcaagccctgcctcagcttctctcccaacactcagcttttctcccaatacaggaacttttggaggtcacttctggggcctttgctgagcaggccactccttgcttctcctgcagatgacaaggtttccagcatgattattgctatgactgatggaacaatgatgaaacatccatctttggacactctcaaagaagtgagttcagttcgtatttatcagcattttgctccctgtattttggtaattaatactcaatgccttctttcccttaagctgaaagggctcggagcctgggggccaccatttataccgtgggtatggctgattataggaaagacccagtaattccaaacaggttaaccaggcaccaatatagagccttgtggtcaggttagggttagagtatggaaaggtgtcccagacagctttcctagggccaccccaagaagggtcatctaatctgcctcaagtgagttgggccaccctatgactactgcagaaatgacagcatgtcatataaatcctactaaaccagaggggagggtggaagagctccccactccctgagagtgggctgctggctggagaaggctgtggccctcagagcctggtattctgctgcctccaaagcatgggggcaggacgctctcccttgggctggggatctgctgcatgctcacccctgggctgggagtccaaaccagctctgctctctgtagataacagcaatggcaggcggtccggaccatgtgtttgcagtggaggatggcttcaaggccctgagaagcactgttgatgctgtgagtgagtggaggtgaggggctgggggtctggctcctgtggccagaagctcactctccctgccctgccccacccctcctgtgttccacctcatgtcaaagacctgtcttgaagtgacgtctgtggagccttcctctgagtgtgtaggaagtgagaactgcggaggccctgcggttgccaaagggtggtgtgcactagtgcatgcgtgtatggagtgtgtgcatttgtttggtatgtgtgggggaggatgtgtgtggggagtgtgtgagtgtggtgtgtgtatgtggtgtgtatgtgtttggtgtgtgtggtatgtgtgtatgtaatttgtgtgggtgcagtatgtatagtatgtgtgggaagttgtgctgtgggaggcttgaagtgtgtgaagtctgcggggagggtaatatgtggtctgtgtgttgtgtaaacgtgtgtgtgatctgtatgtgaggtgtgtatatgtgctgtgagtgtggtgtgtgtggggtgtgcatgagtgatgcatctgtgtgtgttgtgttgtgggtgtatgtggtgtgggagctgaggagggtatgtgttgtatgtgtgtgggggtgtgagtgtgtgtagggggcatatatgcatgtgtgtgtggtgtgtgtggggtatgcgcagagtgtgtggcataagctggggtgctgtggaagtgtgtgggaagggtacctggtgcgtggtgtctagtgtgtgagtttgttgtgtggaggagttgggagtgtactacttgtgtgtgtggtgtgtgtgtatgggatgtgtggtgtgtgtttgctgtttgtggagtatgtgtgtttactatttatgtgtgtctgtggtgtgtgtgtgtacagtgggactagagtgtttgggcgtgttgtgtgtgtcatatgtgggtgtctacatggggatatcttgtgcgtgtggcatgtagggaaggaaatggtgtgatggcatgtatgtatattttgtgtgtgcattcagtgggtggtgggtgtgtgtgccatggctgtgtgtgtatggtgtatgtatacgtgtttgctgtttatgttgtgtgtgtggggtgtgctgggtgtgtgttgggggagtggagagtgtgtggtgcgtgtgtgatgtgtgtggtgtgtgtgtgggatgtgtggtgtgtctttggtatttttgctgtatgtgtgtttgcgatttatgtgtgtgtgtggtgtgtgggtgtgtgtgcttcgggcgtgttgtgtgtggtgtgatgtgtgtggtatggggtgggttaagtgtgtggtgcagtgtgcatgggtgagtgggtgtggatgtgtggcccacatgggtgtgaatgtgagtgtctattgctgtggggggaatatgcaggggtgatggtgtgagtacctgtgtacaattagtgtgttgttagctcacaacaataagtttaactctaaagcaagaaaagacatgtgtgagaagttctcagggaaacaccagcaaatggcatggaacagcagctaacccagaccacagggcaggagcagccagggctcctcccaggaaggccaggcaggtgcagaaggtgaaatatctgtataatttaccacatcaacaaaacgggaaacagggaccaagcggttatctcaggggatgaagaacaagaagtgggggcgtcaacatcccacagcaccctgtgagcagaaggaaacctccatagcccaacaaaggcatccgcacaaacaccctcagctcacctcaatcccacaggatcagtcccagcatctgtccctactgtctggaatgtggcaagggtgacttcttgccatctggggtcccggcatgggtggtgacattgtgtggtcctctgtgatgacccgtctgtcctgacctccgcctgcacacgctgggactccgcatggccggcatttacgcaactaccgctgctggagaggaagagagccttgggtgactctcttccatggggacagcacgaggctgggtgccgctggccccagagcagcagctgggctctggcttcccagttcctcactgcagggtgccctgkcagtaggctgtggggaccgacacacggtccatgtctgagctctgctctccatgggcacaygaccagagcaaatagtccaatgtcagcgagctccagaggtgcctcccatgaacagaaaggacgctgtcaggcctgtcgtgagtccctaggcactgggctgtgcagggactggcacagggctgggagctggtaggacccaggaacaggagctgtgctgacacttctacgattggtcctgggctctgtccccgacaccgcctctccccgatgcagagctgagggtggggatagagtagagagctcccctccccctcggggtctctttctgctgctcctgatttaaagctgctcagccatgcagccagtatgacagctgtgctctgatgatgtcccctggagatgcacaggctgtggcgtctgagcagccctgtcaacctgtcaaccccaggtggggatgtgagttgtaactcctccctggaggcagctgagtcgaggtgacaggtgccctctgcccaccagctcggccctctgcctctgcccaccagctygrccctctgcctctgcccatgtggcccgcagtcacagccctgacctgtcagctgttggctgagttgtgcaaagctgccccacatggagggtgacagtcacaggagggaaaggccaaggcaggagcctggaactcaaatgcaacagaatragccctctcagcaggctgtcaccaagaaaccaggagggctccagggagcccaggaaggaggccagggagggaggcacacagcccagactccctcattcagkcctgggcctcctatccagcctgggagaggcctctggtggcctcactgctcyaggcccatcctgagsccatcccccacacatggctggagggttttgacaggcatctccctctccagcctggcaggwgtctgaggctcttagcagaacccccaggccctccaggggccgctccctgttctgggcrccttgtgcagaggtgggaccaggtggagcacaggcactctgcaagccttgcctcacctcgaagggccgagcccacctgtccttcacagccctgttcatagggcacctcatcctggaagcctttcctgatgaccagcccctctgactccctgcaaccaagggcttggtctgtccctctcatcagtcacttgtcacccaggrtgtatcatgayttccgrttgtctatgtccaagtataattttcttctttagttctttggttttcttccaacctttattgttgaaattttcaaacctataggtgagtggaaaggattgtgcaatgaacacaaacacacctctatccaccactgggattttacaatgaatgtttgcccatgctcctttgtctgtccttctccctctcttttcatccatccaccttgcaaaaaaaaaaaacaatgtttgcaatacatagaatatgtagtcctaacacagcttagaatgtaatttgcaaccaccctgatcgtgaagctttggggcagccctcagtcctgctcagggtggccgagttgggctgaccaaggggcgcaggccacaggcccagttgctccctcccgggcacactgagctcaggtccgactggccagggccctttggacacctgagcaaggaaratgttgagaatgctgcctgatagcatcagatttggaagcagctgttgtctgccttagcggtaggagagcacccaatgcttaccctgagtggggccaggtctggttgctcagcacagggcaccaagctggcctttcctgctctctcacagcctcagtgcccccaccaggcccagggttttctgaggacarcatagtatccatcaagtgggtgcccacaagggctgggctggcaccttgagcaggaggagcaggccaggcccagccggctgatgtcagcagtcagtgtgtggggccttgaagtgaggcaggcctgggagctcctcatctgaggagcatggttccctaggtcccagccaggagctgacacggagaaacacaaacccactgaggcctgcatttcccatttcctaagaaagctagaaatctggatatttaggggaaatgttcaggctttcaactgtgagcccccatttttgaaaatacttgaaagcctcagaaagtatgtcagcaggccagcttcaccgacagcctgccttgaaggtgtgacgctgcaggaaagcaggaagcagggttcagaggaagctttcctcgggtgcatggactgggggcaccccaggcatcagcagggattggaatgcgtggggcctgggccaggaggcaggggtggaggccaatgcccttggcagctgcagacctgcggtctgctgactcctgaggccagccccacctgccctgtgtcccctgtggtgtttgtctcagggcaggagccacagtggtggaaggacacactccctgagcctcagggtgggtgccctgtggtccttgctggatcaggaagagcaggagatgaggagttacctgtaggtctctggaatcgcagctaaaacaggacttctgtgatggattgccctgagcagggtcgtaggtgcctcacctgtcctaccygagtcctggccctgcccctgcccctgtgggtgtcctgcctgccacaggcacacagaaagacagggaggagagaccccgagtgttcagcagccctgaaggaggcatcaaggcctgggtgcccagctgaggcatgagacatggtgtcttcaggcagccttgtggctccacttacaccttacatcagggagggcctggctgagtgcaccgcctgtacccctggggcctgagggagcaccacagatttcagggcaggaatagtactctgagcctgccctgtgcaaggaccaaggcmtttcctgagcgtgttggttcagggatggtagggagagggtccttgagtgtgctcaaggcccagctgcctccccctggaccctcagtgacaccagatgaagatttgacccagtggacacatagatgttggtcagacactgctccttccttacaggagtatctgcaagttgagttttgggggaggatctccaggaacagggaggtcagaggagaggcagccctccactcttccacattcaaccttttgaatgctgtccttgcagaatcctaccatgtggttattcatggaaatggctttcagaatctaaagaaacgggatgaagttatttgcagatttatcttcagtgaaagcactatcattggtaagttgtctcctcggtgcctctgagtcacgtatttcccacacaatgctgccttttcccacagccagccaagcctcccagcccttgccaaccattccctgtggaccctgtggggttagaggccatgaagacaagtggaaggaggcactgggaaggccggycacccctcccttcatctgccaagtggggaagtaaaaaatccacctgtgcctcaagagcatcttagacgagggcttcccmctcagtgaggctgggtttaggactgggtctgtgatcacagctgcatctgcccaccttagcctcagtttccccttcccttgagagcccaggacccaaagcccacaaggctgctcctgggaaatgttggcaaccccggaggtctgagtctggctggccaggtgcaccagtagcttgcccagaggggtatgtttaccttgcactgagggaggatgccagcctgtaggcctgggccctggaatcctggctcaggcacacattgcctgtgtcaccttgaccagatgagtgttctactctgagcctctattttctcaatttracatggagctaatatggtgctggttgtgtattctgtaactgaaatgcttgggaccacaaatattttagtttttagatttttttcaggttttggaatgtgtgcattatgcttatgtttcagcatccctaatcctaaaatttgaaatctgaaattctctaatgagcatttctttcaaacatcatgttggtgctcaagaagtgtcagattttgaagcattttgggtgtggattttcatattatagatggtcagccacagttgtacctaactaagcaaaatcacatgtgtagagcagttggttcatggaaaggctatagcatttgtttgaaagtcycctattatttggcaataattaggcatcaggagacctctgtgatggtggaatggcctgaggaagcgcatagtccaggcagacactgtgccctgggtgctgggggtagggtgtgctcttccccactgagggcctggggtgcagttggatttttggatcctccttgatcttcccaggtggccccttgatacattcatttgatctgatgatagtatgttcactgaaatctaattccagggccatatggtaatcccaggatgacttctsttcctccaagaggcttcttggccattttcctcctttctgtgggtacataggaaggggctgagcctgtcatccccacattccmactcatcagcattgtgtggatggtctcagggaatttggttttcattgggttataccttctcgggagtgtcttagggactgagcagcccctttctaaggaaagctaatgcttattgagcacttaaatcagattttgtgccaagtgccttatgcacactatctccctgaatcctcaaagccgacttacagaaattcttttgtatgtgtcaacctaaataacaaacagacaagggctctttacaagaaaatgatgttcatctgagaatagggcatcacagtgggaatacgcatgccatagtaaactacatgcatattcaggaaggttagattttacaggagatgtgagaaggattacataattgtttgagttagttcttcttggctactaagatcaataataatagaggtgaccccaatgtgagkttgcatgggcaattgcgggtcagatgtccttgcagaagtatttttgagtaaggttgcaatgrtctttgcacaaggttgtagtttggtagagatttgtgatagtttttgttatcaggtatacaagcatgtgaatcttctcttcataaacttccccaattcagcttgccaggatttttttgttgtttttttaacatgttaactccattttgattctgagaactttcacaatttctcccttttgatcaagatctttctgcaaacacctcactaatcaatcattctgtaattaggttttgactgtccctggataatgggatgggcctgtcctggttgcaggtcttggtccattttggagggagcaattggcaacttggagtaagtgtcaatcccttttagtcacagttgacctttaaaggatgtttgaaaggagtgactctcgggctaagtctatcttgagtccaytattaagttcaattttgtgagttccatagtcttgctgttatctcaaagtgatgggctagcattatggttacaagttgtacttctgcaaaaatttaacaagtaacatataaaaagtttaaaaatggaaaatacaatttgcataatagttyttatccatgaacctaggcttaaaggcaactgtattagtttgttctcatgctgctaataaagacgtacttgagactgggtaagttacaaaggaaggaggtttaattgactcatagttccgcttggccggggaggactcacaatcatgctggaagagcaagagacatcttacatggtggtaggcaagagagaatgagagccaagccaaaggagaaaccccatataaaaccatcagatctcctaagacttattcactaccaccagagcagcatggaggaatccgcccccatgattcaattatcccccaccggrtctctcctataacaagtgggaattatgggagctacaattcaagatgagatttgggtagggacacagccaaaccacatcagtaacccactgaataaatcaaatgatcataaggaattaggtgagatctgttttaaccatgtggcctgttttcttactttgtgtatattggtattgactttccaagaggaatttatccagggatggcatgcagtattagcaatagtacagacattttcttatttagtcaatgtataccaaaggatctcttaggtcagattctgtcaacttacaagcagaaggtagtaattgtgaaatttcaattactccattatcttgccaagttagaaaggtaaccttaaggagtgtaggagtctcattatactatggagtcttttccaatgtcttgaaaaaagctgtctatagtgtgcaaaggtcaacttctcatcctgatttgcagtttgtctctggtcatggcatcaaatggtttggtaaactttattttttattttattttattttatttttttgagacagagtctagctctgtcrcccaggctggagtgcagtggcacgaccaggttcacgccattctcctgcctcagcctcctgagtagctgggactacaggtgcgtgccaccacacctggctaattttttttgtattttttagtagagacagggtttcaccatgttagccaggatggtttcgatctcctgacctcgtgattcacccgccttggcctcccaaagtgctgggattacaggcgtgagccacygtaaactttttatgtggcccatacatcaggcacaaggctgctttcttaaaattcatctagtttcagcttatagggcttttggaacagaacagttttccatttatagtaattccatggaagaaggctggattggtggaacatagaagaattcgggatgtggtctactctatagacagataacaagaacttggacaacaactgactacaaatgctttttgagtagaatccaaaaaacttagaatagccatggttaaaaatctgataaaagttcacaatcgacaagaaaatttagttgtttccattacctgcaggaatttaagatattaaccataatcatgactgacagcatcatatcacaagtatcagacttataaatttcctataatctttagaatactcacatcaataacacagccaaataaatacaactttaaagaagttttaacataacaaccaaaattatgacttataatatattagattttgtcatataatttttagaacattcctatcaataacctacccataaatgtgactaaaagaagatgtagcctcacttctcatttgacaatgcttgtcatataatttaccaaataagcctaatcatttaatacctctataaattaaaatatatcttcttgcatattctccaagggcccaactggaaaatctcaaaattaattgtagttcaaaaggacttaatttagaattttgatccaggagaagcccaccaaaaatatcaagagattcaaagccatagatcaaaatagaatcacaggtcactgttaaataatagccrttcatttaactcgagtgattatcaggaaacttcaaaagcaatacagaaagttacaaatattttaaaaccttaacctgttcaaagctcagttttcttaagtaatcaaaaatttgataaagacaacacagaaaattatcttggtaaaatataaatatataaattgtttgtcttttaggtcagttaccaaaaggtaaaaaaaaatctcctgcaatgtaattgcttcttctcatgggaagcctgttcagtyttggaattgaacctgatgaaagggtccttaaattcaattagagataaaagaacatatccaagtgttatgaatgtacactcatattatagragagtataaacaagaagactagtaccttgagcagaggaatgtagagctcttagataaagtaaaaccacgtgaagtttcttggtaacrtggaacaattcagacatatcaagaaaagccaagagtacataatctagttatattggcggaaaacattgcttttcttggccttcaagataaacattatagtgccaggccataaaagccaagttagaactggaggaaaaaagttggagcagctgatgaaaaagttggagaagagagttatcacctcagccaaccaaaaagctgtaacttttcggaggaagggagtaggagcgctacaggctatggtktatggcctgcagaccatgtgcagtgggatgcagcagaaattgaacttctgaaataagaacctgaggaaaataaataccttattaaataaataccatttatttatttaccttatgataaataaaattactttctatttaataaataaataaattttataccttaatgaataaaattaccattcttcatgaaaaagattgcattccttatctgaaactggggaaattaaatggatctcaggaaaaaatgtgccaggaatagaaactgcctgcagtttagaagatggctgttaaagaaaacagcagtcagaattaaaaatcaaaacctcttgcaattttactaatagcaaatcaatatttcaagaaaactttggtgttctaatataggagaccaattttttagtttagtattactgtatttttaatatcagagctcaatctttatgaagacttataaataattttattctgattattaccaagtcaattacatgcaaaatttttttcatcaatttacccccccacaaatatttttgtttttgttgcatttgcttttgggttcttggtcatgaagtgtctgcctaagccagtgtctagaagagtttttctgatgttatcttctagaatttttatagtctcaggtcttagatttaagtctttgattcatcttgaattgatttttgtataagttgagagatgaggaaccagttttattcttctacatggtggcttgccaattatcccagcaccatttgttgaatagggtgtcctttctccactttatgctttcgtttgctttgtcaaagatcagttggctgtaagtatttgtgtttatttctggattctctattctgttccattggtctatgtgcctgtttttataacagtaccatgctattttggtgactatagccatgtgaatagtttgaagttgggtaatgtgatgcctccagatttgttctttttgcttagtcttgctttggctgtgtgggcttttttggttccatatgacttacagacacatggaaccaaaccaatrtcattgttcacagatattttaacccgggtatacagatcaaacaaatatttaattaggcatgcagaactaaaagtgaatttgccagaaaagacatgcctcacaaacaaatgtaaattatgtagaaactagggtgctcaaatcagaaaaacatttgtcattataccagaaagaattactggaaaagacaaaaaattgttatcatttcaggagggatgtaagctctttggcttacggtggccttatccaaatcagatgctgaatgaagtcaagagcttccacccaaaagtaggaggctcagcctgagagaagactctccagggcagaraaagcaagtcacagaaacagggagctccaagggctcaagtgaggactgcacaccaattccaagagtggctgatttcttcaagtagtggtcctactccaggtcctacttctggacaccatttatgtcaacctgaacgacagagagtttctctctaaaagaaaacagtatttattcaggaacggtgcccggcactgggaatrtgtgtgccatagtaatgtgcataatcagggaggtaaagaagacaaaggcttttaaaggagaaatgaagattagggaattgttttragaccattactcttgcctaaaaagatcagttacaagggtgacactagtccaaggctggacaggcagttcttgggcacatgttcctgtagaagtatttttttgtgttaagtctgcaatggcttttgtgcaaggttgtggtttttgcaaagtcttttgtgatatttttgttatcaggcatataggcataaaaccctctctttgtagcctttcttagccctaactgtcatggactttattttatttttttaacacaaatgactccattttarttctgacaactttcccgtatggatggagaactagagagaagcatgatggaagagcctgcccagggccatacagttcatgttgcagggcaggaaagcagacccaggcaatcttcctgccctaccagggccttctgcctccctgtggtggcagctcctgggaaagggggtacccagcctacctccgtgaagggcattcagctgcttcctctgtgggcctgtgggtgtactggcttcccaccctggaggttaccatctacctctccatacacaggccagcaccgacgtctcacagyggggagcccatgccacagctgtgagcacctgcgtagatggccattctgctcctggttgatggcttatccaggagtaaaaggaagcttattttttaaaataattgagaacaacctttaaacctattttcactattaggaagatatccccggaacatgtccctggagtgttggccaccactgaacacgtctcccctgcaccccccactagatggcagcgtgccttccctggtggctgatgccagaccggaggtgcaggtcagggagagacttccctctgtcctgcrtatgtccctatggggaagcaggggcagagcctagttctggcttctgggaagtgcctggatacgatttttatcaaccaaaataacaaacagagactgaagtgctatttattcaggaataaggcatggaaaacacatgccagagtaaactatgtgcatatttagggaggtgaaaaaaaagcagagaaaggttttcaaaggaaaatgaggaagatgccataattgttttgaaatcatccttggcgaaaacgtcgataccacgggttctggcagtcctaggttggccaggcagttgctggccctgggaagccggggtcctggcagccaagcccagtgggtagagagctggagccaggccagcaggcagatgcagcagggcccgtgccctccccaacacttcaggaggcatgaaaaggatgtgggctcaggatgagaaggttctatgtctacatgttacagaactctcctgagcccaccacactcccacaaaaaataaataaataaatatataaagaaataaaaattgggaaacaaaattacagacttaaaacaaacaaacccagttacctcctcaggcttcccccttttggtaaatggtgtcactgtccacccggttattctggtcaaacactcaaatgtcatctttgactcctctgagcttcttcctcacatccatcccaccagcaagtcctgttgcctccatgtgcaaaatacatcctggatctgcccaacctggacagattsactgcacaagaaataaaaccccaacccctttccagggcccacgaggccctgccccctgttctggatcacctctttccctccttgacaaggtcagcgagtcactgcccagggcattggcacatgatctttgcctggctggctcctcatctttttaatytcagctgaaatgtcaccttttcagagagaatttattattcatggaagttttcaacagtatacaaaataacaagaattgtgccataaacctactttcaataattctcaacctgcccccatctgctttccttggaacccttaccacagagtattttgaagcaaatccctggccttgcattatttcatgttcctctagaccagaaattgtggctctacaagataggagaagtcacacataatgaagtggctgtccctgcccctctggtcccctcacctcctctggtcatggacatcacagcacgttgcactctctgtcatctgttctgtcctggttttttttttgtttgttttttaattttgttttctgtgtcccatgcaatctctaaatgtgagtcccttgagagcagggactctgcctgcctgttcctgttacacagcagagcattgcacagggcctgggtatggtgggtgctcacaggggtctctgtaagaggaaggcagagcccagatgctggtcctgggcctcagggtcagctctgcatgctgaggacagacatggggagagacactggtcagacaagtgcatcgacattcttcccatgtcatttccttttagatgaacatccaatcagtatggacaagacttccaaaacttgccctggaccaaagatagaaaaacctggcaggaggccctataggttaggaggccagggggtcagggttgggcactgtgagctgtacagaatgtggatgccacccccactgctggggcggcacgtgtctgccactgggttaagggcaccctctccaccttctattgttggtggccgcccccaaggtattcagggatctgcagcatcctagggtctgtgaggaggacaggatgcaggagatgattgcctgaggaatggtacctttgctccaggttgcttctcagagttaagccaacagactctgtaaatacagaacagctgggatggtgacaccaagcagtggtccctggtcatttaggacasggtcacaatggcatgagacccmatgcagrgcccctcgctgcctgacccacttaccctttggtcatcattgctgagtttacctgcaagcgtttggggaatgacctctcattacccacgctgtccactggccaaggtcaagaactgcatctctctgggctggytctcaccgtctgtgttttctgtgctttagggagtacttcattgaagtcagcttgaacaacggcaaaacattcaagagcaatgtcagcatcaccagcaccacaygtgtgagtaccagcatggggctgcaaacacgtatgaggactgtccagagtcyctgcactagraggagatacaccctggggagcacagaaagggcagacagtttccaggcagtcccagaaagtagmgtgtgcagcaggcacctgaggctgctccaacccggcttccagctggcacaggtggttgaagctgggaggctgtctgccaggagcttagagtccagtacctcttgggtgtccaccttctccacgtggacctcccaggcccaggagctctggaggattccacacactgccatcagggtgcgtgtgccactgaactggtgccccagctgctgatctggtcctgaacctgctcatgaccctggcccctgagcctgcctggttgtaacctgctgtcattgcccagatgccttgaacctcctttctgcctctcctccttgctcrggcccctgagatgtccctcyctgctccctcaccaggtcctgcatttcgtcccctcctgctgctgaaggggaggytctgggcactgggacccgggctcagctccgagaggcccctgagaatggaagtgctgtgcccccagtgcctgcttttcagagctccacatctttgggcagcrtggcccagggccgcatagggaggaggatgtgctggagggacaggcgggaggcctgagcccactccaccrccttgtgtccagtcttatttgtgaggacgcaccagtgttgacagtcctccctctgggtctacccctgcctgtccctgcatatccacgcatggattagcaggctgaacgcacacattccccatcaggaatccacccactaacggctccacagtgacaggcacatcaggagcagccctggggctccagcctcaccggcggccttcatgctcagcctcggtggttcctctccttcagccagccaggttctcagcacaggccccctcccctcctctcccctcctttcttctcccctcccctcccctcccttcccttcccctctcctgccttcccttcccctcccctcccctccctgccctcccctgccttccccatctttctctctaaacagaactctggatttggggaaggcctgggcagcctgtattcccacggatgctgcccamgttccctttactgtgaagaacacccagagaagagttctggttgcttacaccccatgtggccctggttctgagccaggtctttctctgagctctctaaacctcacaagtgcccccagggagggaggcccgttctctttgcagaggtgtggaggctgaggctcagagctctgtgtggatgtgcccacggtgcagagcctggaattggggatagaggctgtggggatggacccgggtctcctgtccttgctcctgcgcctgcacctctcttggctgcagcacccccacycttgmccatcattgtacctgsagattttgtggtcctcacagaagccctgtgctgcaggcgaggtgtgcagtgagggtgggtttgtcagacagtggaagcttccgggactttcttggcagggctcttgggcagagactttcagcggggccagaggaggggtttgtakttcccttggragcatcccttacccccggccccactgttgtgccttgaggtgggaccacctgtagagaagggagaatgggcagatgggcctccaagtggtgggcaccaggatgaggctacccaggccctcccaggcctggcattcctctgtcccttaggcgtggttcatattgctgtctttctcagccagggcattttttgcaactggctctattttgtgccgcccctgctgcttgcgccactgctgctgtgttgtgtttggtggctgtgccgcaagaaggcaagtgatttttgcccacccagcyctggggcccaggcacaggcccaccctctgagggactctaacatgtgactgccccatgatcccgcctgtgggaagtttccctcagctcccagctcatcacatgagcccggggagtcgcagacctgtccacacattcccagagcctagcaaacctgggcttctgcagggcctcctgccccgggctggccacagagagctggcctgggatgtcctggacatggggctgaagcctgccctggctcctagagagaagtgaccccagaacccctgaaaccagggctgcctcaacaatccggacttctggaagccacagatggacaagggccaggaggcagcctytgtgtggagggaggaagagaggggcccccatgaggtcctgakggcccaaatggaggacagtgytgtaacccccagctgtctgtrccttgaggaaccagcatggatctcrgcacatgtctggtgccttccccattccttcatctgtctttactgagctccagcttcccctgggccccatgctgggctggtgagggacagaaatgaagctccccacaggcagctcacagtcctggcttgttgtggctgaggctgaaatgtccaccccacagaagtgggaagggccccctgtaaggcagagcaggagccaaaagcagagatggaggctggggcggggagagtgtcaggggtgctggaagctggggtggaagaagccagcccrgagagctgcagacagaggacagagcagagggtggagaggacagagcttagccccatccccaggctccggatgcaggtgtggctccatttggcctctctggatccctgtttcctggcagggacaagggtctggctggrgttagcttctagggactrcagggctgaggggtgaaggaggcctggcgagcacccagctgggagggacaccagcccagtgaacacaggggccaggagtcggggagcaggctgtggctcacctgggctggggacccacaccaggggccataggcagtggtgagtagctgaggtaggaggccctgagcctgggatggggtgggaacaggcctccctggccaagggtggcctctgmggtgctgcagagtgggcccagggaggctgcatctgcaaccaggtggatgcggacagtcacctgcaaatgctgggaccattgcacagctcccagggcaggcctcctccaacaaggctggccttgggagaaccaaggcgaccgggatgaagttgttagcatttaggggaagagccatgtctgcaaaccaggaggagtttgyktttttctcacgtgaaggatggtcccctgtggtgtgggcttcttactggtcctttcattccccagayacacatctgggagtggccggcactgtgcccggtgctggctgaggcaatgacaycatacccttgctcttaagagttgtcygaaaagtcagcagaccattgtttyttaggagctagagcaggagataccatcatctccaccaccacaamctctgcctccactgcctctgcccccggctcctgtaaacacctgccccactgtgattgtttgttgctgtaggtgtcaaggagtgttctggatgagaaggatagaggtgagaagcacagtggagaggggctgcgacccccaggcggggactgtgggaggagggggcagatgggtcccactgtggagacctgggccctggaggaaggcaggctctacaggggctggactttagacacgtgatgccaagagcaaccagatgsccacctcascctcgtgccccagtggcaggcatatatgagggctcctgtccyctgcaccaccaggtctgtccccacacattgaactccctctctagaaggatccatgtttctgtacagtggcagcttctgatgtctgaccagtccctggtttccacaggggtgcctcagctctggcartggccctgggctttagaccacctgcctgcaggtgcatgggtcaggcaacctgagtcacaaaaggtcatgcagatcagaaagaaaaaaaatagaaatgaccagtcctgacacacgttctcaccaccacgaacactgcaaggatgccaggggcacctgccagcccgggcagcaggatcttcaggcagtgaggaaaagctgtcactgagtgggcttgtcgcctgctgtratgggctgacaggtgctgcagggaggggaggaggtggaggcctgaaagcgccctcacaagacacctgtgcaggagcttgagccccggagccaacacaacagccactctccctgaggaaacctccttcacgggcgggtccagggcccatcttgctgaggggaacccagccaggcagcagcagggggccctgcacaggggtagagagggcgcctgggtggctgatgttgagggagaaggaccccagagttcctacctggctctgcccctctcccccttggtcctggctctgtctgtggtcggatctcttgcttcctcctgggagggtcaggctcctctgcagcctcagtgggcatctggggaagccaggcctgtctctcctcagagtgtggggcacatgtctccagggggaggaagtcacctgccagcggcctgcactgccttgcaacacacggccctcatcccatccccaccggagcccagaaaggcctgactgcagcgccgagtggccaaggggctgcccgccgtgggtcctgggctgctttctggcctgtttttctctgccttcctcttctctcttccctggtgtcaggtacctactccctgagcagggcatggtcctctcacctgccttccccttgtgtgccccagcagcaaggctccttctccctgcccaggcccccatgctgggcccccaggcctaactcatgctccccttcaggacctctgctyrgaaccacaggctcctcccgcctttggactttttgtatgaatctgcccctggcttttcttcttcctacaaccaaaatacttttttgtccagattccaaaactytctgtggccacagtgaccatgtctccaacatgcaaccctgccaggcccctcccccagggggaaatgggagctttgtctgcgtgtgttccttgggatagagccatggcgggccggggggtcctgagaaggcatccaggctgcatggcttcatcatggccacgttgcttttcagggcaatctggatatcttccgtgacctctctcacccaagctgctgccaggtgccatggatgtggtgtcagcacaggggccaggtgagctggggcacagggacacacttgatggacagaaggccactgctttttccctgactgctgtcctctgggattgtggctcagagagccatgtcaggcgtctgccaaagaggayggcacaagacacacagaaacggtgcccatgggcctcccagcccgtttctggacttgggactatgtgcttcctttgctggtcccctggggtcagaagtgctggttgggatggctgacagcgttgtcggggcaacattggttctaacagggaataaggattccttmctgtatcattgccttgggaccatggggaggacgaaattgttaagattttctctttgtaacttattatgaatgaggactaataattactaacgaggcctcagtaatatacagagtcctctgtgggccagttgctagcctaggccatgctttcactgttttcatcctcccagtaactgtacctacgtgctattattatccagtttactgaaggggcctgaagcgctgagatattaagtggcatgtccttgctcctaaagcccgcgagtgatagggctggatgtgccctgggcctggctcctgcccttactctgcactgctctcctttcggatcagcaccaaggggcttctctgctcaggccctgggtccctggagagccctgctactggctgggcctggggctcatctccctgtgcctcccacagtccagccttttacacctggaagatgatctcatccccagggtttatagagggacctgcactggccagacctcctgcatcaggtcagcatacgctctcagtggccaggtggctgcgcactgagaaggccttgcaggctgcaagcctctggacgctgctgataagaaacgggccgggaggccctgggaggcgtgctgacacctggcagggcattgctggtgtcagaggcaggcagggctgctccagctgctgggttcctggctctgtgcctctgcacagggctctcaatcccagccacgcttgcacagaagcccactttccatctgaggtcccataaggcctctccacgttgccacagcccagttccagtccacagcctagtccagatttatgcactgaacagcgagaggctcagtcagaagggacagagctcgactgtggggtgtgaaaacgggcacctcaagcagagggaaggcaagagacgggagggtgggcatgggaaagggccagaaatggccttactgcccagtgtggtgagataggggatggagcaagtctctgaaattgtcccattcccaaaagcagctaaagtttgggggagggtggcagagtaattgtattaaggagggcaattacactgcccagggctctgccaggccctttccgctgtcactgtgtgaagttcaccctgaaattctccagcaggagagacaatctgtattttactaatggcaaaatagaggcccagagtggcccagaaagttgcccaaggccacaagtggctgtctccagggctatcagaaatcaaccccagatctgtccctaacccagggaggcccatagctgtggcttgtagacctgggctcccttctagctcctctgccacaatctaatttgaccttgtccttcccaactgtagtcgtgaacacccgactgagtgtcttgtaggatttctgtcgggtacccaagaattcagacaggctgacaggaattcctgttctcctctttaagcctttggtgtgctggccccagggtctaacgtgaatcatacactaaagaggacgcgtccccctgagaccttcagcccatttcagagccacagggtcagactgtaagcctagtcatgagtgtacagagccagacaccagccaggctgctggtgagctcagcagctttctgcttggagacactgggaatgtgaccttcctgcctgagccaggggttccctgagtgagaaggagccctgaggctggaggagagagagtgcatctcagtgagaacccgctggagaccaggcttggatgggtggctcggccccagccaggcagcccaactgcaactgcagggctgtggaggcatcagtgagacgtcctgccaggacaggcataggctgtctgtctcttcactgcagagtgaagaggccacctgtgtgctgcacacccctcttccaggatctcccctcagacagggattcactcaggccctcagcaggttgggggatcctgacagaaccagtgcatgcctctttctccayccatgcccggccttgtgaggaggctatttccaaactcctcttcctgacttggcattgtgggctgacctgggggtgtgataagctcgggaagttgagcctcttcgactggartgtgctgtcgaatttagaggagctgctgccttttaaaaccttgtttagtttattgtttcagcaaatccaaacattttgcatttcrgcacataataatgcaggaaattctccaaggctcagtttaccaaaaacctcagcatttttgtggcaaaagcagtcagtcttgtttaatttcaatttttttttgttttaaattgagtgtgtctccctgctccatcaccttcagttccctgaataaattttttgatagtgtcctcttccaggccatccccactacacactcatacaaaatgaagcagcaagattcagaggctcttgagccaractctacctcccatccatgctgaggattctccttcaccttatcctgtggatrctcattaygttaatgggaaacaatattactcgatccatcaggaaagtcaggctaatagtgtgaaaccttactctctgtcaccaaatatagtgcccacaatgatataacagcctttccagtgagtttaatycgtgtgcgcaccacagcaggaggccctttagaaactggatctcatttcattctcacaacacccaggaaggctcatagctgccattcatatagatcttaaggtgggccagacactgttgcaactacattccacaaactaatatatgccataactctattgtggggaggaagctagaggccctagaaagttaggtaacctacccagggtcacacagccaggaagcaataggaccagcatccaacagcctggctccaggtccttactstgtgcatggccacctctctgtcctgcaaggtagtcactactgtctacatttcgcagctgtggacaccgaggctctgatgtttagtgataggctcaacgtggcagggttgttgagtggtagagccgggctatgaactgacctgaggggaggctcatgtctgagtcaggttccgccccatatcctgctgtcagagtgatctatggaaacacctgcaagtgcatctctctacagtgcaaaatgtcacacagcaggtccttgaataacgtcatttcattcaacgtcatctgaacactgagtgagaaatgacgatgctgatcagaaaaaaatccattcccggctgaggtcactgtctgtgtggagttggtgtgtgaaaaatggcattggtattttttttagtaattgcatcgaatctgcagatggctttgggtagtacaatcactttagcaatattaactcaaccagtttgtgtaaatgggatgtctttccatttgtttgtgtcctcttcaatttctttcatcagtgttttatagttttccttgttgagatctttcacctccttggataaatttatttctaggtatttcttttgtagttattgttaatgggattgcctttttgatttcttttccagctgttattattggtgctactgaattttgtatgttgatttaacaatttttttaaattataataaagatgagcatctcactatgttgtccaggctggtctcgaaatcctgggctcaagcaatccttccaccaaaatgctgggattacatatgtgagccactgcacccagactctatgttgattttgtatcctgcaactttactgaatttgtttgtcagatctagaagttttttggtggagtctttaggtttttctaagtataaaatcatgtcatttgccaagagggaaaatttgacttcctctcttccagtttggatgccttttatttctttcacttgcctgattgctctggctaagatatccagtactattttgaataggagtggtgaaagtgggcatccctgccttgttccacttcttagagggaaagctttcagcttttccccatttcatatgatgttagctgtgagtttgtcatatgaggccgttattatgcctaatttgtcaagagtttttgtcaaaaagcttttttttattttatcaaatrctttttctgcatctgttgagatgatcatatggtttttgtccttcattctgttgatgtgatatatcatgtttatygatttgtgtacgttaaatcatccttgcatccccagagtaaatcccacttgatcatggcgggattatctttttgatgtgctgtttcactcaatttgctagtattttgttgaggatattttgtgtctatgttcatcagggttattggcttgtagttttccttttttggtgcgttcttgtttggttttggtatcagaataatgctggcctcatagaatgaggcctcttctattttttagaataacttgaggagaatttacattagttcttcttcataagtttggtagaatttggcagtgaagccatacagtcctgggcttttctttgttggtaaattttcacattactgattcaatcttgtactcattattggtctgttcgcgttttctgattcttctagtttcaatcttggtaggttgtaagtgtccaggaatttatccattttctataggttttccagttttttggtaaatagttgttcacaatagtttttgatgtgttttgtatttctgtagtattagttactatgtctcctttttcatttctgattttgtttatttgggtcttatctctttttttcttgggtagcctatctagcagtttatccattttatctttccaaaaaaccaactttgcttttcattgattctttgtatttttagccaatttcatttagttttactctgatctgatcttcattgtttctttccttacactaattttgggtttggtttgctcttgcttttctaattccttgaagtacgtcattagattgcttacttgaattgtttctacttctttgaygtaggtctttattgctacaaacttctctcttaggcattgcttttgctgtataccatatgtttgggtatgttgtgtttccattttcatttgcttcaacaaatgttttgatttcctttttaatttcctcattgacacaatggttgttcagaatcacattgattaatttccatgtacttgtacattttccaagttcctcttgttattcatttctagctttattccatgatggtctgagaagatatttggtatgattttgatattttaaaaatttattgagatttgttttgtgacctgacatatggtctatcttggataatgttctatttgctgattagaagaacatgtattctgcagttgttggatgaaatattctgtagatgtctcctaggtccatttgttctaagctgtaggttaaatttattttttccttgttggttttctttgtggatgacatgtctaatggtgagagtgaactgttgaagtccccaaaaattactgtattgaagtctattagatttaataatatttgcattatgtatatgggggctctggtgttgggtgcatatatctttagaattgttgtattttcttgctgaattgatccctttatcattatataatatgaccttctttgtcactttttaatgcttttgtcttaaagtctgttttatctgatataagtatagctacttctactcacttttggtttctatttgtgtgatatatcttttttcattcctttccttttagtctacatgtgtttacatgtgaagtgagtttcttgtatgcagcatatagttggggcattttcaaaattcattcagccagattttatcttttaagtggaaaatttaatccatttacattcaaggttattattgatatatgaagacttatttctgtcattttgttwaatgttttctgattgttttgtatatttttcctttctttctctcttgtagtttatcattatggtgtgctggttttctatagtggtaacatttgagttctttttcttatttctgtgtttactctaccagcaagttttagacttttgtatgttttcatgacggtagctatcattcattcacttccaggcataggactcccttaagtatttcttctaaggctggtctagtgatgatgaattccctcaggttttgcttgtgtggaaaaaactttatttcacattttttaaagataaagaataatgttgttaggtatagtattattggctgacaggttttttggccccctttttaggggggaaatatattatcccattctctcctgtattatcccattctctcctggcctataaggttactgctgagaaattaactgttcktctgatcgggcttcctatatatgtgaccagagctttttcctttctcttactctttttagaattctctgtttgacttttgacagtttactataatgtgctgtggaaaagaccttttgagtttttaattacctgtgaatttctaaacttcttgtatctgaatgttaaatctcttactaaatttgggaagttttcagctattattttgttaatcaggttttctataccttgggtctcttcaccatttggaacaccccaaatttctgtttttggttgctttatagtgtcccgtatgttctgtaagtttagttcattgttttttattcttttgtgtgagtagggcatggggacgggggctctggctgggttatttcaaaaggtctgccttcaagttctgagatgctttcttctttttgctccactctactgtggaagctcttgaataaatttttattttgttcattgaattcttcactttcagaatttctgtttgattcttttttctattatatctgtttctctggtgaatttttcattcatatcctcagttgatttctaactttttgtattgtttatgtcctcttgtgtmttactgagcttttataatatcatttttaaaaattatttttcccacgtttcataaattttttttccagtgaaatctgttgctaaagaattattgtaatcttttggaagtgtcatatttccttgtttagtcatgtttcttgcgttttacattgatatctgcacatcttttgtaacagttgcttcttcatacattttggattggctttttcctgaagatatttccatggtttttattgggtaggacactttagctttgcttctaagtgtatgaagtaatgtagtstctctatgatttcttcacctctaagcagtatcagtggtgtgtgatttccctagtggcttaggctgtggttgttagtggaggctatgatgatgttttgctgsggttggggatgttaggtgggtgtgccctcaaaccctgatggtggcagtggcagggtaaatgtacctctccttgtgaccccaggcagtgtacacaggcactagtgtcagcaggtacaaatgggccagttcttaggcctccatgtggctggcttgggtgctggcagtcatagtggtaggcctggccagcgggcaggtccttcccttggcagcatgtgtggagtgagtgttgacaatagcaacaacacagcaactctaaggctctgaagcaacacacatcagtgttagtgatggctgggtaggccagttccctaaacccaaagtggtacatgcaaatggatgctggctgtggtggtagtggtagactgagtgggtccatcatcaggcccctaggaggagtacatagaggccagcaatggtgaacagagtgggggtaatccctaggcccccaggcagtgtgcttgggcactgaggtaagcagtgtcaaggtgggtgggtgtatcctcaggcccctcaatggaacactcaggtgatggctgtggttggcaaaatggaggggtccccaggcccactggcagagtgctcaagtggctgtggcagtggcagcagtgggccaggggaaactgtcctcagggtatgtgcaaatggctgggccataggcaggttgcttacagtggctccagccataggcaggagttctcaggatctgggaagtgtgagattcagcccctagctgttgaggggtggcagcagcagtggtagcagcagcaacagggaaaaccagtagtaaaggggatgcaagtatgcgtggctctgctgccraaaagggcaaagtcactgtcaagtggcatgtgctttggccccagtgacagcaacaacagatgcagtgagcagtagcagaccctgccctcaaggcatgtgcatggcagccttactgctggggtgggaacagggttgctgtccatgataactgccccaggtagacagttttcaagctctaagaaacccacacttkggctcctttttctctgagggcagcctctcagcacactggggaggcagcctccctattgtgctgcactgtccattccccaagatgcaggacactgtgtgtgctagagtgctagggaggctctgctgggtccaactggcattgcactactgaagccctacaggtgaacacagggagatgtcagtgggactcyagrgatgtggaaatgcaggggctgttggtttccagtgcaggatgcagtctggtggtggctgggctctccaaatggcagagagctacagctgcctaagacctggggactgggacccacatgagctccctctgaagcagtgctgttacatggtctctaggcaccttcctacgctagtctcagggcctatgagggttgaggggttttcctttggctatggttatamaatccatggtcagaatgtcaaccgctgtggatctctcactaacctttttcttgcactagggagccactctgggttcccagccaatcccagccaagcttgctgcctcactttcttccattttcatgcctcagttatttcccatcatttatctattgaattccagcgttcactcttagatgttcttcttgaagtgtgattacttgctatttttatttttctttgtggaggaggtgagttcttgatgcctctagtcagccatcttgaagcctctccagccttttgcagttttacttatcttctgacaccaaatctgtcaaaagaaaaatttaaacaaattaaatgtaacagagtttaactgatcaagaaaaaaatgtgtctcagacaacatcagaatcagaacagattcagagagggtctgtggctaccatatggtcagatatgatgtatggtcagaaaaagaaatgacatacagaaaatgaaagtgaagtacaaacatctggattagttacaccttggcatttgccttatttgaacatggtttgaacaattggctccttatgagtggttgaagcatggctrctgtgattggctaagactcagctattgttacagaagcagacttctcatttagggtttcagtttgttaggttgcagttcatgtgtgagaactcaagtatgcaattacagaggttttcttaggtcaaatttagtttgatttaacacaaatgtttttgtaaactttggcaagctattggggaaaagctcaaataaaagcctgatttcataatacactaaaatatatacaaaataatttaaatatatatgagattatatatatacacatatataattactaataataactagaataaatacaagtttgatttcattatccatgaatccttattctagaggtctagataagcataaaagcagtggaaatttttttattttttctttaatttcaagaccagctttgtcacaaggaaaaatgttcaaaggaaaatattcacagatttattcatattcattaattcagcaaaaatgtattccacatcaggtgctgggatgacaaaatgaaccagatgaagaatgtctcactttcatggcaggtttacattttcttagggagagtcatatggtgacagatactgtccaaaggattgaaagtcattaatgtgtcaacaaatgcctggttggccagagaagactcttttgggagaaaaggagaggaagagggagggagtgacagttaaactgagaaaaaatgataagaagtcagtggagtaaaaatctgggggattcctttcaagcagaagatacagccagtgtgaatattttggggcagcttggagttggtgaaccaaaggtaggaaatcaaatattgtccttgtcaatctgttcatgatgatagtcagtgtcacacggatgcagggtgtggaagacaggcacgcaccagccctgcaggtcagtgttgacaggagtatgttttccacaagtagttgttgtcttgcatctgggttcacagatacagggctctctgttgaatgaatgaatgagtatttctagtgagacacggtcctttgaatatacttttggttgtttttctgcttcacaaggaaacatttcagatatgacatgtatgaacaggaatctgttttgggcmtaactgtggagaagtgagaaacccctttggcatttccaagggtaatcatagaagaacatggctcagagtggtttagcttctccaactttcatctttcttgtctcaaaaataaggataaaatgaaatggagacataaagaatgctaggctatgctatggcaaggctaagggaatggcaaggtgagcctgtatagccagatccaatccaggcctgtctgccagtggtctgcacctggtggcagttgcccactccagcatcaggatggatgtggacagttctggctcatcagctgtccgggacactaggagagcaccagcacatctaagaacctcctgtgcaaatgcatgccagactcctcttagtgcttgacagggagaatactgagaggggaacctaccctttatctctcatcctgttgtggagaggaggtggcccgctgtgtccccaccttgcctcaccctctctcctcacacctggaaagatgaccatcttagcccccaacccaggaaaagcattgatcacccattatttgtgtctcagtgtttctgcagggctttactctgagaagtaaagaagaataggtgtgtaaagcgcctagcttagaaaaagaaagaggagctctggaaataaagaaagacaaacattaggagaaggaaggaagacagtacagggtctgaagttggaatgtccctgggaggacttcagcactggtgtcaaaattgatatacggcagggagaaatgagtggtcggcagtcagcaggcccccggcaccctggaaccccatagctggcacctcccctcccacaaaaactagcacaggcagcccctcacaatgtcagcacagatcccccaggctgggttggcagtgccaggaggagggcccatctccttctgggagtggcattatcctttctggttcccactatgcctcctaaccatgccagaagaaggtttgaacacaatggcctcactgcacacagggattgctcagaggcaagagggttgaagctgaggcctgggtggacagaagagagcactgaacagcaggtgagatcttgtctgggccttatagtctggatggtgccaggaagagtgaggtggggctttgagcccccctgacgagccacctctgtgaggccgggactgtggcccagacatcctgatgaagtgtcctgtgttctgggtccagttggcctgtggtcagggggcagtggcagatggaatatggtgctgagacttcttgggctcaaaggagaagtggagagaaattgtccctgtgcctccaggctgaggtctgggccaagcccatggactctctggttgcttttgctctgtgctcagccttgaacttggtgtgtgacctggggcagggaagttgagggtttcatgatgggaaggagtccccaactctgtgctgcaaggagagagagaggctgtctggagaaagagaaagaggctcagctctagtgctctggggctttgggaccagggtgctccccttcagggaagtcagcttgtcagaggcagcatcagagctgaggctgaggcacatgatggctgggcttggatgtgcaacatggagaggtgaggagcagagcccttaaggcagaggaacagagccctcaaggcagaggagcgagggaaggtgccagggcatggccagttcttcttgtagctgggctctgattgcctgaaggcagggtgtggagaccccaggagcctggcagggacggtctgacatgcaggctgggtggagggactggattctgccagcagtgtagagcttctctggagggtgtgagctgggagggaagatggtcctgggaggactaaatgggtggagccagggagagcaggctgacacacttgggttgtactaagaaggaagcctgaatccctgaaaaggtggcaggagcccaatcgggcatggaggagggtggacaggcagctgtagacacaggtggctcaggacagggtctgagggggcacaaggggaaagtcagcatcatcctggatggggactagcagggcaggggcaggagagggcagrtcmcaggayggggcctagakgggagaagggyccctctcagtaagagagagaccgtctccgtaagggaatccagcatttgaggcatttgccactcacatgcccaaggggaggctttctgcatgaatgacaggttcaagcaagctcaaagtctgcatgctctggggaacacctgtgaggaatagagggtttcyttgggaccatcaggctgagactggcctggcaggagacccctgggattccaggcagcctgggaagggtggccttgagtacagaaggagctgaacaggccccatgccagggaaaccacaagcattgatgggctgctgcctctgctgtggtctgtgggcatcatcagcaccacatcacagatggggaggtcgaggcaaagtggcatatgcccactggcattctgggagcctgctgcagccctccagccacaggtgctgaaggggatgcagttacagtcctcatgcttgcagagcagggacaggcacatctacaaggacatggcatttcccacaacrggctcagccttcagccaggagatgaccagaaagaccaagaagggtggtactttagctgggagcaaggataaggggcttcctggaggaggccactctggagctgagtctgaaaaggtgagcagcagttcactgggcagacaaggttaggaagagcattccagaaacagaggacagcttaggcaaattaagaaatggaaagctgaggggctctgagaaagattgttatctaattcgctgcctgctaagcccccaagagaacagccttggggaaacctaacaattctctttgaaaaggccaggctttcaacttgctttcatgcttacaagatggcttctggagctccasccatcacactcatactccaggcagaaagaagaaggaaaaagggaaagcagccttctttaaagcaatgcccaacaattcctatttatactccattgccagagtgcattcacatggctatgctgctcagcaagggagaccaggaaaaggtcattttacagctgagtacgtttcctctcttaacaaaagcaggcttcgttagtaaggaagacaggaagaatggacttggggtgaccaatccgtgtttagtattgctggacccatttgagagatggaaaagccattcccaagaggctgattgacttgcctgtggttagaggcaggaatgaaccccagtctctttgaccttacttagagtgaccctgagggcctttttgaaaggccctatcaagtctccagacagggttgccccgatcatgagcataagaagccagcagagaggaaggcatcgcagacgaacacaaagacaatctctgtgtggcttgcagctgtgtgggtggtggattggctacaccggtgtgtgcccaggatgaaagcaaagcaactgcttttgcaagacagaattagctgttcctacgggtctggatcatcctcttcccaaaccaagggaaccgtggagctgctgccttctcagctcgtcacccgcccaagggtccctggagccagccttgagggctgtggtgagtgctcatcccttccatatgctcactagagccttccaggccatgctgggttacagaggtaactgggggctcctcctggctaccagggagaagaagacaagttcaaccccaagtgagggagtccagagtcagagacccagggctgcctggagaggcaggggagacattcgacacttgagctaggtctggaaggaggagtctaggctggaggcagcacccaggggagagaggaggagcacagcaaggcccacactgtgggtctcgatgggtcctggccccaccccttgagccaggcaaccgcagccttctgagcccaattccaatgccatcacagtgaccttctctctcttctcttccctatggagaaggtacctcagcttagcccttgcacagtcccaatgcacacagggtccctgctgcccaaggatctgccttccacacagccaggagtgcctttccctaccacaggctccctgcagcccaaggatgtgcctgagacacagccgggagtacttttcccaagcacagattctgcaatgcaaagagctgccttcaacccagctgagagtgcctccccatcacctgctcccccaggtgccacctcctccccactaggtgcccgaggcctccctccaggatgttgccactgctccctgctcttctcaggcacactgcagaaccccctttgtcactgcctcccctagagcccaacttctaaggcaccaaacacccaagatgaacaggcctttgttgctgaactggacatatacattgagcctttgtttatggtcaaaggagttgaattcttgctgatcaaccaaagagtttgtcaccagggagcttgtcctctgaatgagctggatttatattgcacctgccagaacacagcaccctggtgccatggggatgccagacatggattcattccactcctaacagccccaacttcatctgtcaccaaagggtgggaccatgaggtcttaggccaaattcctctctaaaaaaaagcccccaaagtctttgaaatatgaattcaatgctgtatcaccctccctagctttttttgcaatgaaaaatacttgtgtattttatttcctatactcctcacacccttgtccctgctttccatttttttggctactcaaattctgaatgtatcccagaaggcaatgagtgtctttcggaaaatgtgaattctctttgtagataccccacactgtccccccaagcaaacttcagcaaattttcctcatttcattacagaagataaacttcccctcttagtcatttgtccccaaagaaggaagcacagccccaacagagatgagtgtcaacaggcaggatcctaccatccagtgtgtgcagacagtggctacaggacagcccgaggtgccacccacacaggccaagggcacctcacatggggcccctgagcgcatgaggaggggaccacctggggggctgtggctgaggttgtccagtcatacctaatctatcttgagagtaaatcaactgctctccacctcccccatctactagaatgcaatatttatgcttttccgtagaatttttgaaaggtaagtacaagttaaaaatataacaggtttaggttttaaacagtattgactaatttggatggcaatgtccccgctccatgtttygtttttttttttaggcttcaacacaatggcttgcctatatgtgtagggctttgggggctttctctaggttgcatgactttgaccttcaatgccgtcatcccgaggagttactctttcttgtcccccttctccgtcttgcacccgcctgtcctgccgcagcctggactccgcatctgggtcctgccagctgcgatgttgggaaacaggcctctcccacccttccccagcctctcccctctgtgtctgcacatctatctcccaagctggttatgagaggcttttccaggcacacaacaccctgcacaaggcgtccagagaaataagccaggtcaatgttgaggaaatggaggagagcactggagccctgggggtggatgggactcagtcatttggtttttctccattttgaggctcattccctgagcaaccgtcggtgctaaagagaacatgccacccctccacacttcacttctcaacattcttcctgcaatgggaggcctggcttcatcaattttttgtcttgctttgttttttagagagtttttgtttcacaaaatacacacacttctggtattgtaaatacagagattttcacaaagaattgagtgttcccacctcattgctggacaggtggagatatttatgacaagggtgcctggtgcctggccagcaggtgcatggcctgtgtgcggccccataggcagggtccagagaggtgggtcacatgtctgtgcaggtgtggaaatggatggacagccagacagtgcaccctctggctctagactgcctggcccagctgcctaatgcctacagccacatacaaatgtgccagagcagccaacgcaactttacaaggtgcctggaactgtgtgtctctcaagactcagggacaaaatgttcattatacttatgacaccaggaaaagtgtggggaagctttcattaggcagaaagggaagtcaggcatggtggcttatgggaggcctttgggaggccaagrcaggcagattgcttgagtccaggagttcaagaccaacttggacaacatagcaaaaccccgtctctacccaaaatatgaaaattagccaggcatgatggcctgcctctggtcccagctactcaggaggctgaggtgggaggattgattgagcccagtaggtggaggttgcagctagcctctgcacgccagactgggcaacagagtgagaacctatctcaaaataaataaataaataaataaataaaaagatatatagatagataggaaaaagaaagggaattaaaataacctaaaagtgtagagagattttatctcttcctcagattgggttgtctctaattaatgacaactatgtttctgccctgggaggttcaagcccacttctctgcagctggcctgtgctcctgtgttaacccatgtgtaaacatgaagatgctgctttccatctctgtggctctgagaccccataaggagaaatgcatgtgcaatttcatgaagagttgtatgtgatcctggtgaaatcaacatacgtttgttaatggggattgagagcctttggagtttagccaatgtgaactcaagttagggcctgtcatccttcctcatccctcaagggaggaagtcatagattaagaaggcgagcttagaggacatcagaggggagaacccctccaccctggccacccacagggaccctcccaggctttctgtgttgaacagtgacagtaggagcaggcagagggaactttgccagccacccttctgtgggccactccagccctgcctcctccactccagctgagttgatctccctggtttggcatcagtcagaagctcctcaccctagtgaagggagaaaagggggcacaacccttggtcatgcaggtggactgagttgcaggtgggctgcctttttaaattttagattcagggggcacatgtgcatgtttgtttcaaggatatattgtgtactggtggagattgggcttctagcgtagccatcacccagatactgaaaattgtttccaataggcagtctttcagccctcatccccctcccaccctcttatttcccaccttatttccatccttatgtcgatgtatacrtattgtttagttcccacttataagcgagaacatgcagtatttgattttttgtttctgagttagttcgcttcggataatggcctccacctccaccatgttgctgcaaagaacataatttccttttttatggctgcataatattccatagtgtatatataccacattttatttatctggccaaccaatgatggatacttagattggttccatgactttgctattgtgaatagtgctgagttaaatgtacgagtacagatgtctttttttatataatgatttcttttcctttggatagatacccagtagttggattactgagtaacatggtagttctatttttagttctttgaaaaatctccaagctgatttccatagatatttaattaatttacattcccaccatcagtgtatgaatgtttcattttctctacatccacaccaacatctgttgttttttaactttttaaaaatagccattctgactggtataagatgatatttcagtgtggtgttaatttgcctttttctaataattggtgatgttgagaattttttcatgtgtttgctgcttatatttcttcttttgagaaatgagtgttcatatcctttgctcagttttaaatgaagttctttggttttttctgtttagttgtttgacttccttatatattctggatattagtcctttgttggaagcataatttgcaaatatgttctcccattctgtaaattataggtgtattctgagtttcttatattttgaagtctacctctctagaaagattaaggaaattttcctgaattattcccccagatatgttttccagctttgcttactttttcttattttctctcaggaatgtctataagttataggtttggtgaaaatcccatctttatttgttcttttttaaaattcatttttctatatttttgtctgactatgttaacaaaataccagtcttcaagatctgaaaattttttcttctgcttggatcattaaagcttttaactgtattttgaaattctttaagtgtattttttatttccggaagttctgttgttgttttaaaggtatttatctcttccttcatttcctggtttgctttcatggtttctttgtgttagttttcaactttctcttggctctcatttaccttccctgcaatccatacatttaattctttatctgtaattttggggttttcattttcgttggggctcattgctggagagctagtgtgattatttgatgttgtcacaacattcagatctttcatggtgctagaatttttacactggttccttctcatctggaggagctgacacttcttatgttcaaatttattttcatttatgtgggatattttctctgttatctctccctccccccgccttgagggtgtcactgtaggggttatggcctttctcctgcagccctgtgcacttctgttttttattgggctgtgcagttcaacctgcaggccagtagggggcacttctgtgttagggaacctcttttcgctccatgggggtcccagctgtgcaggctttactctcctctgctgtctgtgattcctgtcatgtctctggtgaatttcagcatgctctcttaaaggatctatttgaagtgttagtatttactcactattttgatgcctgagagattctcactaactactggctgtggcataagcgcrtgggtgtatatytgacctttgctcactgaggtgctctctattgtttcagctgatggactggacagcrgaatgccaggttccctgagcttcctgctmagagtaggttgggagggtggaagagaggttgcagctgggcagagctggaaccctggctttcccacaaataccccaaatgataagcgtaggcaccagccatgataggggtggctgggggagctcctgatgacatgcacagaggtctctgtggtgggatgagggggctgcactggctccacgtctagataggcaggaatgcaatctgcttccctatcacacccctgttctggggctggtgtctcagttcagatgcacactgtggtctatctgcaggccacagtgtggctgagagacgtggaaaatgcctgtcctgtgcctctccgcaggagtrgcttcagggtggaaattcttcactcagcccaatgcaggcagttgtatggctcgcctgttctccaatgtggtaatgccgccrccccatggagagagggagaatggctctgcctgtcagccatgtgggtgggagtcatggctagtgttggctgcttgggtgggcccaaactcaggtccagagggtagtcaggtgccagcgatgttggactgggctaggtaattccccaactcccacacctctcagtgacccactagatggcatgtaggagtcctgatgtggctggaccaggatctagtcagcccagagttcaggtgctggctgtgatagggaggggtgggctgatcccctggagcctgagaacagatcacaggactgtgggggctgggctttccgaagggctccaggccacagctgcaatgttcaggcatagcagggtggctgtgctgtgcaccgttcacccaggagggcaggaatcttcagctggggcaatgagcaatgatagttgttgggctcatggtccacttgcacttctctcccaaagctggattttgctgttaggagctcaggaaggtgcctgaccttcctgctcccttcctggcctggggcagcagaggcaagcctgtggtggaacgggctaatgggcagcctctgggggttgggttctcaggggaacagtgagctgtggctgtcatgctcagtcaggggtgggcggtggcactggcagcctgtcaccaaagcaggcaagtcccgtttggcagagaggagcagcagagggaagccttgtctacccactcctccttaccacagctgcagtatctgtctttggggcacacgaaagtgcccagttcccctccatggcaggcagcagcagctgcaccaggcagatcagggatgaaaagcctgtgggatccatgtaggcttgagcagtgcctctgcacagtctccagcaggctccctgtgttcatctggaggcccgggggcaatgagagggctccctgtgactaggattgtgaaggtccatggtggagttgtgaaatttcagggttctctcacttgctcacctcttccctgtgttagggagcccctttccgctccatgggggtcccagctcggcaggcttccctctcctctgctgtctgattcccatcatgtctctggtgaatttcagcgtgctctcctagaggatctgtttgaagtgttagtatttactcactcttttgatgcctgagaggtgccaactaactacttctactccttggctgccactgttccattgccccctcctcgggggaggggcagcataatttcagaaaacaagtctcacatcagagctgcccaaaaccaaagtgtacaaaagggaacacggtgggcaatttttattccttattttagaccagaactataagaacacacatttctgagagtccaatggatgtcacgttaagcacccctgtagagctggaatgagccagagcaggtgaggtaacgagtagccccacatggaagctcacaagaagccagggcactgctcacccctgggatggcacagagagggtccaggcccccaggggcactgcaggcctccgttggtcattcagggacctcaatatgcaggggaagctctgccaggcaagagcattcttttgagatcagcttcttatcagccagacagaaggagcagggctaggctgggtgacaggcatgtgcacctgccactgccatgagctcagacacagcccgctgagctgcaggggaggctacaatttagtagctgtgcatccaagaaggagttggggatagatttgtggacagtgcccagtccccgctagggcaccaatcactgagggcaaggaccctggagctttagctctcctactggttttcctaacctaccagggaaggctcccttcatggcaagaccctggtgggacttttggaggcagatgtgcacacccagtctgcacacctgtattagctgaactcctcacaggggcttagaaacagactggagaggaaaatgtacacgtaggaggtttmttttgttagggagtcctctggggarcaccatggtgagggagagaataacggcaggaaccagacccacataggatgtgctaccgcraccatctccaatcaatgggaaaataaatgsctatccgtttgcaggaatgtgttatttaaggcacttttcctggggtcctgaaacttcaactgtcaacccacaagccccagcaaaaaggcatggaggtgattgggacagggactgcctagtgacaaggtgagcccttagatcccccaccccacacccaccaccaggggctcgagcctccaagagaggaggcatcaggtgggttgaagtgtaggaaagtgtaggagggctgggctgggctttagcagctgagtcttctggctctagtccagagccctgtgcacttccccaggttgcccccttccgcagttgggagctgaaccaccaggccctcccagatggctgcttaatggtgaagctrccttagtgcagcactctgatcatttatcattaaagtgggcagagccagaactcccagagctcaatggggccttgatacatcctaagcytctactctgtgctagacccttggtcctaggaggtggggacgtcacatcagaacaccggggagttttatcaactttcttttatcctccttgggtatgtgctgctgatcaccgcgggtgaattgttgtagactcactaatattttgtgaccttggcttgctttcttcacatttgatagattaggaaagtacaggtctgagaatttatagcaacttgcttaacatcccacaacttttaagtggaggaagcaggagtcaatgcagagcarctgtctgcagaagtgtactgggcactcggttcctgtccgcaagtgcagaatctgcaaccaggagtggggatatgggggaagtatccacctgcctctcacagaggctmacagcctagagcatgtccccagcttcctgccaggtcatcactagagcctgaaggaacccctccacctggctggccagtggacccagctctgggctggggcgaggctccctcaccactgacggttaggtraactgtcctcctggccggcctgggctrttcctgagcttgctrctcagcccctccctccaatcactcagctcaagtctccaagcctgggctaatggcttgggctctttgaagccaggagcctcccccagactcccaccaggcatgrctgcaaaactcctcgcatgcacacatatacaaccacacatctacatgcctgtgttgaagcttgtgtgtctacacaaagctgtggtcttcatgcagttcctctgaccccttctgtaaacaccagaattccctgagtaggctcagcatgtagagagagacaggggcagaagggaactccatctctcaccaggattccctgagtaggcccagcatgtagagggagacagaggggcagaagggaactccatgtctcaagcactgcctagtgcttctgcctgtgctgggctgggtaatttgcatacctggtcagatatctattgaaacattcattccgttttgtgttctccctctctgtttcttttttctttccttctttttttaatggcattgagatttttatttacctaccttcctgctttcttttaacattataaacattataagccaaattattctctttttgacccaaggttgtgataggaaccctcttgttacaaagtggtggctgatctgtgcctgcttttatgcttttctggcccctctcaacctctggctgtcacttctctgttctttctcagttgtcccttaagagtgtattctaatccctgtgaaacagggactgaaagtaccaatctcattgttacgaggtttaagagaaggtccagcattaagccaagctctcaggaaaattgaaacagttcctccttgcccttcaatacagttccttctcatctgtcacgggctgaggaatgactgaaccataaaccaagcacagggtataagtccacaggccaggtgaaggcctagatggtaaagtacgtgggctttgcgactccactgctgacatccaggttaaggaaggactgacttagtgagcagttccaagaccattgagctcacagttccctgtggctgtctccctcatacttccaccatgaccaggcttgaggaggggactctcagttcccctgacwcacttggaatagtatgaggggtgcagcagaagccaaaaactgagtgaacggccctggggagtccatgggggatgctgacaaaccaatcacaaagttggtgccattcgctcttaagaaggagaggcagggcstgggcaagaacagcagctggaaggtgaaatgcaggcctggctctcagtagcggtagtgatcagccttgaaggggcaatcaggggagatgccccaggtactgggcctgtttctcagtcagcttggtcaatttcatgatcagcttgcccaggtgggcttcagccactgcctcatccagcttcttgggtaggacatgaacctcaatggggtacttctctgggtggattcacagctcattctgtgcagtcacctggttgatgagtcactcatcacaaagccagggtggcccatggcacaacccaggctgaccagccgaccctcagccagcaggatggtgtggcgcccattcttcatccagtacccggccacctggggcttgatggccaccttctccaagggttctcactgagccacttgacattgayctccacctcaaagtgtccagtgttacatacaatggcatcatccttcatctgttcaaagtgccggccaaggatgatgttgacacaggctgtggtggtgataaagatgttgccctyctgacaggcttcatccatggtggtcacctcatagccctccatggcagcctgcagtgcattgatggggtcgatcttggtgatgatgacgtgggccccgaaaccccacagggcctgggcacagcccttgcccacattgccatagcctgctaccatcgctaccttgccggcaatcatcaccactgtggcccacttgatgccatctatgagggactcccagcagccatagagcttgttgaactcactcttggtgagggagtcattgacattgatggcargcaccttcaggatcccattgaccatcatcctgtgtgggttgtggacmcgtcatggtctccttggaggtgcctcagatgcccagcaagagctgtgagtacttggtgtggaagaggttggcaaggtcacccccatcctccagaataatgttgagagcccatccctgaattacagtgactgctcgatgcaccatgggtactctgcrttcttttgcccttccaggtgtaaactggaatgccagccttggcaatggcagccaacacatgrtccagggtgaggaagatgttgctgctggggcacccagggtgatgagggacccaatgtggatggccatctccatggtcatgtgcaggcagctggcactgtggktgccctctagtggcttggaggccgagtacagctcccacatgtgcatcaggcctggcatctcattctctacaatgttcagggccttgcatccccaggcggccaggccaatgtcaataactttgctgggcagtttgtcagacaggctggtgacgcttatgatggagacaggtgaaggggactgggccttggtctagggacaggcactgggtgggtggctctggacagggtctctctctctctctctctctccctctctctgtgtgggggggtgtgttttctattttacatttcaagcagatggccaggcccttggtattgcacaggtgcttgcagtgtgtattagccagggatagccagagaaatagaaccaataggatatatacgggtatatgtatatgtaagaggagatttattattaagaattggctcatgtggttatkgagaccgagaagtcccatggtttgctatctgcaagctagagaaagaagaatgtcagtggtgtgactcagtctgagtccraaggcccaagaattagaggggcgggggtgaggcaatggtgtaagtccaaatgctatgacctgaaagttagtgtcccctaaagattcatatgttgaaatcctaaacccaaagggatggtaggaagtgggagtatggggagatgattaggttaccagggtggagcctcatggattgaattagtgtctttataaaagaggccccagagggctgcctcaccccttccactgtgggagaacacaggagacattgttggccaaaagatgctaacaatgaaccagagagctgactctcaccagaaactcaatctgccttgatatggacttcccagactccagaactgtttaaaataaattcctgttgtttgaaaagtatacagtttgtggtagtttctttagagcagcccaaatggactaagatacagtgggcaacagtggcctgaagtgaaactctcttccatcttgcgttaagatggaaactcctgagaggtgacgctcagtgtctctgaatgagggagtgggcagggaggtagagaaggcagaggtcagggggttagagatgtagcttgcacatcactggaccaccaaggggtgtctagatggtgccaggcccagggacccagcctyaccatggcccctgggactgaagggcccatgcaggctggacactgggtgataggggaagccaagaggactgccgaccagggggcttctggacacaagactttgacccaaccctggagaaagaggagcccttcggggtatgtgaaaaatttccctaactattaagacttccatttcgaaattacgaatctttgagatgaaccacaaaccttgcaaaaattttacagaccacttgagaaaacccccacacttcttctatcagctgttcatcttctatcagtgttcacttcttctatcagctggagaatttccatgggaagtataggaaagcccgtcttagggtccatatgggagatcccagcctgagcctggctacaggctgtgcagaggcaggacccaagaggagaccagaaggacagggctgtagtgactgtaggttgccagctcatgatcacaagggcagccaggcctcagcaggaccagacattggaaagcccacaggacccctgcttggggtctccttcaggtttccctgctccctgggccatgcggcctcagctctgccccttctctccctctgcacctgctcccytctccccacctctgcctctctgtgtacttggctgctagtagccctgaagtctgcggttgctcatcctctgttcagatgaccccatggccacgttgctggggagagattctgatcccatagtctgggtcaagctgtccatgcctgatctgaccaccaaggtcataccatacaatcagggctgctgctggatccagcatggggtatggggaagtttgaggatgtggcaacaggtggagcaggtgcccccaaagttgtctccagcatgtggaggagcctgcccatctgtctccccatgagtggcccctgtcacctgcttctttcactcctgctcctgatgcttccacgaagctgagccacatgagccagtgagcatccctctgccgccctcactgcctcagcatcgcccgttccatcaggccccactcctgcctgctgcctgcagcctacccagtgaactcagctcggagaccarggctgggcctgggcagaggggatgagtgagtcccatgccttatgtgcaggaaacgtgggtctgggctgttaacagcaaagccattgtattagtccactaggtggccaaaacaaagtcccacacactgggtgacmaaaaaacagacatttttttctcagaattctgcaggctgcaagtccaaggtcaaggtgtggggagggtcgtttcctccgagtcasccaccttcctcctgtgtcctcccatgctttaccctctgtgcatgtctgtttcctaaactgttcctataagcacaccagtcgtactggattagggcccaccctaatgactttgtttaatttaacctttacaaatcctctccaaccacagtacagctgcattctgaggaaccaggggttgggactttaatatataaatttggggaggacacaattcagtgcatgcctgtctttatcagaagcactaccctctctaagtggtaatttctaaaagacaatggggctctggggaaagactccaacatgttatgaagccaaaaggccccagttccggctggactgcatcgttatgggtagtttgggggccacagctgtccagagtgaatgagattccacacatcctccctgcccagcacacctgggggctccgccatggctgctcctgcaggatgagctccaggcatttgatgccatgctgggacaggaccctatggctcaggccagcttgcaataccggaggggaccttggaatctcgtcatttcctctgatgagtgaggagccagggtagaccatgtgggtgccctcatggttctggggcagtgaccccctgctcatgatccttgtggaggttctggggctcyagggacatccaggccagaatgcccagcagttcagctcataagtccaaaggtaacctgggagtctcaaactcacggatacaattattgcaaccagaaatcctggtccttccttccctatatccctgcttctgtgggtgggtgggggcatcccaggaggaaaactcttgctcagagaacagatggccctggaggtgtttgtttgacagctgggactccatgaaggggagggtggccccagctcaggctgtctcagaaatgggaaggaacaaagtctgcagaagctctaccctggggcccaggggacagcaggcacaggggctgagaggcatctcccatttaccctctccccagggtcttcctgccttggtggcctcagacatcagtggctcaggggcctccctgaggactgggatgaagaagagaagggggtggtgacagtccatttttccaggagacacaagtgttacttttgtttactaggcagatgttacaaactgacttcaaaacaatgtttgcagactcgtggaacaaataccacggagcagcacctagcacagaggaaggccccctgccctgggcatctgtgggaaaccagggcccaagtctgcggtgagctggtgcagaaactctgagctgaggagctaacattayacccatctgcaactgagagaacctgccaggctccagcaaaaccaaacargacattctccccaggagacaccgtcctcatccaggggaaccaggattctcatggaaaatcatttcctactgaagacgaggtcagaggaaaaactcccaggtatcccaaagagaggcagcagatacaagaaacaaggagattcaaagcccagagagtaaagagaatagagtgatctaaaaggaacattgaaataagggtgtataaaatgttcaaaaaaagataaaggaataaaactatatgacaagaacagctaattataacaaatgcagagttttaaaaggaccgaagttctaaaatgcattaatgaaaaatgaaacacaaccagaaagttcaagacaaaaagtggaataactccaaagacagatctgagcagcatctgccctgcagccccactgaccgagatggaaaccagaaacaggatgttgtgtgctgggagcagataaggagtgtctagcagggcagctcactccaccatcctcagcccactccaccatgctcagctcaccccaccatcctcagcccactccaccatcctcagctcaccccaccatcctcagctcactccaccatcctcagctcaccccaccatcctcagctcaccccaccatcctcagctcaccccaccatcctcagctcactccaccatcctcagctcaccccaccatcctcagctcaccccagcatcctcagctcattccaacagcctcagctcactccaccatcctcagctcactccaccatcctcagctcaccccaccatcctcagctcactccaccatcctcagctcaccccaccatcctcagctcaccccagcatcctcagctcattccaacagcctcagctcactccaccatcctcagctcaccccaccatcctcagctcaccccagcatcctcagctcactccaacagcctcagctcactccaccatcctcagctcactccaccatcctcagctcactccagcatcctcagctcactccaacagcctcagctcattccaccagcctcagctcactccaccatccttagctcactccagcatcctcagctcactccaccatcctcagctcaccccagcatcctcagctcactccagcatcctcagctcattccaccagcctcagcttactccaccatcctcagcttaccccaccatcctcagctcactccagcatcctcagctcactccagcatcctcagctcactccagcatcctcagctcactccatcagcctcagcttactccaccagcctcagctcactctagcatcttcagctcactccaccatctgcagcagccagaggttgaaggaaagacggcaaagctgacacatgcacactcacacacacacatgcacacatacaaacatatgcaatcacaaacacacacacatcagcaaacacacacacacatacataatacgcacacacatgcacatcgacacacaggcaaacatacatcccaaagcacacgcacataaacatatacacacaggcaaacatatacggtttaaattggctgacttgcccggccacagagtgaacacctgtggaggaatctgatagctgtctgctgtggggcacattcagggggctaaggctccaggagggctgggggacatttctgccaggcaggctgagcagggtggaggccttcccctgtggacaaggcaggacacattcctgggcctctacaaggggagtcagaacaagttcatgtcagagaccagggaagccttcactttacctcctctagagcactgggttgctcaaagcctctgactgatactcacgctggcgctggacagcttctgtaggttaatttcccttttgcaccacaatgactaattctaatctcccggcctccacactcaccacctccccgacaccggacctagaatctcacctccagctaaacagacaccttccccacaacactgggaggactcccactcttctcccacatgccctggttccctgacctttcctctgagtaccctgacagagagggccttcgcctttgtttcacttcctaacggaagttggaggtcggaagtcggaagtcggaagtcagaagtcgagtctccagtcaggccctggctcccactcccctccctcatctttcctgcctgatctcctttccctctttctcctgtgtcttcacactctcctctccaggactcccagagtgctccctccttgtcctctggccctcaccccttccagtacagccaccaccccagccccttgccccaccgctgttgcccacaggagctgtttgcctccctcctaccctccagggcaacccgttgacgcccagcaccctccacatcctgcagtggcccaaagtggcccctgtctgtgaatctcaccagccactggtcagacgtagcctgcgctctgctgtgtcttgcaaacccctggccctgtctttcccagcggagtgctcccctggttttctgagtgtctgctctttgccttggatggccttggcttctctctgggcagctctcaggcacatctgtggcttcactattacccctgggatgatgcctgaggccatggctccacccccatcctcctcttgagttccagaagtttctctccaattgcctactcaacagctccctgagatgtctgaggtccagtggtccagatgcagagatgaggatgcctgcagctgatctcagaccctttgggctcactcaccagaacacagcctggctaggtacccagcaccccacccatacgcctcttccgccaccctccttgtcccctgtggaaacacgctcaccaatgcattatgcttctcctgctgtgagcctgtaggtgcatctcctctctttctggctgacatttattcattgaggaatcagctggtgcccactacttaggaggaacaggctggacaccatgctcagtccccaggtacacacaccccatgcacgtatgccctggccctgcgtgcacatgcttcatccttctgcacatactccatcctcatgtacacacacagcatccctgtgcacacactccaccctcatgcacacatgctccctcctgtgcacacatgccttgtctcttgcacccacgctccattccagtgcacactcaccctgtcccatgcactcaccctgtcagtgcagaagggccctcaagttctcccttacctcactttcacttcccgccatgtccaccccatgcctccacccccaacctccacctggctaactcctatgatgcttgtgattctccagggcccagcggaaggttccttcttcacagcagcctcctccaacacccaggtcccagagtagacgacaccacaccctttgtgctccaaacagcatcctcctgtactcttctctctgtgttcacaggactgtgttgatagtctgtgctcccctcaaagtcagggtctccatggtcagcatctgacactcagctcagggtccagaacagggagttcctgtcactttgtgaggcaggagtgggacatgtggctgggatcttgggaacccacagaaatgaaccccggctaggtgccaagcacccaagcacatgcctcttccaccactcaccttgtgcgctgtgttcccccagggccctcaagagtgggagaaagggaaggttacaatgatttctccatggtgacctagcactcagtgctcagtctcccgggctgtctccagctccaaagctggtgcagctcagtggggctcaggggactgtgtggcttcaataccctcttttggtctgtctcagtggcaccatggggtcaagcttgactgggtaatctggaggggaggatccttctggaagggacagaagctcacagccaggtctgccagctgcctcagtgcccacttggagtgaggaaacaccactcaggaggggaaacaggctcaaggcaggacgtgggcacaggttggtggatgaggggtgccagtgtgggcgtggggacaacagaacatgccagaggctcttggtgacaggggacgtgatggatgatgataaaatggttggctgatccaaggggtgccacaggagcaggcgggggtgacttgggcctcagggctctgggctggaaggatttaaaatgcacccagctgatcccaaaggcatccggggttcggaaccactgatgtggagtgggaggaagggctgacccaggagagagtcctggggaacagttccgggaggcagaggagagaccagaaggaatggtgaggggcactggggatccctgtagccaggagaggaaggagagtcagacagaatgtgggtcatgggctgcaagagctggtgagacaggcctgaggaggggatgtgagcacaggcagggaaatggccacagaggggccaccctctcccacagcctcactgtgccccgtgggcctcagcggctgtgtctactgctcttggcagcactccttggagcgtgtctcggtctcggggctggcatttctctctgggctctgcccggggctccccacactatggctcctttgagggagcccatctcagctcaccttcataactggactttggccagacccttctggaagggacccaccccctcccccaagactcattgtccccagacacccacacgtggcttggtgtgggcacgcccctatgtgcatgtgtggggagcggctgagcttctgagaatgccaccagtgagggcacctttgtcctggcccacaggacagggctcccagaagggtagcgagcccgggtgcccaaaggcctggaatgggcccttcatcagtcccggggcacggagacagcttccatcttcctctctggagggcatctcacagcaccatgtgcaagatggctcccagctctgggggcagctctgggcagtggctatgtgccccgggcatggctgcctcccctggcccagctggtccagctagtccctacaaaccccagcccacacctccaggaacagcctggggatgctatgtgcttagagcgaagggcactggaccagaggtcaggacaataagtgcttcgcatcacaggacattcttgtctgttacctccaaggttgcactggatgagaaaacaaatcactccccacccaagatgtgattccctcagggctccaggagccatgggggttctgggagtcccatggcagccttcctgagatgaaggggctggtcctggatgtaggatgtgtttgctgaatggtgggaaggacacagccagttaggaggcggcatggggagggtggtgctgggggaacattcccggcagggaccccagggtgggcaaatcctggagtggcaaaagttaacctctgcccaggaggattcctcctcctcttggcagccaacatctcctgggggcccacgggagagcaggaacctgcaagcccaagagacctgggggatcgcaactgtacttcccacaagaggtgtgttttgggcaaattgtctcaaccctggaggctccgtttcttattctcatacaccgaacccatccctacttctcgggagtgattaagaggtgtctagacatggccattccactgaagggaggatgctgtcactctgcgtcctttgctgagctcctcattgtgtcaattgtgtacaagctgcacaataaatggaagagacacaatctttttgatgtgatcaaggtctagtaaaaacagtggagaaaccctgtgtcctctaaaaatacaaaattagctgggcgtgatggctcatgcctgtaatcccagctactcaggaggctgaggcaggagagtcacttgaacctgggaggtggatgttgcagtgagccgggatcgtgacattgcactccagcctgggcaacaagagcaaaactccgtctcaaaaaaaaaggatgatgaaaatgtctgggcatggtggctcacacctctaatcccaacactttgggaacccagatgggaagattgcttgagtccaggagttcaaaaccagcttgggcaacatagtgagacctgtctctccatatatatatatatataattaaatatatatatatatttaattatttatttatttatttttgagacagggtcttgctctgtcacccaggctagagtgcagtggcatgatctcgactcactgcaccctccacctcctgggctcaagcgattctcctgcctcagcctctcaagtaactgggattacaggcacctgccaccacgcccagctaatttttgtatttttagtagagacggtgtttcaccatgttggccaggatggtctcaaactcctgaccccaagtgatctgcccgccttggccttccaaagtgctgagattatgggcgtgagccaccatgccaggccaaaaaaaaattttttttaaacttagctgggctactcaggaggccgagagaggaggatcccttgaacccaggagtttcaggctgcagtgacctgtgattaggccactgcactccagcctgggcaacagagcaagacactgt

SEQ ID NO: 96666 - DNA, 87880 bp, Homo sapiens
  misc_feature (1)...(87880): n = A,T,C or G
gagattccaacaacaatgaaaagacagtggccttcaaaattaaattaaaaccaggcagaccgtaaatatgaaaattgatgtggcagtagtaaacttatgtataatggatgtactcacaagacaagtcaaactgaataatgctattatctcatcagtcatatgataactcatatcctggatgttctgagtaataattacataatatcagactgggcatggtggctcatgcctataatcccagcactttaggaggccaaggcaggcagatcacttgaggtaaagagttcgagatcagcctggccaacatggtgaaaccccatctctactaaaaatacaaaaattagctggggatggtggtatgtgcctgtaatcccagctactcggggggctgaggcacaagaattgcttgaacctggaaggcggaggtttcagtgagccaagatcatgccactgcactccagcctactaatatataacattagtggttaaatagcagtgaaacgtaatggagagcaagaagtttatatgaatattctattcgactttatgagtatcctatttgacttatgatatttaggaatgaaattaaaaagcagcttcatatttaacctgttataggaacaataattcaaactatacttaaaaattacataggaaagtgctagaaatcatgacaaactttcccataatgtgccactgagggacaaactgtcaaatctgaacaatgattgcaaacacagcagaaacatcttgattcctttgtagaagggtggagggtcctctgacgaaatttttcctggcatactcagtgccattcttgtctccgcagttggaaaaaagccagaatgagttgtagaaagctagaaaaggcaattaaagtgagtgcaggatggagatgctgttgatataattaccagttgtgttttgaagacctaccatgtacttgtcacaaggcaaaacattaggggtgggggcatacttgtaataatacaagtactatttcctgaatactgtgagtaccaaaggtgctgtgctgagtgccttaaaactttgtctggtgtggctcacgcctataatcgcagcacttcaggaggcagaggcaggtggatcacctgaggtcaggagttcaagaccagcctgaccaacatggtgaaacctcatctctagtaaaaatacaaaaattagctgggtgtggtggcgggcgctactcagctactcggaaggctgaggcaggagaatcatttgaacccaggaggcggagggagccactgcactccagcctgggcaacaagagcaaaagtccatctcaaaataaataaataaataaataaataaattttaaaacaatcctatatataaagcagttcttgtagcggagatagatagctgctcactaaaacttgatttctttctctttctgggaccacagctagactgcattttccagacttccttatggttagctgtgatcaaatggttaatgaggcaataaataaaaccaacaacactaaaaccaaaaattgagctcttggtggaggagaaggcacattgcatccttagtagaagtaaagtttttcctagcactcagctttgtaaaggaacacattttacaaggcacctgctaggcacacacagcactgagctagatgctttctatacgtgcatggaaaataaacaaagggcaacaaagaaggaaaatgcagtgtctgatgtctgtagtcactgaagtccttcacatgttggggaatacttgacactaaatgactgaaatcccaaccaaagcatttgaatactatttaactggaatgaattgcatttaaaaatagccatattgagatataattcaaacactatttaacatgtgcaacacaaagtttttcatgtattgacagagttgtgcaaccattgtgcgaccattgtcatgatctaattttagaacattttcatctccctctaaaagaaactctgtactcattagtcgcctttcctatcccacatgtccccacagccctaagcaaccactaatctaccctccatcactatcaatttgtctgttccgaacatttcatagaaatagaatcatacaataggtagtttctttcacttagcacaatgttttcaaggttcatccatgtcagcgtatatagcagtacttcattcctttcattgctgaatcatattcgactccatggatattccacattttgtttatttatcaaccagttgatgcacattcaggttgtttccattttttgactattataaataatgccgctatgaacaattgtttcttcctttaaaaattgacatcccataaaattcactcttttatttttatttttgtttatttatttatttttgacacagagtctcgctctgttgatcaggctggagtgcagtggcacgatctcggatgactgcaacctccgcctcctgggttcaagcaattcttccgcctcagccttccgagtagctgagattacactcgccagccaccatgctgggctaatttttttttgtattttagtagagacgggattttactatgttggtcaggctggtctggaactcctgacctcaaatgatccgcctgcctcgacctccccaaatgctgggattacaggagtgagccaccacgcccgggccaccctttaaaagtgtacgatggaatggctttggcatattcctagaatgatgcatctatcaccacaatctaattccagcacatctcatcactcccaaaaagaaaccccttaagcagtcacttttcattcctccttcccctgaccccctggtgactgccaatgctctttctgcctctatgggtttacctattcgagacatttcacatagatggagtgatacaacaggcaacctttggagtttggcttctttgacttagcgtaatgtattcaagataatatataacatatattctatatgttatagcatagatcagtactttgctcctttttacggctgaataatattccatcgaatgggcatacaacattttgtttatccagtcattatttctgagaagattttgaggtcaactctgaggcaagcagggaagagagctgtggctgtgtatatctgcaatgtgctgggtcagagagcactgtgggccttcccatgtgctacaaattttccaacctgatattagaagaatgatgcatttgagacgacgttccagtgtgacttgagatgtctggcaaatgtgtaaaattgtatactgaggaaagtggtacctaatagctagaatgttttctaagagaccttcagatatgtgcaggatcccaagaagtcagagatataatagaagggtaagaagagatgatctgattcttcctctttgttttctcattaaaaaagcaatcaatgccaccataaattctaacatttctaaaattacatttttttaaacaaaattatccagggacttctgaacactgggagacattttcaatagatcaagggagaacgccaataatgccctactgcaaatagagatcaaagtaaatgtggtgggacagatgtgatttaaaatattctctcccaattcaaatcaaaaccacaatgagataccatctcacagcagttagaatggtgatcattaaaaagtcaggaaacaacaaatgctggagaggatgtggacaaataggaatgcttttacactgttgatggcagtgtaaattagttcaaccatcgtggaagacagtggggcagtttcacaaggatctagaaccagaaataccatttgacccagcaatcccattactgggtatacacccaaaggactataaatcattctactataaagacacatgcacacatatgtttattgcagcactattaacaatagcaaagacttggaacaacccaaatgtccatcaatgatagactggttaaagcaaatgtggcacatatacactgtagaatactatgcagccatgaaaaagaatgagttcatgtccttttcagggatatgaatgaagctggaaaccatcattctcagcaaactaacacaagaactgaaaaccaaacacctcatgtttctcactcataagtgggagttgaacaatgagaacacatggccacaaggaggggaacatcacacacccgggcctgtcgcagaggggctgggggctaggggagagatagcattaagagaaatacctaatgtagatgacaggttgatgggtgcagcaaaccgccatggcatgtgtatacctatgtaacaaacctgcacgttctgcacttgtatcccagaacttcattgtgtacattgtcttttcactttcttgatggagtcttttgaagcaaaaagcttttaattttaatgaagtccaagttacctattatttcttttgttgcttgtgctttggcgttttatatataataggaatccattgcctaattcaagatcgtgaagatttactttgatgttttcttccaagagttttacagttttatttcttacatttaggtctttgatccatttcgagttcatatttgtatatggtgtgaaatatggatccaactttattcttttgcatacagatagtactcatagaatcatttttttgaaaagactcttccctgtggaattgtcttggcaagtttgtgaaactcatttgaccctaaaagggggtttttatctccagtctctcacttctattccattaatctatgtatctacccttgagattgagagagctagtaattaaccgattaagaactgtttacttggtcaggcgcggtggctcacgctggtaatcccagcactttgggcggccgaggagggcggatcatgaggtcaggagtttgagaccagcctggccaatatggtgaaaccccgtctttactaaaaatacaaaaattacctgggtgtggtggcacgtgcctgtagtcccagctgcgcgagaggctgaggcaggagaatcgcttgaacccaggaggcggaggttgcagtgagccgagattatgccaccgccctccagcctgggctacagagcaggactccgtctcaaacacaacaaaacagaaaaaaactctttgctcaatactcctatggacttaatagcaatgattgctgctaatgtgattctaatactttttgggcatgccatcattgtttaatttcagagcaaactttctggaactgataaataataagctctccttaagaaattaaagtgcattaaaataaattgctttcaggggttcttaaacaagttcaagacatccaggagtgtgatacatttgagcgagaaatagctggcctagttcactctccacattaatcagaacgtctcccaccttctttttagggataagcactctcaaatatcattattcataaactaggggagggccgggtttccactcgcatcagttactttctctcccctgagaatatcttgcagccgctggaattttgggcccctttgctaggaggcaattaacaaattgcacttttactatcaaagctgagagtggcccagcagtggccctggccctgccggcacgcttccgatgcgtcgccctggcctgaagatcgccacagtcgggttcgcgccccgtggtcccctaaggcttccagggcgctggagctggtgcacaggacctgctcctccagggtccccatctgggtctccagcggtccttcctctctgccttctcctcgcagagcaccccgtgggcctagtctaaacgagggcaccactggtccggagttgcacttgttcgctccctcctgggctctggcagcgctgcatccccggggttgcttcgggttcgggcccaatagcagagtcagagccgagacgcatgtcccctgcaccggccaagggtgccgctggggctcgcgccaaggaggcaaaggcggggaccagaggcgccggaggcggcgcaacgcgcacaggtggcgcccggcctggccaggctctggcaggcgaggctgggtgtggtcgtgaaggggcgggcggaccggccccacactgcctcggttcggcaagtgggtcagttggctggggctcacttggcaacgggacgcgggaacgaggggcgcggacgcaggcccgggaggacgcggcggcgggaacctgggggcgcagggctagggcagcgggcccgacccgcacggctttcctggaaagcgctgcccctcgccgcggcgatgmcctcgctgtggagagaaatcctcttggagtcgctgctgggtaagccgaagcccctcgccgcgagttcgcgggtgccagctccccgggccatgtccagagccgtggagccaggccaggttggctgagttcaggtaggaggaaaagggcgctccgtgcccagagtggagatgcttatcgtcccctgggaacttttcctactgaagggaataaaggaaaagacctagattgaagtcttcaagctgagtctgcgaggcrcccgcgagagaccccgtcgcccgagttcccagcagccctgggattgtgcccaaggagcgcgaattctcctcgtgtcggccttgaccccgcgcggccggtaccgtccccaaagccccccacccgtggcctttaagtttaacttaatacagttcagtgctgaactttaaaattcagaaggaaaggggcacccgttttccccaggagctgtaggtggacactgggcggcagctgctgccgtgggctgggcccaggacaagtggccttggtgtcggctgcacacttgggcatttggcgaaaagcatcagactcgagtctcatctgctctctcaccagctttgcaaaatcccgaggacaattttattggtgtaattctgtcggagctgtgtgagtaataaaatcaaagttcccagacaaacatttgggatattgctagaatccccggttcgttacaaaacaaagatccctctggtctgggtggggcgccttcctgagaacttgattttctgggagctggtaattctcgggagtgcttcagactatttttttctggctcagcctgtatctataagttgggagatgtacagtgcctagcattcaataagtacctcaggtgctaggtactcagtgcacttgatctcatttaatcctcccaacaacactgtgaaggggttgaaagtcctattttgctgattaagaaggggaggttggaaagtcagttggtagaaagttcccacgcccagtggttagaccggctacctttggagccaggctgcttagagttagggcaactctgacatttgctacttgtgtaaccttaggtactcacttaactttctgagtctcagtgttttgtttgttgttttgttcttgcttagttagtttttgcatttataagaggggagcggaaatagtacccacctcatagcttatggggctgtataaggaatgagacagatggtacatgttaatacttagcacagaccctagtgcatggcaagtgcccatagcgttaattatcattattgctcaagattatacagcagctgttggcagaggtacaacttacttcagatctgggtattccactacccagcactgcctcataaggattggactgaaaatggtctactcaagggaacgactgctgcctcactcaagtgcttttgggtgtagtctggggttggaggagggagtcctgctgcttgctgcccttttggactctcacaatatttttcattatacaggggacaacttaggtaagaaaattttgtcagtcagggtcctgacgggatgccaaattcaactcagatggtccaaatgaataggacttaataaagagactgtctacagccatatgggcaagggaaaggaacacgcaagggatgttgagagactcacggcagcaggaagccatcctctactggggcctgatgcgaggagtgggagaatatgtacatttcaccagaaatttcacttctgggtatatatcctacagatatactcagtgtcatgtgttacatagtgacatttcacgaggaaattgccattgcttttctgtccatcagtctcttaagcacaacacagtcagtgcagtgagttctgcggatccctacacaggtgtagagctcttgttttgttccatgtcagtggagacaactggaacccagttcaggccagagtcatgaagaagaatgaccagcccaagcggctggagtggagggacaggactgtcgttagaaacaatgttgaagttacactttctctctttaactttttttttttttgtaggatgtgtttcttggtctctctaccatgacctgggaccgatgatctattactttcctttgcaaacactagaactcactgggcttgaaggttttagtatagcatttctttctccaatattcctaacaattactcctttctggaaattggttaacaagaagtggatgctaaccctgctgaggataatcactattggtaagatttaaaagagtttctttaagttgttttttttaagttaaaaatcaagtgagattatgtagactgttctttgaatactaaatatttgaatttaaaaaatcaaagatttctcttttccttaccactgccttagaagagctttagtaattggaagactagactgagagtcaatgtgttttacatttccattgtttttkccagactagaaagacctaaaaatcactgcaatgagtaggggaaagacaccttaaagaactgatcagctcttgaatacattgtgtttttctttccaactgtgacataacactcaggagccatttaaraaagtttgttaaataataattcacaagaaatgtgaaaattatgatgaaaaacaccacagtaagcagtcaaacaagaaactaggaaaaatatttgcaactctttcagccaaagggctaatttctcttatatatagagttcctacaaaccaataataaaaagagaccaacaaatcaatagaaaagggggcacaggatctgatcagttcactggaaaggaaatacaattagttcttaaaaatggaatcaaatgtataggtcataaatcatacacatacagatatgtttatctagagtttgacaagtagattggcaaagaacagctgagtcttactgcactgtgcagtaggggtggggaaacaggcactcatacattgcttgtgcgagtgtccattggcacaacctctatgaagaacaatttagcagtattatcaaaattacaaatatgcatatttcaccagaaattccacttctaggaatatatcctacagatatactcacagtcatgcgttgcttagtgacatttcactargatgttgccatcgcacaacacagtcagagcagtgagttctgtggatccccacaaaggtatagagctcttgttttgttttgtgtcagtaaagatgaagtcttgctatgttgctcaggctggtctcgaattcctgagctcaagccattctccctggcctcccacagtgctgagattataggtgtgagccactgctcatggcctagagctcttgtttttaaaacaactcaggctcagaaggatagtggtaaaaactcctgaaaagtgtgccctttacaaaattggtgtccataggaattsaaagacatgtcaaatggtcttgaaattttcagctccagaaataacaaatgaagtttcctacccttaactgagtaaatattaattgatttcaactggcattggcttacagtatccttacatgaaccaccgtagctccgagtcttgcaagattcatttccttatcacacttcaggttgattttatgggagtgatctcataggtggtactttcttgtcacctttggtgctgcctatgtgggccttacctatagatccacagactgagtagttactgggacagtttccattacttaagtccatttttggcccagtaacttctggtgatggtaagggatgtgatataaaataagtttggggtagatattgtattttattttgatgcttcctattcccttttcactttcttcctccatgaaaacmcatccccttgagcagaagtagatttatatttggaaatatggaataggtagggaacattactcagagttgaggaggaagtggccaatctctgctaagtgctgttccaggtgaccattgagctttgttgttgctaacagaggctaaagtaagccacgatttgtcttaaaactcccttcaaatacttcttaaggacatgaaacaactttgtttttagagtcctgagatattcttatataaatacagagaggatctgagcattacatgccatctcacttctggcacctcagatattttaggttaattactgtgtaattaactatgaaaccagttcatactcctatcaatttagattatttttgatccaccagaaaggctataatcaaaaaagacagacaataataagtgttgacaaggatgtggggaaattggaaccttcacacattactggtagaaatataagaaatataaaatggcacagctgctttggcaaarcrtgatagaagcwgttatcatatgatctaacaactctattccttggtatgtacccaagaaaaatggaaacatctgttcacacataaacttgtamacaaatgttcatagcagcattattcatgagagccacaaaatggaaacaacctaaatgcccatcaactgatacatggataaacaaaatgtggtatatacatgcaatggaatattatatagctatgagaaataatgaaacactgatacatgctacaacctggatgcaccctgaaaacgttatgctaagggaaagaaggcagtcacaaaaggccacatattgtacaatttaatatgaagtgcccagaataggaaaaattcgcagagacagaaaatagattagtggttgccagaggctagggcatgtggagagaagggaatgagaagtgacctgctaatggggatggggtttctttttggggtgatgaaattgttctggaattagataatggtgattgttgcacgactttatgagtatactaaaaaccattgaattgtatattttaacatggtgacttttatgatatgtgaattgtatttcaataaaaattttaaatacatatataaaattatacatcaactctgtcttcctgagtataaagatggtatcagataacatgcatcaaatgcagatcacggagttccaatccatacttgccagaaatgcttagctctccctattttgtttgtaggcagcatagcctccttccaggctccaaatgccaaacttcgactgatggttcttgcgcttggggtgtcttcctcwctgatagtgcaagctgtgacttggtggtcaggaagtcatttgcaaaggtatggttaatgtttcatgtacttatagacaaacaagtataaccagttaccaaagggaaacctggggccaggagttccaggttatagtttttaccttccatatggctttgtcaaagtctccttttttttccttttcccaaaacaaggacatgaatacttgccatcaatctcaataaggttttgaaaactaaagaattatagcaagttgctgaagttgctatatagaggctaaatcacattcattattgcaaattaccaataagactatttcagctacttattctatgaaactgaaattcatgatggacatagtacattgagtccacataaaaagtgtttaaaaatacttttgcacttacaggtacctcagaatttggggattcattttaggacagattgttcttgttgttctacgcatatggtatacttcactaaacccaatctggagttatcagatgtccaacaaagtgatactgacattaagtgccatagccacacttgatcgtattggcacaggtaatactgtaacttaggaattttctctttkcagagcttacctttcctatgtgaatgttgcacatcttggaaagaaaatctataaaagtagtctttctgcattatatctatatttcagctttttcttcctctgaaataataattggtgcagccagtgggctatttgctaagcaggaggcacattttccttgcctgtacagacagagggtgaaaataaaataccattactggtttgtagcactgtggcagtgggagacgagaaccaggcctcatatcccagctggcattcagctctgtcttcctccttctttcccctggtcagagctctctaggatgggattctccatcctccacctccacactgacctcagtacatctgtaacactaaggaaagtttctgtcacgtatggctgtcactggaactccctgggttttttttcccagaggtctgaagctccaaatctaagaattgaaaagataagaaaccttgcatatgcatactgactttccaatcacctgtctctcccaggggccagctttctccgagacagaaacatgcccagcttagagtttgtttcataaaccaacccgagactcttctaaaaagaagggagaggtattagtggattctagttaacgtgctcctagctttttgtgtaactctcagtgagtcactgttcttctgtaactacaaggtgaaatctcacagactaatggaagtttagagggtattggctcaccaaaaagtgcttgtataattccccctgtggcccctagtttggcatgaaatgagaatagagggaaattatgtcagtaaattggccttgtgatgttaatagtagaagacttagaactctgtctggtcccctaacttatgttttacattcatatctagaggcagagactcgggcagcccattttgccggtacagcctgataaagatctgaacttcagggtactgtttacatctcctgacttttcttctatctggcctctgttttaaatgtatgtgacccagttcctggctggcagtcccttcctccatttctgctctgtgccttcctttataaaactgactgttcaccctgcaccttctcagcctatctgagcataccaagtattttttgtagtttcctttgaagatttgttgggtcctgggtgggggtggagtcacccackgtaatacactgcattttactcagcaaattcagtttagatggctctttttcctcaaaactctccgctgagcccccagacccctggcctcccttctgtcaccaccgccttctcccattccatcccatccccatagctctcggctctgcccctcctcactctgatcctgttaatgtcagagaagctttcttgggaaattagactgccagccataccgtcagaccctaagaccttccttctgtcctgtagagggctggatggggtcacaaagcatctgcccaataggctctctctgtttctacgaagaagtcctcctgctggcatcttctccarttgttacagttttgtgtgtgaagtcattgctgtgatgaattggacctcttggttaaacagtaccaaagagctacactgcctaarctccaatcccaggttcctaggttatctttactagctgtgtgaacttggaaaggctacctgatctctctgtgtctgttttcttgtttttgagatggagtttcactcttgttgcccgggctggagtgcagtgtcacgatctcagcgcactgcaacccctgcctcccaggttcaagcgattctcctgactcagcctcccgagtagctgggattacaggcgtctgccaccgtgcccggctaactttttttttttgtatttttagtagagacagggtttcaccatgttggccaggctggtttcaaactcctgacctcaggtgatccacctgccttggcctcccaaagtgctgggattacaggctcgagccactgcatctggccctgttttctaatttgtaaaataggattaatagtagagmctacctcataaagttgtgaaagttaaatgagttaatataaagttaatatacagggcttggaagaggggttggtgcacagtggctgcccagtcaatgcactaatattactctgcacccacagagggttagatgagagccctgttctttgggaggaagcagcttgtgtactggaaatgttccactcaatttgtacaacatttgttcacaaacacaaacactttttctgcaatgcgttagcttcacatgaagcaaataattttctgcattttcacctgttgaattccaaaatgccttttctcccttaaaccattccttatctggcctgcatggaattatgtctcccactaaatagctgtcagcatgtttagcttcatattgtagttgcatgtctcatctcctcttccgaagtaagcttcttgaagccaaataccatttcttccttgctaaaagtctgctaaatatagagcgcaaatttccatataactaaactttttccatatatgtatttttaaattctagatggtgactgcagtaaacctgaagaaaagaagactggtgaggtagccacggggatggcctctagacccaactggctgctggcaggggctgcttttggtagccttgtgttcctcacccactgggtttttggagaagtctctcttgtttccagatgggcagtgagtgggcatccacatccagggccagatcctaacccatttgggtgagtttgggtttggaagcaatcacaaaatcggcagttatgcctggaggaagcaatgcctcctttgtcagacagctaggtctgtgctagccagatatttcataccactctccctagatatcagaatgtggcatgaaattattgtgtgctctggagagaagggcactagaagggtcttttcctctgtgcagaaggattgctgaaaagtagatgtgggaggcccaatggttgtgcacagctaagtaagaggttcccagagctccagcataggcatctcgaggaatgcctgcacagaagagcattctcagtggtgggagaggagcagcattccctggccatttcctccagaccctctggttatggttatgggcatttagtaggataagaccacagtcccctgaggagactaggttggctgcctggggcacagatctctattctcagcaaaggagggcagccccaggagatccctgcatcttctggtactttcttgttccagctgtgggacagggwcacacagggagttagtagtctggagtcaagtgttggtccttgtgtttggtcctttttaactctctctctgctcttcctgacacatcttttctcttgtaactggctccatctcttcttgcaaaaaaattggaggaattcttaaaagatctgcctccgatatcttttctctcttgtagtgctgaattcttacaattgaaggcatgcagctgcctactggatctttccccagcagggatctgggcatatcccacaggcttgtcaacctcagcttgtccaaatctgaactcagtatttcccagtcctccacgcatgttcttcttcccccattcccaggtccattttgtctgtccacctcatcatccaaacctgagaccaagagtttgcccagaattctccatcttcctcattttctccaactcagttctatgacttctcttagattaaccccttcttctctatccctaagttcatctgccttagtggagtcctcaccattttttcattcaggctattactgttgtctcctaattgtctctctttagcagaatcttctccacatggttccagaatgatctctgtaaaatgcaaatctgattccaccactcctttactgataacctctcagcagttcccccccaccaatacctggtggcccccaattctcccatatgaggcaggatctggcccccctacttacctttccaaatgctttctgatcttatcctcctgcttcacctgagtcgaacccacttgcgcttctctggaagtgccagactgttcctgtcccccctctgcctgggcttgcttttctgccttgatgtcctggcaagccctactcccttcaaaacccagcacaaacattttctctgtgaattattctgttattatcacaggggatcctcctttatgccacatactataatactttgagtcaatcaatttttatatatgtgttatatatgtgtacacacacacacacacacacacacacacacayatatatatatgtatctgttagaaactttatattctgtattacagattttaaaaaatgtttttcttcctgtctagacactaagtcccttgagggcagggaatgggaaaaggaatgaatgttgattacttactctgtgtcaggtcctgaacaaggacttttgaaaatattatttcatttagagtctgtatcttcttccatatctgggaggaaggcagagaagaaagaaaggaacaaaaggccagagaggaaggaagaagtttattcctatgtgttaaagcttagtttccaaagttacctgtgaaaacaagcataagttttgtggcagagtaaaggaagaactttaatggtaaatggtgagtcctggtaaccaggagaaactcaccattcaactctgggccaatcatattacatccctggccttgctttwctcacaagaagaatgtaactaaacttcagggggaaactttctcacatatataaaatcagcatttgcttttcagacatttcctaatcctgtatgttagaatgagacactgaagacggaactgcaactcacaagaccagcatttcccaaactgtgttctgtgagatgctggtttcttgagatgttaatggttactctgagaaaaagaaaatgcttctacatcaaataggttgaggaaatagtgcatttcaatctccctttctttgtgcttcacaatgcacatcagcatattagagacttttgcaggtttcctaaagttatttgaacatggaattcttctttagaacatctattaatatctgacagaataggtgtgtttctcaraaccagcttgagaaatgttgcattaggccatcatcatgaatagctgggactacaggcacctgacactacacctggctaacttaaaactttttttttttttttgtagaggcaaggtctcactattttttccaggctgctctcaaactcctgacctcaaacaatcctcccacctctgcctcccaaagtgctggtattactgtcatgagtcactgtgcctggccctatctgcattatttattaatggkgtttattatatgtttcccccactggaatgtgagctctatgggagaaagggatcgttgttcattgatgcatcccaaacacctagaatggagcctggcacatagtgggcactcaaaaatatttgttgttgatttgggagtagaaaaagatccacactgtccttcatggcctcttctcatatttggtcttctgtagccccagggtcattcttacacaggtaggagcaggcagtaatgtggctaacagcctcatcccagagcctgaggacaattttagattcttagtcctatgtgggctactgtgtatgacctcaagcaggttacttacataccctttcccccagaattctcctctgcaaaatggggataatattagcatttatcttacaggcacatgagaattaaatgaataataattacaggggaaaatcttaaaatagtgcctrgtatgtagtgcatgctatggttttgagcttaatttatgtgacagctacttaaatgagtcctatattctagctattattgtttctgggtttccttctaaagtttagtcaaatttcttttttyctcctcttgcaactttttgccaaaatagcaacagaataaaatagtttgtggttgttttaaaagacacacagctatcagttatttatcaaactgacgctggtcttgggaaggccgagactctaggcaagagcagtattgaggtagaggaaagaaagaaaaaaaagcaaactaaatagaaaccattccaatgacctttgctttttgttcttggcagaatcatttaaaatgttactgaccaacatggactgtactttaatagtctgagaaagcttggttactgtgtttacatgataagttggcagatatcattgatctcatggcagaggttttattccttctctgttctgaatgtgtataatattggcttccagtgggctctcatgatctcactggttgtttcacacacgttatctcttatatgtacccagaggtgggaggtatatttctattttatattcgggatgatgaaatattactaatgtcacatgtcttagagcatgtcctttttcacagaggtgcagtactgctgtgcttggcaagtggattgatgcttccatcttgtttgtggtttcgtggtactggtttgatctggtgggttacaggtatgtggaatttacctgcagatagaacacgactgagcttggttatccagtttgtttgcaagcatgcgcaactcractgaaagtagatacaaccatacaaatatgtactgtggccaaatgggctgttgtaaacagcaactataatgcagatgtcaccaaggtcaccggtgactacctgctctgagttcctgcttcctcctacctccgcctccccctcctcctgtggctgtgctgctttcctggactacactgccataatactacctactcccaaaaatacataarcaaggcacatgtgttaagtagcagatttataaaaattcttgatttttaattaaagtatattattttatttgtataaacttatgggttacaagtgagattgactgattgataacttttaagttcaggggtacatgtgcaggtttgttacataagtaaattcgtgcaatgggggtttgttgtacagattattttgttacccaggtaataagcctagtacccgttattcttcctgatcctctctctcctcctacctgcctctggtggaccccagtgtctgttgttcccctctttgtgtccatgtgctctcatcattcagctcccatttaatgataacatgcagcatttggttttctgttcctgcattagtttgctaaggatgatggcctccagctccatctgtgttcctgcaaaggatatgatctcattcttttttatggctgcatagtattccatggtgtatattaccacattttctttatccagtttaccattgatgggcatttaggttgattccatgtctttgctactgtgaatagcactgcaataaacatacgcgtgcatgtgtctttatggtagaacaatttatattcctttgggtacatacccagtaatgggattgctaggtcaaatggtaattctgttttgaggaattgccacactgatttccacaaatgttagactaatttacactctcaccagcagtgtataggtgcatagattgggtagtggtcaagtcagagttcttaggctgtccctcacctgatggatacagtgaacccataagtaattctcatcagtagcagattttactgaggagatgagggctgtgcatggccatgttgccagttgccagacctctttcactcttcaagattccttgcttttccgtgtttcaaaaatgccatttagagttccatgatgaagctccatttccctttctcctttacatgtaacagkggagctcccagccttccacccagctgtagggtccatgtctgcttactcaaagacctgacccatctcttcccagttacaccctttaggaccccagaagtatcagtgaagacaatcatgttttgggctgccctcttccctctcccctagtctttgtgaagaggagggagcattgaacttattttcctataacagaattatgccagccctcctcctttcccttaaaaggcaatatttaatgattatagtcaggttttctgactctaagtaaaaaaaaamccactttattatatagcaaatactatatttggtttatgtgaggagagatgagatgttgttaatacatgttaattaagttggtgattcagagtggtactctaggtgctgtgtgtgggtttgagagactgtatcagtaawagaagatttaggatgacaacatagcaagtgaatttctgtacaccgtaagtgccgtcacatttgcatggaaatgtatgtgtaatccagatacgtggctaaatcgatgaggttggccaggtcctcttcctcctggagctatgtgaacatactgttgcagtcttgttgagctgtttgtattgcttgtgtattttttgataggcattgtatttggagcctgtggaggtttgtgtgtacctaagagtaatctttcttctcatcagagagtttatttgtgagattcctcaggaaaagggccaggaaagtttgtcagtgctgagtttgcattaagcatatacagtagcttcttaatctgcatataacttggaaaaggaaaaagaaatgcattgagcgtttgttcagcatttatatcatgccttttcacataaagtataagcaaagtgcttattgggcaggtagttaacagcttcattttaacctgaagaacacagagaaatagactgttagttaaagaacaggaaagctgtgaacctaccgtcttatgcttatttccccagacaagtaaggtcatatccttgagagtcaaacctaatctagttttgttgtctctctggagtattaaatagtagctttaaagactctaagaaaagcagatttaaggcttctagaaggctgcttgcagtagaagaaagcagggccataattcaccagcttcatcttcctttctgatcacttactcacctgcaataagttggagctcaagcttaattatctggaggtggtgcccacttttcactgtgattcatctctggaaaccacacaataatgcaagctgtggccaaagaaatcctgttttcccattgcacagtttatgttgacaatcccaactggagactcagcatgaaattaattatggcagtgactgaacaatttcatacaagcaaagatacaggtgctttaaatgttgatagcagttaaattagtaaagccagagttctatttttaaaaaaagtctagatatagtaaacatattgataggaccccattgtactatagtgtccagataattttactatatggaaaacttcatttattgaaaacttacatgtcagttattataattgttattgaaatagttaactattacttctgcttgatgtctttgatgttgtacagatttgggggagattattggagggcctcaaacaaaagcagttaaggaatacagttaaatgaaaaaggtaaagtgactaacagtgcgtatcatatactgtcattggtgtacaaaaaggaagggaaatgcatgcacatatgtatttctttgtatgtgtagggtatctctggaaggatgcaatggtaagtgcttacactggattggttgccttcactaaggggaacaaatgggttacgggtcagaaagtcccttttgtagcatttgaattgtaattttgaatttataacctatttaaacagtacaattttggtggatttaaaatatagagcctatttaaaaatagaaataaaaatgataacagtcaagataaatttgagagatgttttcattccctctagataattctctgtagtaaggagaacaatattattctaacgtctttagattagaatatcaaattcgggatcattcttttaaaaacagtcattgtaagccgtaagtaagaaaaattcaacctcactaacagtcaaataagtgcaatttaaaatgtcatagcattttcgaccttaatttggtaaagatttttggtattattacatatatttggtaaagatttttaccaaattaaagatgaaattttggcaggatgtgagaggtgtcaagacttggcaagttttctgcaggaagcaaagacaagtattaggtttcctgaaagctgggtataaggtttcctgaaagttgctttcaggaaagcaactggtcacaagtcatgactttaaaatacttatgccccttgacataagagttgtgttgctaggaatctgttttaaggaaataataggtaatgtggtaagggatcattgacaaaaaaagatgttcatcacactgttgttttaaaagcttgacataggaaccttcacaaatggccagcaataggaaaatgcttacttatattgtggtgtatttatccagtgaagtattatatgtacattaaaatgttttagaaaaaaattatttacactagtaaatgttcctgatataatgtttcataaatagcagcatatagtctttaatatgtggtacaattccatttatgtaaaaatacttctgtatatacacagaagagacttagaaatacacagaaatattggctgtggttatctccgtcttagacaatccttaattgcttcttttcagttctgtatttttaaaatttctaaagcaaataggcattacagttgttttattttaaaatgaaaaaattccattgagaatctaggtatttgaaatctccctatggagttaaactccatgggttgtagaggaccttggaatctagttctcatgctcatctgagagatgttctttttgaagtggggagaaataggcagtcaggcaggtggcattgccctgtgatggtgcaatggaatgtattgatgaacttattgagctatggggcattaagatgctractggggccactttctgcttcccactcctttctggagttcttggccgaagtagtgaagagcctgctctagctacccttgaagggtgggtcccaattatacaacatggattggaatgtttcaaaaatgccatattttctatggaaaggggttatattgatggtcccaagatggagtggaccctgcagtgctatttcaaagctgatttcacaaggattgggggaaaggttatgtgatctcagcattggctcaataaactaacatttacagagtgcctgctgtggatcaggcagaatgcatagctcctgacacctagcaggctgttgggtaatgaatgaactgattgcagaattgctaaagcagtgagcctacaaatgctatgtcttctcttggggctgtgtggttggaaaagtcaatgtacctcttgtaggacaggtggtagcatttagatggacagaaattccttagaagccccttaacagaggtgttctagaaaccacactctacctgttttctaatgtcctgcatctgattggttaaatgtaatatttttggacatatttttggtattgcagaaattttagtttttattgctgttaggatcttaacagcaattacctaaaaatacccttttcactcctcctgccctttctgaggaaatagcagtgaactgagatttactagatccacattctacctccagttgagacaataactggctgtgtgacattaggcaaatcacattaaccttgtcagatcttagttttctcatctgtctggagattggatcagtatacccctaaggtctgttctggtcctaaaggctataaattggtcatcctctaagctcgactgctttcctgtctgattcttttctctctcacaaacaggaacagcttcagctgcggggctcctttacctgcacacatgggcagctgctgtgtctggctgtgtcttcgccatctttactgcatccatgtggccccaaacacttggacaccttattaactcagggacaaaccctgggaaaaccatgaccattgccatgatattttatcttctagaaatatttttctgtgcctggtgcacagcttttaagtttgtcccaggaggtgtctacgctagagaaagatcagatgtgcttttgggtgagtacatttgaaaggtctggattaaaataattgctcaaaaatatccttatggactgaccaggatttagcactttatgtaactggtggaaataagcaggatgatctagctttcttggtaaaatagactctcttgattaaaacacaaaacctggagtgatgtctaaattataaattaaaatcaaatgtattaatttaccagcgcatttctgtaatacttattactacaaaggtcttttaaattaattagttgtgaaaagattcagtccatactaaagcgtaaacaatgtaacacttgtgttatacgatgcgttaggaaaaggtatgatcatgatactcatgctgccacttcagtggttggctcgtaaatatacatggggawtgtgattttttggggttcccctgaattttatttatgaatgttttttgagatgaggtcttactctggcagtgatgtgatcacagctcactgcagccttgagctcctgggctcaagcgatccttctacctctgcctcccaagtagttgggtctactaggtgtgggccaccacactccactaatttaaaaaattttttgtagagacaggggtcttgctatgttgcacaggctggtcttgaackcctggcctcaagtgatcctcctgccttggcttcccaaagtgctaggattacaggtgtgagccaccacacctagactctattatttttatttaccatatttgtaacaaaaaattcatatatcttagtgtaaatggtaaatctccaagtcatagaacaaatatatttaccattttagtggttatgaatttgcataccaaaattataatttaataaacttagctcagtttaatattttaaaaattgattcacataccaaaattataatttcataaacttagttcaattttaatattttaaaaattggcttctggcaataatacaattattggtgtatacyaggcatacataaatcgaatgttgtgaatcattttagtttacataattttagcttaagtaacatgtcaaatacttctacaaagtgtttgaaagatgaggagaaaaaacatgttaataagggatctacttgtttgtttgttcacttattcattaaaaatattaacacgatttcactggttgtctacattttgaaaaaaaatgatcatgtaccttatgttccaggaacagtgccagatactgaagattatttttacacatttttatctgtataaatttgtggggtacaattgcaattttgttacatgcataggttgcatagtggttaagtcagggcatttagagtatccatcaccctgacagggtacattgtatccattaatcaatttctcatcattgccccctttcccaccctctcactcttctggtctactttatctaccactcccagctgctgaaatattaaaaacacccactgtccttgcctacctggagctttagttgaatgggggaaacatcatatataaaacgagacaaatacttaagaaattacagttgtgtgagtgctactcaggagaagtgaaggcttctattagggttctgttttttttttttcttttttttttttttgagacagggtcttgttctgttcctccagctggagtgcagtggtgcagtcatagctccctgtatccttgagctcccccctcaacctcccaagtagctgggtctccaggcacacaccaccatgcctggctgattatgttgttttttgtagagatggggtctcactttgttgcccaggctggcgtcgaactcctgggcttacgcaattctcttgcctcagcctcccaaggtgctgggattacatctacctgggttctgttacagttcccctggtgccctgacagacatccgactactctgcacattttgccatatgcttttctaccccacgagctagacatctgtcaggagaggctggtttgaaagacatattttaaaattacatgaaatatttttgaattaacttggagaatttggtatttctggtaaatactcaagctttcatctaatgagagaaacacattgctgcatttcctccgtggtaaccttggctttgcaaactttgtatttcttctgatttatttcaggtgtgtgtactctctcctgctttgttttcttgtccaatgccctgctttttttcttataccagcttgcttagggatctgccatgagaaaaaaacaaatgaaagtaagagctattccatgcatgagtttgtttctttagaattttatgaacgatgagttttttttttagtttcttctcactacttatggaattgtagaaacagtgcataattacagcttcatacaactaagaactttaaagaaaaataagagtgatgttatttgatgaggccacaaaagccaagaaatgttggtaatattcagagtggcttttaatacaactgagttgaaaagaatatttattatatcagaatttagttataaatttatttcctggattcctcctgctatttcctggaaaattggacaccgctgtttttgcttggcttctgacttttacttgacatttcttaaatgccttaatttcttaatttccatatggcagcatatctctgtttccattcttagtatgtatggttttagatgaagtaagtaaactttaagtgtaagctagtttgttgcatatcccaatttagctccactttattggctggcctgttggcacactgtgatttccagcatgcatcctctgtgaggcctctgtgcccagaaaactcacatcctggggcagaattatcacaagcactgccatattaagagcctacgtatgatccattgtgatcctcaacctggtgcacggaagggctcttattgcatccctatgggagctcagaagacttcactgtcccctgcccaatcaacagtcagtcatgaacacgttcagcaacctaacaactaggaaatactcaagaaattcaaagaaatatgtatcgggaaaaggctggggtcctgtcatttaaagcacgattcctagaaccctacctgatattttccagttatcaaaagcactactagagtaattgtttaggttctgagataaattaaatcagtacatgaatttccagggtatgttcctttcaaggaactctcagctgctggaatacaacattggaaggatttttggatcagactataacatattctttctttctcttataacagggacaatgatgttaattatcgggctgaatatgctatttggtcctaagaaaaaccttgacttgcttcttcaaacaaaaaacagttctaaagtgcttttcagaaagagtgaaaaatacatgaaactttgtaagtatagttttacattcttaaaaaaaattaattatataaaattctaaacgtatgaaattaaagagtataatgatccctcatgtatccttcatcctgtttcagcaattctcaacattttgccatgttgttaatagctatcttctctagtttttttaaaaaattatactttaagttctagggtacatgtgcacaacgtgcaggtttgttacataggtatacatgtgccatgttggtttgctggacccatcaactcgtcatttacattaggtattcctcctaatgctatccctcccccctcaccccaccccacagcaggccccagtgtgtgatgttccccgccctgtgtccgtgtgttctcattgtttaattcccacctatgagtgagaacatgtggtgtttggtttgttgtccttgtgatagtttgctgagaatgatgtttccagcttcattcatgcccctgcaaaggacatgaactcattttttatggctgcctagtattccatggtgtatatgtgccacattttcttaatccagtctatcattgatggacatttgggttggttccaagtctttgctattgtgaatagtgctgtaataaacatacgtgtgcatgtatctttatagtagcatgatttataatcctttgggtacatacccagtaatgggatggctgggtcaaatggtatttctagttctagatccttgaggaatcaccacactgttttccacaatggttgaacttatttacactcccaccaacagtayaaaagcgttcctatttctccatatcctctccagcatctgttgtttcctgagtttttaatgatcaccattctaactggtgtgagatggtatcccattgtggttttgatttgcatttctctgatgcccagtgatgatgagcattttttcatgtgtatgttggctgcataaatgtcttctttggagaagtgtctgttcatatcctttgcccactctttgatggagtcgtttgttttttttttcttgtaaatttgtttaagttctttgtagattctggatattagccctttgtcacatggatagattgcaaaaattttgtcccattctgtaggtttcctgttcactctgatggtagtttcttttgctgtgcagaagctcttcagtttaattagatcccatttgtcaattttggcttttgttgcgttgcttttggtgttttagtcatgaagtctttgtctatgcctatgtcctgaatggtattgcctaggttttcttctagcgcttttatggttttaggtctaatatttaagtctttaatccatcctgaattaatttttgtacaaagtgcaaggaagaaatccagtttcagctttctccatatggctagccagttttcccagcaccatttgttaaatagggaaccctttcctcctttcttgtttttgtcaggtttgtcaaagatcagatggttgtagatgtgaggtgttatttctgaggcctctgttctgttcaattggtctatatatctgttttggtatgagtaccatgctgttttggttactgtagacttgtagtatagtttgaagtcaggtagcctgatgcctccagctttgttctttttgcttaggattgtcctggctatgtgggctcttttttggttctatatgaactttaaagtagttttttccaattctgtgaagaaagtcattggtgacttgatggggatggcatttaatctataaattaccttgagcagtatggccattttcatgatattgattcttcctatccatgagcatggaatattcttccatttgtttgtgtcctcttttatttcattgagcagtggtttgtagttctccttgaagaggtccttcacatctcttttaagttggattcctaggtattttattctctttgtagcaattgtgaatggaagttcactcatgatttggctctctgtttgtctgttattggtgtataggaatggttgggatttttgcacactgattttgtatcctgagactttgctgaagttgtttatcagcttaaggagattttgggctgaaatgatggggttttctaaatatacagtcatgtcatctgcaaacagggacaatttgacttcctcttttcctaactgaatgcactttattcccttctcctgcctgattgccctggccagaacttccaacactgtgttgaataggagtggtgagagagggcatacttgtcttgtgctggttttcaaacggaatgcttccagtttttgcccattcggtatgatattgactgtgggtttgtcataaagggctcttattattttcagatatgttccattaatacctagtttattgagggtttttagcatgaagcactgttgaattttgtcgaaggccttttctgcatctattgagataatcacgtggtttttgtctttggttctgtttatgtgatggattatgtttattggcttgcatatgttgaacccaccttgcatctcagggatgaagctaacttgatcttggtggataagctttttgatgtgctgctggatttggtttgccagtattttattgaggattttcacagtgatgtatatcagggatattggtttaaagttctctttttttgttgtgtctctgccaagctttggtatcaggatgatgctggtctcataaaatgagttagggaggattccctctttttctattgattggaatagttttagaaggtatgttaccagctcttctttgtacctgtggtagaattcggctgtgaatccttctggtcctggacttttgttggttggtaggctgttaattattgcctcaatttcagagcttgttgttggtctattcagagattcaacttcttcctagtttagtcttgggagggtgtatgtgtacaggaatttatcaatgtcttctagattttctagtttatttgcatagaggtgtttatagtattctctgatggtagtttgtatttctgtgggattgaaggtgatatccctttatcattttttatcatgtctatttgattcttctctcttttcttctttattagtcttgctagtgatctatcaattttgttaatcttttcaaaaaaccacctcctggattcattgatttttttgaaggatttttgtgtctctatctcctttcgttctgctctgatcttagttatttcttgccttctgctagcttttgaatttgctggctcttgcttctctagctcttttaattgtgatgttagggtgtcgattttagatctttcctgctgtctgttttgggcatttagttctataaatttccctctacacactgctttaaatgtgtcccagagattcttgtacattgtgtctttgttctcattggtttcaaagaacatctttatttctgccttcatttcattatttacccagtagtcattcaggagcaggttgttcggtttccaggtagttgtgtggttttgggtgagtttcttaatcctgaattctaatttcattgcactgtgatctaagagacagtttgttatgattttggttcttttatgtttgctgaggagtgctttacttccatttatgtggtcaattttggaataagtgtgatgtggttctgagaaaaatgtatattctgttgatttggggtggagagttctgtagatgtctattagttccgcttggtgcagagctgagttcaagtcctggatatccttgttaaccttctgtctcattgatatgtctaatattgacagtggggtattaaagtctcctattattattgtgtaggagtctaagtctctttgtaggtctctaaggacttgctttatgaatctgggtgctcctgtattaggtgcatatatatttaggatagttagctcttcttgttgaattgatccctttactattatgtaatggccttctttgtctcttttgatctatgttggtttaaagcctgttgtatcagagactaggattgcaacccctgctttttttttgctttccatttgcttggtagatcttcctccatccctttattttgagcccatgtgtgtgtgcatgcaagatgggtctcctgaatacagcacagtaatgggtcttgactatccaatttgccagtctgtgtctgggcatttagcccatttacatttaaggtgaatattgttatgtgtgaatttgatcctatcattatgatgttagctggttattcgcccattaattggtgcagtttcttcatagcatcgacggtccttacaatttggcatgtttttgcatggtactggttggcgtgtttttgcaggtaccggttgttcctgtccatgtttagtgcttccttcaggagctcttttagggcaggcctggtggtggcaaaatctctcagcatttgcttgtctgtaaagtattttatttctccttcacttatgaagcttagttataaaattctgggttgaaaattcttttctttaagaatgttgaatattggtctccactctcttctggcttgtagggtttctgacaaaagatccgctgttagtctgatgggcttccctttttgggtaacccaacatttctctctggctgcccttaacattttttcctttatttcaaccttggtgaatctgacagtcatgtgtcttggggttgctcttcttgaggaatatctttgtggtgttctctgtatttcctgaatttgaatgttggcttgccttgctaggttggggaagttcttctggataatatcctgaagagtgttttccaacttggttccattctccccgtcactttcaggtacaccaatcaaacctagatttggtcttttcacatagttccaaagttcttggaggatttgttcatttcttttcactcttttttctctaaacttgtcttctgactttatttcattaatttgatcttcaatcactgatatcctccttccacttgatcaaatcagctattgaagcttgtgcatgaatcacgaagttcttgtgccattgttttcaactccatcaggtcatttagggtcttctctacacgtttattctagttagccattcgtctaacatttttcaaggtttttggcttccttgcaatgggttagaacaagctcctttagctcggagaagtttgttattagccaccttctgaagcttacttctgtcaactcatcaaagtcattctccgtccagctttgttccattgctggtgaggagctgtgatcctttggaggagaagaggcactctggtttttagaatttttggcttttctgatctggtttctccccatctttgtggttttatctatctttggtctttgatgttggtgacctgcagatggagttttggtgtggatgtcctttttgttgatgctgatgctattcctttctgtttgttagttttccttctaacagtcaggtcctttagctgcaggtctgttggagtttgctggaggtccactccagacgtttgcctgggtatcaccagtggaggctgcagaataggaaatattgcagaatagtaaatattgctgcctgatccttcatctggaagctttgtcctagattggcacccacctgtatgaggtgtctgttagcccctactgggaggtgtctcccagttaggctacatgggggtcagggacctacatgaggaggcagtctgtctgttctcagagctcaaatgccgtgctgggagaaccactgctctcttcagagctgtcagacagggacgtttaagtctgcagaagtttctcctgccttttgttcagctatgcctggcccacagagatggagtccatagaggcagtagaccttgctgagctgtggtgggctccaccctgttccagcttcctggctgctttgtttacttactctagcctcagcaatggcagatgcccctcccccaaccaggctgcgccttggaggttgatctcagactgctgcactagcagtgagcaaggctccctgtgtgaggtacccacccagccaggcacaggatggtatctcctgttctgccggttgctaagaccatgggaaaaacacagtattttggcgggagtgtcctgtttttccaggtacagtctgtcatggcttgccttggctaggaaagggaaatcctctggccccttgcacttcccgggtgaggtgatgccacgccctacttcagatcaccctccatgggctgtgcccactgtgcaaccagttccaatgagatgaaccaggtacctcagttggaaatgcagaaatcgcctgtcttctgtgtcgatcatgctgggagctgcagaacagagctgttcctattcgtccatctatttctctactttttttttgtactttaaagcaaatctctgatatcatgccatttccaccataaatactctgtattggttttatttcacttctaacatagataagagaattcaacatgcagaatttccaaaatgatttgttctaatggttgagactatttactccatttcttgttttccttttttggggagattatgttaatgtttgggatgctgatgaactaaaatctcaaacatgaaattagtttactattcaatatagtaaactcatgtaaaatagactggattaaataaaaatgtactgaatgtatttaatgtgaagacagcgtgttaagtagttgttaagtaggattcaaagatgtgaataatggtctccaccttcaaggacttggtgctttacaaaggagacaaaatattatagtgtaaagatataaaaaacaattaagaagctgtataagttctctatgtatttccaaaagaaatatcacaaaacagaccattatataaaaaccttcatatatgtttcatcttaatttaaaagattatatttggccaggtgcagtggttcacttctgtaatcccagcactttgaaaggccaaggcaggaggattgcttggggccaggagttcgagaccagcataagcaatgtagtgagaccccatctctacaaaaaatttaaaaatcagccatttgtggtggtgcacctgcagtcccagtagtctcagctactagggagggcgagggtgaagtgggaggatcttttgagcctgggaggtcaaggctgcagtgatggtgccactgcacttcagcatggatgacagaatgagactctgactcaaaaaaraaaaaaaaaagagagaagaaaagattctatttaaacttagggagaaatgagattttttttgtgtgttttcttatgttttggtatatcccttgaaacaaataactagcagtttttgtttttaatcctgacaatctttgtctttttttttgttgttggtaagaaccacaattctttaattcacttatcaaatcgaggcatttggaacagtttatttacagttatttagtcatttttgtgtgattaaaaaaagacaagtttcttagagcaattttaggttcrtaggaaaattatatggaaagcgtggagatttttccatatgcctcatgcccccacatacatacagcaccccccactatcaaaattactcaccagaatgatacatttgttaaaataaatgaacctacattgatacatcattgtcacccaaaggccatagtttacattagggttcacttttagctttgtacagtttaggagttttgacaaatgtataattacatagatccctcagtgcggtatcatacagaatactttctctgccctaaacatcccctgtgcctcacctaatcatcgattcctcctccaaacccctggcaaccactaatgttttactgttttcattgttttgcattttccagaatgtcaatttttgtcttttaagggtttaatctatttttaccatgatttctgaatgtatatttatctaatgtgatcatcttacttttctttttcattttccactttttctaggtatgttttttcctttttctttttgatatttttttcattgattagggttttttttttcccttatgcccctcctccccactcctctttctagtttggaaattatactttcaatatctattcttttagtagttggttgtttttctcttagcacattgaagatattattctcctgtcttctgctgttgagaagtcagctgtcagtgtaattgtttttccttggaaaataatctgtcttttctctttggcagctcttaagatttttctgtgttttggtgttccgtagtttcactgtgatatatctggatgcagattttttcctccatcttgcttgatagtcttcaggctttatgaatctgaagagtcatgtcttttattatttctggaaaattctcaacattgtttctgcaaatattgcttctttcccattctttctctttctttttgactccaattagatatgtgttggactttcttattctgttttccattgctgttaacctctttcatattttctgcctctatgttttgggctgccccttgaactaactctctattcagctttgtctaatttgattgtctttgagtttctaatttcaattattataattatctttttatttctagaactctatttgatttcttttcaaaattttctgattatttattttagtctcatgttccctagtcatacttttgaataccctcttttatttctgtaaatataataagcatacttgttttatattctgattcagagagttccaacatctgtctctttgtgggcttgattctgcagggtgtttttttctttgtttcctgctcatggaaacttgttttcttgtgtgttttgtgacttatttttactttaagctcatggtccttggaacatttttaggggaaattcttgaaatctgggtttaaagagtggttgatgtacacatgtcacacatgaaaattaaccgaagaactacacatttcccctttgcacaaaatcattggccaataaattcaataattttataaaccttgttattttaaaacaaatttaggtgttttttttccctagtgccatgtgtttattccctcccatgtgagtggttcgcatacagagcacacacaggagtgggcaccatggaagagggcagcattcctggcttctgatgggaggatcttggcctcatggtgtaagaagggagaggatggtttatctcctgccttcactggggcctaggggacccaggagcaaattccaccctttccatctytcagccaaggagaagccaccttggtgacgtttagttccaaccattatagtaagcggagaagggattggcctggtctcaaccattacagggtgaagatataaacagtaaaggaaggtacagtttggatgaggccacaaaagagggcagatgacaccatcagaagcatgtgcaggggaggggcagttactgggcttctgggctgcttagtccattcaccttatctgtgatgacctttgcctgctcgaaaacaaccttctcagtgatgccagcttcccttgcatctagcttcttcccaatgcaggtgattactccaagtccctctgccagagcacgggccactttctgctcaatcagttcatctgactccccaaagacatgccttctctccgagtgccccaggactacccacgtagctccgcagtctttgattatgccagggctgatctccccagtaaaggccccattagtcactttgtagcagttctgcgcaggcacagcaatcttgggatctagcttctgctgggtgaagtcgatataggcagttgggggagagcaaaccacctcagcgtcggctggcaccttggtcacgttcagtgtcaatgagctccccaagactcttcttccacccattcatcttccaggtcctccaagaagaacttcctggagggtgccatggcactggagctgaggcactgaaggtcagtgtcagcaaatttattttattttatttatttwaaaaaaacccaattatttcttttttctgtttagttctgtggctgcttgttggtgtgggattgttgggattaggactacggcataaagcctatgagagaaaactgggcaaagtggtaagtaattaaaaaccttgaaatagaattttatatggtatatatatgtgcatatatttgtacaatttaccattctgattgaacctggatctgatgacttcagagccctgggccctatctccttaacccttatgtgccagactgataagatagtgggattattttatgaagttgggttcttggaataggataggcccatacactagaggcaaattgttgatgattttgttttatggagttatttctgccattcatgatttaacatatctgaactatgtgtattagtttgttcttgcactgccataaagaaatacttgagaccgggtaatttataaagaagaattttaattatcscayggttctacaggctgttcagaaagcatggaggtatctgttctacttctggggaggcctcaggaaacttgcaatcatagtgaaaggcaaacagggagctagttatcttatgtggtggagcaggaacaagagagagagggagtaggtgctacacattttttttttttttatttgatggagtctcactctgccgcccggctggagtgcagtggtgcgatcttggctcactgcaacctctgcctactgggttcaagcaattcccctgcctcagcctcctgagtagctgggactataggcggtgtgccaccatgcccggctaatttttttttttgtattttagtagagacgggtttcaccatgttggccaggatggtcttgatttcctgaccttgtgatccgcctgcctcccaaagtgctgggattacaggcataagccaccatgcctggcaggtgctactcactttaaaacaaccagatctcatgagaactcactctttcactattacaacaacaccaaagggggtgttttatcatttatttatttatttatttattagagaacagtaccgagggtgtggtgctaaaccattcatgagaattccacccccatgatctggtcacccccaggccccaactccaacactagaggttaaaattcaacatgagatttggtagggacacagattcaaaccatgtcactatgaaataagcaactgttttatattggattttctgtacttcttggtagatattgctgaatacagcaatgtgagattctttaggaaaactcttacagataattcttgattttgcacattatgggtagcttatgccttgacaggtagtaaaacttttcttgtctctttctttcctctcttgctatctgcagttttaaatgttttaatatccttttctcttttagaacagtgggcagaaataagaataagtaattgaatgttgtgctttctatctgatctgataaaaaatctagtgtgtttcataatgcagtcagagttacagttttggttaaaatagaaattgttgagggttgactttgaattttagcaatctgtactagcgggaacatttttcattttgaataaaaagctacactgagaacacagaccatgcttctcttcttggtctttgtacttccagtaacttacagagtgcttgccaggtattcagaactaagtaactatttcttaataagtagataatagtagaccatcattacatgctcctttaactgtcggtcattattattgcaacataatgtccatcagaaaaggatacctaatgtcatccaggaattctttttggaaggagttatttgaattggatttaatacctgttcttttggtcatttgctcattcattcatttggctaatgattaccraatgtttctttattacctggtgccagtgatacagatataaacaagttggacaagaacctgccctgccagagtttgcattctagtaggggagaattatagtatttagagaacaaataaagaaatggtctccttttagatcaagctgccatgaaggaaacaggattgtagaatggagggtaactgggtatgggggattagagaaaactgtctgaggaggtgacatttgagatgaaatttgcaagttgagaaaaaagttgtgaggcctgggatgttggcagaaggaacacatataaaggactgagggagaacgacacctggtgtgtttgagggacatcagggtgactggcatggctgaagctcggtgaagagtagtagaagatgacgtggagaggctggggagggccataccagggccttgtagaacacagtgagaagtgctgcttttattttttatttattttcattttattattagtattatttttaatgtcaatagttttttttttaatgttttagatggaatctcacactctgtaacccaggctggggtgcagtggcatgatctcgtttccctgcaacctctgccttctgggttgaagcgattctcttgcctcagcctccagagcagctgggattacaggcgcacaccaccatgcccagctaatttttgtatttttagcagagacaggatttcaccatgatgggcaggctggtctcaaactcctgacctcaagttatctgcctgccttgacctcccaaagtgctgggattacagacgtgagccaccgcacctagccattgtcaattgtttttgggcaggtggtttttggttatgtggataagttctttagaggtgatttctgagattttagtgcacccgtcacccaagcagtgtacactgcacccaatatgtagtcttattttgtgatcacgtttttttcaataggtttttggggaatgggtgctgtttggttacgtgaatatgttatttagtggtgatttctgagattttggtgcagtcatcacctgagcagtttaactgtacccaatttgtagtcttttattcctcactccctcccaccctttaataagcaactgagtctcctgagtctccaaagttcattgtatcattcttacacctttgcatcctcatagcttagctcccacttacgtgcaagaatatataatatttggttttccattcccgagtcacttcacttagaataatggtctccaattccatccaggttgttgcaaatgccattattttattcattttttatggctgaatagtattccattacacacacacacacacacacacacacacacacacacacacacacacatatatatatatatataaatcatattttctttatccacttgttgattgatgggcatttgggctggtactatatttttgaaatgtcaaattgtgctgctgtaaacatgtatgtgtgagtatctttttcatataatgacttctcttcctctgggtagatacccaggagtgtgattgctggatcaaattgtagatctatttttagttctttaaggaatctccacactgttttccacagtggttgtactagtttaccttcccacagacagtgtaaaagtgttccttttcactacatccatgccaacatttattagtttttgattttttgattatggccattcttgcaggagtaaggtagtatcacattgtggttttgatcaggcatttccctgatcattagtgatgttgagcatttttccatatgttttttggccatttgtgtatcttcttttgagaattgtctattcatgtccttagctcactttttgatgggattttttttttcttgctgatttgtttgaattccttgtagcttctggatattagtcctttgtcagatgtatagatagcaaagatttccccctactttgtgagttgtctgtttagtctgctgattatttcttttgctgtgcagaagtttttagtttaattaagctccatctatttatctttggttttgttgcatttgtttttgggttcttggtcatgaaggctttgcctaagccaattttaaaagagtttttccaatgtcgtattctagaatttttatggtttcaggtgttagatctaagtctttgatccatcttgagttgatttttgtataaggtgagagatgaggatccagttttattcttctacatgtggcttgtcaattatcttagcactatttgttgaatagaatgtccttttccactttatgtttttgtttgctatgtcaaagatcagttgactgtaatcatttggcttatttctgggttctctactctgttccattggtctatatgcctttttttataccagtaccatgctgtttttgtgactagggctttatagtgtattttgaagttggataatgtaatgcctttgatttattatttttacttagtcttgctttggctatgcagactctttttttgttccatatgaattttaggatttttttccagttctgtgaagaatgatggtggtattttaatgggaattgcattgaatttgtagattgcttttggcagtagggttattttcacaatattgattctacccatccatgagcatggatatgtttgcatttgtttgtgtcatctaagatttctttcagcagtgttttgtaattttccttgtagaggtctttcacctccttggttaagtatattcctaaatattttattttatttattttttcagctattgtaaaaggggttgaattcttgatttgattatcactgatcacagttggtgtatagcagggctattaatttgtgtacactaattttgtatcttgaaactttgctgaattcatttaccagttctaggagctttttggtggagtctttggggttttccaggtataccattatgtcatctgcaaacagcgacaatttgacttcctctttatcagtttgataccctttatttttttctcttgttcaatgtgctggctagaactttcagtactatgttgaatataatggtgaaagtgggcatccttgtcttgttccaggtctcaggggaatgccttcaacttttccctattcagtataatgttggccgtgggtttataataaatggcttttattaccttaaggtgtgacctttctatgccgattttgctgagggttttaatcataaagcgacgctggatattgtcaactgctttttctgtgtctattgagatgatcatgtgatttttgttttaaattctgtttatgtggtgtatcacatttattgacttactgatgttaaaccatccctgcatccctgatatgaaacccacttgatcatggtggattatctttttgatatgctggtggattcagtttgctagtattatgttgaggatttttgcatctatattcatcagagatattggtctgtagttttcttttttgttacatcctttgctagttttggtattagggtgatactggcttcatagaatgatttagaaaggatcccctctttctctatcttttggaatagtgtcagtaggattggtaccaattcttctttgaatgtctgatagaattcagctgtgaatctgtctgttcctggacttttttttgttagcaattttaaattgccatttcaatctggctgcttttcattggtttgttcagagtttctattttttcctggtttaatctaggagggctatatatttccagaaatttatccatctcctctaggttttctagtttatgtatataaagatgttcatggtagcattgaatgatcttttgcatttctgtggtatccgttgtagtattgtctgttttgtttctaattgaacttattctttacttgggttatctcactaatagtctatcaattttatatgtcttttcaaagagacagctttttgtttcatttatcttttgtatttttgtttgtttgtttcaatatcatttaattctgctctgatttttattatttcttttcttgtgctgggtttgggtttggtttgttcttgtttctctagttccttgagttgtgaccttaggttctctatttgtgctgtttcaaactttttgatacaggcatttaatgctgtgaactttcttcttagtactgcctttgttgtatcccagaggttttgataggttgtgtcactattatcattcagttcaaagaatttttaaatttccatctgatttcattgtggacacaatgatcattcaagagcaggttatttaatttctatatatttgcatggttttgaaggttccttttgaagttgatttccaatttttatttttattttttgagatggagtttctctcttgtcacccaggctggagtgcaatggcacaatctcggctcactgcaacctctacctcccaggttcaagtgattctcctgcctcaccctcccaagtagctgggattacaggcatgcaccaccacatccagctaaattttgtatttttagtagagatggggtttcgccccatgttggtccggctggtcttgaactcctgacctcaggtgatccacctgccttggcctccaaaaatgctgggattacaggcatgagccactgcacccggttgatttctaattttattccattgtggtccgagagatagtacttgctataatttcattttcttaaatttgttgacacttgttttatggcctatcatatggtctatcttggagaatggtgcatgtgctgatgaatagaatgtatattctgcagttgttgggtagaatgttctgtaaatatctgttaagtccatttgttctagggtattgtttaagtgtttctttgttgactttctatcttgatgacctctctagtgctgtcagtgcagtactggagtccccactgttactgtgctgctatctatctcatttcttaggtctaatagtaattgttttataaatttgggggttccagtgttaggtgcatatatatttagggttgtgatattttcctgttggactagtccttttatcgttatgtaatgtccttctttgtcttttttaactgctgttgttttaaagtttgttttgtctgatataaaaatagcaactcctgctcacttttggtgtccatttgcatggaatatcttttccacccctttaccttaagtttaggtgagtccttaggtgtcagatgagtcttttgaagacagcaggaacttggttggtaaattcttaccagttctgcattctatatcttttaaatggagcatttaggacatttacatttaatgttagtattgagacgtgaggtactattctattcattgtgcaatttgttgcctgaataccttgggttttctttcattttgttgttgtttttttaaggttctgtgagatttatgctttatggagattctattttggtgtatttcaagtatttgtttcaagatttagagctccttttagcagttcttgtagtgctggcttggtagtggcaaattctcttagcatttgtttgtctgtwaawgactgtatctttccttcatttatgaaagcttagtcttgctggctacaaaattcttggctgataattttttggtttaaggaggctaaagataggaccctaatctattctagcttgtagggtttttgctgagawatctgctgttaatctgataggtttttctttataggttacctgatatttttgcctcatacctcttaagattctttttttttgtcttgattttagataacctgatgactatgtgcctaggtagtgatctttttgcaatgtatttcccaagtgttttttgagcttcttgtatttggttgtctagatctctagcaaggctagggaagttctcctcaattattccctcaaatctgtttccaaacttttagatttttcttcttccttgggaatactaattattcataggtttggtcatttaacataatcctgaacttcttggaggctttgtttatcttttaaattttttttcctttgtctttgtcagattgggttaattcaaaagccttgtcttcaacctttgaagttttttcttctatttgttcaattctattgctgagattttccagtgcattttgcccttctctaagcgtgtccatttctagaagttgtgattgttttttatttatcctacctatttcactggagatttttccattcatatcctgtatcatttttttttttatttctttaagtctgactttacctttttctggtgcctccttgattggcttaatagtcaaccttctgaattctttttctggcaattcagtgatttcatcttggtttggatccattgctggtgagctagtgtgatcttttgggggtgttaaagatccttgttttgccatattaatagaattgtgtttctggttccttctcatttgtgtagactatgtcagagggaagatctgggactcaagtgctgctcttcagattcttttctcccatagggtgctcccctgatgtggtgctctccccttttccccagggatgggactttctgagagctgaactgcagtgattatttctyttctggatctagctacccagcagagctactgggctctgggctggtacttgggagtatctgcaaaaaatcctatgatgtgatccatcttcaaatctcttggccatggataccagcacttgctccagtcgaggtagcagaggagtgaagcatactctgagagggtcattggttgtatttttgttaagtgtgctggttttgttggcctccagccagggtgtggcactttcaagagcacatcagctgtggtagtataggcaggatcaggtggtgggtggggccatggaactcccccaaaattatgtcctttttcttcagctaccagggccagtagagaaagaccatcaggtaggggcagggttaggtgtgtytgagctcagactctcgttgggctgggccggctgtagctgctgtgggagatgggtgtgtggatcctaggccaatggagttatgtttccaggagaattattgctgcctctgctgtctcacacaggtttccagggaagtgggagaaagccggcagccacaggcctcacccagctctcatgcaacccacagcatgaaaggctggtctcactccaaccgtgcccccacaacagcactgagtttatgcccaggcagccggtgagcagggctaggaacttgccccaggctacaagcctcccagctgagaaagcaagccaactcatagttccttggctgtcccatggaccctgcagcaacaatacacttccttcaaagggtctgtggattcccttggctttcttggcatgttcctgtggtagttcttggagcaaaagttcatggtgtgggtctccgtgtgctgctctctctgttgaagtgggagctgcaagttagttttgcctcctatttgtcattttcctgccatccccaatatgtagtcttttatcctttaccccctcccacccatccctccaagtccccaaagttcattgtataactcatgcctttgcatcctcatagcttagctcccacttacaagtaagaacatacgatatttggttttccattcctgagttacttcacttagaataacggcattcagacccatccaagttgctgcaaaagacattattttgttccttttcatggctgagtagtatcccatggtgtacatatatactacattttctttatccagtcattggtcgatgggcacttaagttggttccatatctttgcaattgtgaattgtgctgctgtaaacatgtgtgtccaagtgtcttcttaacataatgccttctttccttttgggtagatccccagtagtgggattgctggatcaaatggtagttctccttttagttctttaaggaatctctaaactgttttccattgtgattgtaccaatttacattctcatgctgattttattttacttgcaatggaagccactctagtgcctcaagcaggagagtgaagaaaaatgatatatgtcaatttggctgctctgtgaaaaatggattataaggggatgagaacggatgcaaggagataagttctgaggcttcttcagctgtctcatagagagatgatggtgatctttgctggtgtaatggaagtagagttggagataaatggatagacttagaatatattttgaaagtagaaccgataggattggctgagagggtagatgttgttgggtgaggagaaggaaggaatcaaggagacttctatgtttttggtttgagcaactggatgaagggaggtggcatttcctgagaagaatgaaggaataacatattttggagtgatgacatctagaattaattacagatgaatagttgtaagaaaaaggatagcatgataaatataatatgtctcttgaaatctctgttgatggttctcctttctttaccaggcagtcattagatttttttctgtttttaccgttttaaaaattatttaaatttttttgtcagtacatagtaggtgtatatatttttagggtgcatgggatgttttgataaaggcatgcaatgtgaaataagcatattttggagaatgggatatccatcccctcaagcatttatcccttgggttacaaacaattcaattacattctttattttaaaatatacgattaagttattattgactatagtcaccttattgtactatcaaatagtaggtcttattcttctgattttttttgacccattaaccattgccacctccctccctgagttccccactaccctagtaggtaatcatttgagatggatacttagggttgggcagygcattatctgactcactcacgacctaagagaggaccttgtaaagggggctgtgctcctgggccttgacctttccagtacagcaagggtgttacatcattcataactaggttaaaataggctgaccacttcttcaatatgttgaaggcccctctgtatccctctgtgtgatttatttcccatgcaagagtaaacactatcctgagtattgtgactttttttagcactttcatgaattcctttttattgttactatatatgacagatccctagacaatatttttttctatatgacatctgatgtatctattttgcaacatactttttttttaaatttaaaatcatctttctgagattcctccttgtggacctatgtagccctaattcatttattagggctgtgtagtgttccattccacatagcaccatttgtttattcattttcctgttgatggacagccaggctgtttctaactttttactgttataagcagtgcttattacaaaactcacttttcaaacatccctcctaacttccaaacttaagctagaagttcacagaagactaatttgagaatgccatatagcaaatatctccttattttcatggattaaatgtgggaaaatgtctaaggaaattcctttgctgaaataagaaatttggtagagaggagtggagaaaagtgggtcactgaaactgccattgttcacagtcatcctaaactaccattaaaacaattcctcaggcaccaaccaaagaggtctctgctgccatctggcctttcaggtttggatatgacaatgaagggtggtctagtctagaaagatcagctcacctgctcaatgaaacaggtaagtcttcctggaattagttccaggttttgagaaactattattgttacttttattttcagcagggtcataagccataacttaatgcaggtattagattaaatttatgaccagcagatgatcataaactcacctcaaaaatgctttactttggcacgcagctgcagggggactgagcttctgtaaccactcctgtctttgtttgagagcaattaattcagttgattctgagcaactcctcatactgagtatctttaggggattcatgttgtgtttttgttcttagggatgcctctgctagtagcttctgtcacctggggacccactgttggggaccagaagacttggatcaaaaggcagaatgggttgtagggaaaagaaagagagatcagactgttactgtgtctatgtagaaaaggaagacataagaaattccattttgatctgtactaagaaaattgttttgccttgagatgctgttaatctgtaactttagccctaatcctgtgctcacagaaacatgtgctgtatggaatcaaggtttaagggatctagggctgtgcaggatgtgccttgttaacaatatgtttacaggcattatgcttggtaaaagtcatcgccattctccattctcgattaaccaggggcacaatgcactgcggaaagccacaggggcctctgcccaagaaagcttgggtattgtccaaggtttccccccactgagactgcctgagatatggcctcatgagaagggaaagacctgactgtcccccagcccggcacccgtaaagggtctgtgctgaggaggattagtaaaagaggaaggcctcttgcagttgagataagaggaaggcctccatctcctgcatgtccctgggaatggaatgtcttggtgtaaaatccaattatacatttgttctattctgagataggagaaaaccgccctgtggctggaggtgagatatgctggcagcaatgctgctcagttactctttgctacactgagatgtttgggtggagagaagcataaatctggcctacttacacatccgggcacagtaacttcccttgaacttatttgtaacacagattcctttgctcacattttcctgccgaccttctccccactatcaccttgttctcctgctgcattccccttgctgagatagtgaaaatagtaatcaataaatacagagggaactcagtgactggggccagtgcaggtcctctgtatgctgagcaccggtcccctgggcccactgttctttctctatactttgtctctgtgtctcattttttttctcagtctctcatcccacctgacaagaaatacccacaggtgtggaggggctggcccccttcatgggtcagagggaggttgatttgtgaagcaaattgctttcaacaggcctagggccgatttgatttgtttcagtgctccggggtgctcatttttgtgtgaagcatctttgaaatctgagagtgtttttggtttgtagaccaactacgggtgtatggagcaggayaagtaaaggactaacctgttctggttattcttaatgataagcgtgcctcctgagacatatgagtgtctatatggatgtaataccactaagacatttttttgccccttagcccttttttagtctgattacaggcttccaaggcacacctggtcaagatctaataaagccaatcaacttagttctgggtcagtactatggagctgtttgtgctggaataaaatgctatggtgcaccattctcttgtttctgaacataaattggatatttgagaaatgcattaagattatttgaaattttgggaatgatgttgagcacatttgaaaatttttatccttcttggtagttcctggaggtgtttcatgttttaattgcattctaaacgtggggaaattcctttagagctcagatttgagccacttctctctagtgactcactaataattactttgtttttgggtttatcagtaaagaaaaaaaggttaagggtcaagagtaaagtgttgctaattgttttttgccttgctgtgattcatcactgtatgctacttttttttttctgaacaggtgcagatttcataacaattttggagagtgatgcttctaagccctatatggggaacaatgacttaaccatgtggctaggggaaaagttgggtttctatacagactttggtccaagcacaaggtatcacacttgggggtgagtataccttgggagttaatcccgaagatagtcatgaaaggctaggctgcataggcttggagtggcaagttgatattgtaatatctttggtgaatgtgccccagtgatgcttcttgggggatgaggaggtgctggagatatgcacattctgtaatttttcaaatggtttttctgtggctggatatttccagttcttcagcattataaaccaatcaatctaggagctgaggttgcagcaccaagcatgtctggcctggatgctgtcctcatggagcttaccttccagtgtaagacagaaaatcaacatgtacacaaaaaaataaataaggtacttcacaatcatgataagcgctgtgtagaaaagaaaccactgagggagaataagtgggtgggcagtggccatggaaatgctactataggtagggtggtcaggaaggtctctgcaaagatatcatggtgagcaggacccaggaccagccttgggaagagctgagggaacagtcagggtgaagactgaggcaggatccatcttggtgtgcctggagcatggggggccaaagagcaactggtaagaaaggaagtcaaggatgggaacctgatcatagagagctccattttatccagttgtgattggaagccactggaggattttaaacaggatagtgatctggaagaacagattctcaggggcaagagtgggagccaggaggcagagatgataggtggaatagcacagatgagagatgacaatgggaacagtggagatggtgagaagaggacaaactcaggaactattttagaatagaaccaacagaacttacaatagtttagatgtcaggggaggggaaggaagaatcaagggtgatgtctaggtttttgacctgagtacccgctaagagatgataccctttaatggaatgggaaccatcaggagacctttaggtttgtgctaagtgtgagataccccaagacagtcaagtcatgcccagtaggcagttgggtatggcctggagggctgagaaggacagaccaggctggagatgtaccttcagctatcatcgtatagagatagacctgtctcagagactccatgaaggtgacagagaatgcgtctagctatggaagagaagcctgccaaggactgagctctgtggcttagagtgaggtggaatgccttttcatatgcctataggacagtttttcatttctaattttgtaagttgttactccatgttctagctggcaagattgtaccttcccatatgtgttgattaatattagaattgtttatgcaaatgtgttgccagagtaactgcaaatacaatgggttttttgtattactaatgctgcccttttcatgtgtccatagcacttattaaaacagagttgatggtgtttccttagtgacacagtgagacatgctatcagatgaaatgatctgacaaatggactgccatataagtctctgccgcattgctttgaatgtcccttggtgggatgtgtgcagtgggacacatccctttttaatgcatttgcttagtcccagtgcatggtagaatgggactgacaatgatgcccatgtctcttttcattccaatacaggattatggctttgtcaagatacccaattgtgaaatctsagcatcaccttcttccgtcaccagagggcgagatcgcaccagccatcacattgaccgttaacatttcgggcaagctggtggattttgtcgtgacacactttgggaaccacsagtgggtttctttggcccacctaatattacacaaatgccaagaaatgttattaacaatgtactttgatttctatgaaatcacctttctcattttcttcttttttacctcccaaagtatttctccctgcgttgctggttttaaaaatcagacagaagcatttaagatgcaggcagccgttagtgctggtgtagggacaggccgtgttagtctgcatttactgagctgtacagtcaattccctgtgcaggggctgtccaaagtgcattactgtgtttgctcttcactctgtgtagggtaagcactcttagagccccgttttgcaggtaaagaaactaggcttagagaggtcagacaacccatccaaccaggagcaagcacacagccagggcataggcagtcccaaacccagggttacaagtgcttgcaaccacacaataaaccagacaacagaaaaagaaatttccttttcctgcaggattactgctacaaatggaagtactgttgggatttgaggttgttaaatgacatctcttctctccctcatgttttcacaaacaacagataggcagaggaatctggaagagggagatcaaaatatcactttgaatactgataagcctatttggacaacctggcttaagtgcccatatggacttgtgaatacatgcctaaatatacacgaaactgactccccctaaatggtgggcctaccctgcttgccctggcaagctctctccttgatggaaagaagaggacggaaaacagcctgtctgcaaactggcagcttccaaggagaatagaaaagaaggatttgagacaagcacgtgaagttaatttcaagattattgaattagaaaagtcctcccaaaaagtaaagaatggggagagaggccagtgatggttttctaaagaagtccctctacacgcaacatgaagagtggggaatgagttttatccccaaagaataacatttacaaccagtgacagtactgaataaatcatgaataatcccagcaatatattgtaaaagcaaacataaaagtatgtaacttatacttgaccatactaaaccacaataatttaaacatgaatataaagagctatgtgctatgacattcacatgcaagctttgcctgcattaatgacatgaggccacagaactttaaagagacatactttaggaaaacaacgttgttgtactataagttttatttaaacaaattggtgtgtgtgccactcttatttccctggttacctcactgtttctaacactattatgtgaatccgtgaaagcatatttgaatattttcttaaaaaactcagatcataaataatataaataaaccatccaaatataattaatatgaaccatttatgaaccagactcttgcttacctccttagaaataagaagagtgtttggaggatggatgatatagatggttcatatctcttaaaaaagctgtttgaagaaatgctttctttttttcccagtgattttcatgtagcaagtacaggcattcagaaatcattcccatgaccttatgttgtacttaacaytgggtttatctttaaaaaaaataatactttcatgtttaaaggttgcaagttctcaacctaagaaacagtttaactccttcccttttttcctttgcctttttccccgtctcctttaactctctccaatatatcccaaaatgtaaagaataggtttgaaaaggaagagaaagctaaaagagagccctaggaatatgcttggaaaagaggagggaaggattgccttttctcactttctgttaaccacctacttaaagctctctggataacaccatatcctttacttgctgtcttgctcatttgattcaataataatgacaacaatagcagtaacaataatagtgaacacttattgatgatacataactccaggaatgaaggcagtgtaatttaatgattaagagcatgggattccagaacctggaatcagacaatctggtttgaaatctaattcattaactagctgtgtatcctttgctgagtttcttaactaccttgagctttagttttctcatctgtaaatcagtgcaatagtcctacctatttcatggggttcttgtgcccatattacctcatgcaaagtacatgaatgtagtaagtgctcaattaacactggccattactaaaccaaatcakacaactatgaatataaggtatattgggcagcttaaaaaataatccatttgtcaaacatgaatcaagcatctgacatgtcccaagcacacagctagactcattccttgctttaggaaccactgctctgagccactccccagaagtactgtctgggacactgtagcctcccaacaagcgacataggaaarttaacaccttgaataatttgtgacgtgatcacgacatgttttatttgtctttgttttctacagtactagatacacaaattcttactgtgaataaatatttagagatttygttttccagtgattatggcatataaatgtgaaaatcctattaggaatgaataatttctaatgcttgtgcatgttattagctgattcaacaagattttaaaaagtactgactgcacaaatatgtcttttacaaccactaaataggaaatagcagcattttttagaagtcactcaggcaaacaccataatgaaaattgatattattttaggtaattaactgagccactaatcaccatttaaagaaatctataacatgcatcatatacaaagaggagagaacacagaatccatagtctgacactatgtgacacagaacctatgttctagatttggttccgtggcggttaaccttggtaagttccagttctygtgtctctggaaatgggataaaattctcttttccagcttactttatagggttattggaccaacaaaatattaacagataagaaaacataaagcatatgtgagctctctctctttctgtcttgacctctttccttatacatatactttttacttttattactctcactaggtaagatttatctcctgagaaaatgtaaaaccaaattcacagattacttccagttagaatatattggattggaatccaatatattctactaaaatatattggattgaaaacactgcctgtggttagtagctttggaattttctggatctggatttgaatccttgttgtaggtatcagaaggaayagaattccctgcagacctaatgaaagaactacttaacaagatgctggagggacccatggaacaaataagagaggctgaggcactcagacactagttaacagtggggaatcattacctgccttaaggccgaaggaacaggcagagaaaacagtgttcccagagcccagtgagacccagaaccaggacaagggaccacctggcatakaatgcagctactgccagagggactggggaaggaatccctgaatgttgctcttctcccaacgtttaatctcccattgatgcctccgattggccaaacctaactggaaaccagcagagaaggaagtccaggagatgaaatctgcaggggtcagcctctcagggcatagagaaaggacagaggatgaatgtgggctggggaaatgaaaaataaccataggcatattagcctcatttaaaaatagagctaccacctgccttctgttgtgagaattcagtagcaaaggggtttaacaaatggccgtccttttcactcttttatttcttgagacatcttttaatagccctcagctatttttatccaattcagtcctgtcttgagatcctaactcaacaaggtttctccagtcttctcagtgcttggtgatcttctatttttctttgtcattttcccccttaacactcatgtattagctacctttctatgtaaatacctgtgtttgactactgcctatctgttctgggcaccattccttgctcttactctcagctatgcattgcagagaactgcatttcccacagtcccttgccttctggcttctgggtaggtttagccaatgggaggcactagtgcaaggttggagggagtagagaagcgagtgtatttctctccttctctctctgcttcctctggtgtctctgggaggagctgagtctcttctgcggctccagctcttctttgtatggtcccagctcctctgggaagcctcctccattgctacatctcccactagtcggtgctggcttctggactctgataatatcacctcctcttgttttccctgtagctgtagaggtggtactggtttcttattgttattaatctctgattgcctcattgactcctatctggcttcccatcgcctagctaaccaattccctatattaagttcactttgtttgaaacatctagggtgtttctgttttcctggctggatcatgtaaaatatgatgtcctattttcccctaaactccccagaagcttgatgtacccacctaagtatctcagttataggtttacagtgcttagcataataaaagcaccatgttcagctggtgtttgagcaggagagccaaggaggctttcagaaagtgttcagttgggctgggcgcagtggctcacgcctgtaatcccagcactttgggaaacaaggtgggtggattgcttgaggccaggaattcaagaccagcctgcccaacatgcaaaatgctgtctctactaaaaatacaaaaattaagttgggcatggtagtgtgcacctgtcatgccagttactcaggaggctgaggcaggagaattgcatgaatgcgggaggtggaggttccagtgagccgagattgtgccattgcactccagtccgggtgtcagtgtgagactctgtctcaaaaaaaaaaaaaaagtgttcagttgaaggagcttaggttacataagcctgatgggctctgtgaatgtcaggattcttcatcttaccagtattcctggctctttttacttttttaaactactaattctttagctgtaatactgatggtgagttatcacgttagtgatttcatttcttctgatgaaaagttgaacaatgctgtatttagagtagatctttaaattgacttgactccaaatgacttgtgaagaaaggtcatgttcttagccaaatgtctgtcagcctattcatttgaagtgctgtatctaggtcttgttcatttgtataatgttaagacagttgcccgagtaggaatgactctgggcttcttcactatatgcagatagtctttggcaacttaggtacctaaggctttttaaagtttgttttacaaatacaayaaagggtcatatttttacattttttagagatgacctcgacaggaaactgcaggctattgctgtttcaaaactactgaaaagtagctctaatcaagtgatatttctgggatatatcacttcagcacctggctccagagattatctacagctcactgaacatggcaatgtgaaggtaacataatcttaataggatttctaatttattaagtaaaacatttctttttctttcatgtttttaaaaaaaccaacctcacctaaaaatttcatgtgcagtctatctactgctgcctagaaaatcaccacaaaacatgtgagcttaaaacaacagcaatcatctatttgctcatgaatctccaatgtggacagggctcaatgggggtagctcatctctgttccatgcagggtcaactaggtgtctcaaccaaggactggaggatctacttcataggtgatttataggtcgcaagttgtgctttaggcttgggaccctggttcctcgccatgggctacttaggcttcctccctgcatggtgctggctttcaatagtgaaaatcccaagagaaccagaaaaaatctgttttgctttgtatggcatagccttgtaagtcatatactgttacttccactgtcatcacaaktctgatcacattaaattcttgatgggaggaatatcaaaaacacaagataagaatactaatggaaagtgagattttgttgtagccatgtttagaaaacacaatctgccacattatgaaagttaattatggggctgggtgcggtggctcacgcctgtaataacagcactttgggaggctgaggcgggcggatcacgaggtcaggagatcgagaccatcctggttaacatggtgaaaccccgtctctactaaaaatacaaaaaattagccgggcatggtggcaggtgcctgtagtcccagctactcgggaggctgaggcaggagaatggcaggaatctgagacgtagagcttgcagtgagctgagatcgcaccactacactccagcctgggtgacagagcgagactctgtctcaaaaaaatatataaataaattwaataaataaataaataataaataaataaaaattaaaaaaagaattgagagtraaacaaaatgaaatgccacacagagagaatggctaattagccaacagggccccagcagatgacactgaattactctaccttttcaggtctgaaacacttgaatttgtcagtgtaccagaatataatcatgttctggggaactgccacacaaatcaaattctcaggagactgatatatatatatatatatatatatatatatatatatatatatatatatatactgatatatatatatactgatgtatatatatactgatatatatatactgatgtatatatatactgatatatatatatacacactgatatatatatatactgatatatatatacacttrtatatatatatatatactataatgccaaatgaattaatttagaatgagaaatatgattgttatgtttagttatgccctatgcagatgtcttggtccctttcattccattttcaacttcatgtcttgagataatatctgcagagaaaaaatcttatccgtcttatgttgattttactactttaactcttcttagggtgtaacattatttacagagtttggatgacaggttaaagagcatggcatgatgagaattttctgcatgtgacagaaaataacagagagtgtatttctttttttttctgattttttwaaaattttattattattatactttaagttttagggtacatgtgcacaatgtgcaggtttgttacatatgtatacatgtgccatgttggtatgctgcacccattaactcgtcatttaacattaggtatatctcctaatgctatccctcccccgtccccacaccccacaacagtctccagagtgtgatgttccccttcctgtgtccatgtgttctcattgttcagttcccaccaatgagtgagaacatgcggtgtttggttttttctccttgcgatagtttgctgagaatgatggtttccagtttcatccatgtccctacaaaggacatgaattcatcattttttatggctgcatagtattccatggtgtatatgtgccacattttcttaatccagtctatcattgttggacatttgggttggttccaagtctttgctattgtgaatagtgccgcaataaacatacgtgtgcatgtgtcttaatagcagcatgatttataatcctttgggtatatacccagtaatggggtggctgggtcaaatggtatttctagttctagattcctgaggaatcgccacactgacttccacaatggttgaactagtttacagtcccaccaacagtgtaaaagtgttcctatttctccacatcctctccagcacctgtcgtttcctgactttttaatgatagccattctaactggtgtgagatggtatctcattgtggttttgatttgcatttctctgatggccagtgatgagcattttttcatgtgtcttttggctgcataaatgtcttcttttgagaagtgtctgttcatatccttggcccamtttttgatggggttgtttgtttttttcttgtaaatttgtttgagttcattgtagattctggatattagccctttgtcagatgagtaggttttgaaaattttctcccattctgtaggttgcctgttcactctgatggtagtttcctttgctgtgcagaagctctttagtttaattagatcccatttgtcaattttggcttttgttgccattgcttttggtgttttagacatgaagtccttgcccatgcctatgtcctgaatggtattgcctaggttttcttctagggtttttatggttttaggtctaacattgaagtctttaatccatcttgaattaatttttgtataagatgtaaggaagggatccagtttcagctttctgcatatggttagccagttttcccagcaccatttattaaacagggaatcctttccccatggcttgtttttgtcaggtttgtcaaagatcagatagttgtagatatgtggcattatttctgagggctctgttctcttccattgatctatatctctgttttggtaccagtaccatgctgttttggttactgtagccttgtagtatagtttgaagtcaggtagcatgatgcttccagctttgttcttttggcttaggattgacttggcaatgcgggctcttttttggttccatatgaactttaaagtagttttttccaattctgtgaagaaagtcattggtagcctgatggggatgacattgaatgtataaattaccttgggcagtgtggccattttcacgatattgattcttcctacccatgagcatggaatgttcttccatttgtttgtatcctcttttatttccttgagcagtggtttgtagttctccttgaagaggtccttcacatcccttgtaagttggattcctaagtattttattctctttgaagcaattgtgaatgggagttcactcatgatttggctctctgtttgtctattattggtgtataagaatgcttgtggtttttgtacattgattttgtatcctgagactttgctgaagttgctcatccgcttaaggagatgtatttctttatgtaaaagtgtgggcaggtgaatcagcactggaatggcactgtgtggtgtttggaatctgtgttctaccttgtggttccatttgacaaggactctgttcccaaaccagcagcctttaagttctagttagcaggatagaggaagggataaagaaggggccaagagcatatgccagttcctctgaaggcaagtcccagaaactgatctgtaacacttctacttatatttcactggcagaaatttagtctaatggccatacyttgctgtacagaaagttgagaggtgcaatgtttagtcctgatggccatattcacagctaaaataccataattttggaagaagggtaaggcagatattaggaagatgagttagtctctgcattttttggatagacagaaattagagtgttaaaacaacagccgtcatctatttgctcatgaatctggacttcagacagggctcaatggggatagttcatgtctgctccatgcaggatcagctaggaggctcaactagggactggaggacctactcagtagatgagtcacaggtggcaaattggtgctttgggctgtggacccgggttcctcaccatgggctacttgggcctcctctctgccttgcagctgatttccaatagtgagtatcccaagagaacaagaraaagcctgtattgccttgtataacttagccttggagccacagatggatccctgatttctgggtctggtcagagggattatgatactgacatttatttttatagagaatacaaaagaaagaaatgttttacaaggaagatgagttcagctttgggctgagtttgaggcatytgtgggacattaatggagatgtccaataggcaggtgcatatacagatctggaatccagaagggcagtgagaactagagttatagattaaggagtggccaccatgtagggaagcgttgaagccatggaagtgagtggtattgctagtaattagagaagtgcaaattagagtgctagagttagagaagtgcagaaggaagaccaaataaagccctgatgaagtcacattgaatgtggctatcatgggggtgtaggtgaaggaagagaagacagattatttcaggaaagggagtaaggagatttcagaagaggaaaacctggaaagtgtgtaatcacagagactgtatcagttatttatcactgtgtaacaaaccacctcaaaacgtagtggcttaaaacagtaataattgaatattctcatgattctttgggttgactgggtggatttctgttcttgcctgggttctcctatgcagtcatctgatggcttacttatggcaggagggtctaagatagccccacacaggcgtctgggccctggtgctggacctctctctcttctcatggtctgtcattatttactagcctagatgatgctgcatttaccagctgtgtgaccttggggaaagttacttagcctttctgggcctcaagttccacatctgcaaagtrgtgagagtgatatctatggaatcatagggttgtttgatgatgaaatagaagataacatctgcaaagccctcagacttacatgacatatattatgtgtgtctggctgtatgttgaaaatcaaataagagaaacgcgtaagtacatggtctatgaagcacaaacgaatattagacaagatgaaatttggcaagtctatgtaaaaatggcatcctaatagggcattcttatatggtgtgtgtgcatgtgcacgtgagtgtgtgtgagggatgtacatggtattaaggaaggagaatttgatttgattttcatctaatcctctcttggtttccactgtcgtgatcaaaagctgtgtcaaaattggtagtggattcttatattgctttctctaggaggaagtttattaatgtggagaagagttttaatcatcaatgcttggatgaacagatttttctcttaaagaaatgagtatttaaattctgcagtcttaaaactttatagcatctttatttttaaaatttttttgcaagtcttacagcatctttaaaaaatctgataaacaaaatgatagttaaatagatttatttatcatttatttatctatttaattattcccaatactaaagttttctattttcccaagacaaaccggaacagtgcttctttatttccttcatcaacattttaaatttaatttaaaacatttattataatttttatgtatacaaaaggtatatgtatgtgtgtattataaacaacaataaagattaatagacatccatgtgtctaccactaagcttaagaaaaaaatgaagaattatataataaattgtgatgtattcttttagtgatctaaaaatgtgtttttaattaaatgttaatagtaaaattcagaagtggtgaaaagtcaggtatattttttatttataagatatttaaacagaataaaatggagatttctttcttcagaataaacacctcatatttatagttttcccaacacatgatagaaaagaatatgtttctgttctctttctttgatgaataataaccctggtcccaagccctcaacatcaaaaagactcatgattgctccccagatgttcttatttccatgattcaatttaagaaacacagatggaacacctgctcaatgccaggttttatgctaagtgacaggttggacaaaagtgattaagattccctctgtgcaggtgtgggaggatggagacatagaaacagatacctggcacgatggcataactagtgtgtgtaaagtactgtacaggatgaccaatgaaggtgcagtcagtgctgctggggatgagagacttggaaagctgccaggagtcaggggctattttgtaatcgttgatttatctgagtcactctccagacctccttcctctttgttttcttagcatgtggtacagaagctagataggcgcacagtaggtgctcaataaatatatgtagaatgagcaaataatttggaccaaaaaagatcagtaggagccaggaagagaaaacagcatgtacaaagagatatttatcatgtagctcacacattttttggcaatgtggaatagagctttgctttttatgctttaaacattctcctctctgctctttattaggatatcgacagcactgatcatgacagatggtgtgaatacattatgtatcgagggctgatcaggtgagcacaggggtttgattttgtttttaatytattattaatgtgatcttttgggtctgtctgagaaggaaaaagaactttatggaagcaattaatttttgttgctttttataaaaagcaatcaatgtttataaacattgatttgactatacagtttaacatctttttcaaggcatagtctcataatttacaaaagtagaaatagctaagcaaattaagtttaattatataagagggtactgtgtaggctattaggcatggtgaatatgtagctgtcaacacatgggaggaatggcaccatttttgaatgtatgggttagtggaaacatcacaggccattggatgagaaagtcctgggcttgagttccagccttgccagcttctaatcaataatcctgggtaagttaactaatttgatggggccattactatactgtagtgagctctataggtaaattgtatttaaaaaatatcattccacataaaaatattacccgagtatatcayatacatgcgtatgtgtgtgtatgatatacttggataatacatatttggatacatagagtcatgtgctgcttaatgatatttttgttcaataacagaccacatctacaatggtagttgataagattataatatcatacttttattgtaccttttctatgtttagatacacaaatacttaccatggtgttacagttgtctacaatattcagtacagttacatgcagtacaggtttgtagcctaggagcaataggccataccatatagcttaggtgtgtagtaggctataccatccaggcttgtgtaagtatgcactatgatgtccacacaatgacaaaatcgccttatgacacatttctttcttttttttaaatatatttttattttttaaatcgacacataataattgtacacatttattgggggggtacaatgtggtattccaatacttgtatgtatactgatcaaatcattataatttgcatatcaattaccttaaacatttatcatttctttgttgtaagaatattcaaaatcctcttttctatttgaaatatatagtacattgttgtaacctactgtgaatagaatataagaacttattcctcctaactgtaacattgtacccattgactaacatctccccatctctcccttctccctgttctcccccattgctggtaaccactattctactctcaacttcttttttatttgtttatttatttatttattattattatactgtaagttttagggtacatgtgcacaatctacatttcttagaatgcattcttgttgttaagtgacacatgactgtatacatacatatgtgatccaaaataatacagctgagattttaaaattcaaatatgtagctgtataaatcagttttgaaggcagtatttgtatcaataaagcaaggaacagtttaatgccaaaaaagagggactaacchttcattcattcattcattcattcatttatccaataagtgtttactaaatcctctttatgtactgggtgttgttctcgggagtgggaatataataggaaaaaaacaaaatccttgactgtggtagaacttacatcgcagtggaaggaaacataaaataagcagataagaaatgacaagctatgacaggtggagatatgcatgatgaaagaaaaataataaatccaggtgagaaggcagggtgtgtgggggtggctgtggtaggttataaaaagtgggtgaggaatgatggagtgaaatcttggcagcacctcaagtggaaggagggaccccacctgtgcataccctgaggaagagcacttcaggcaggggaggcggggaaagtttgagaggaggatgctggatgttgcggggtaagagcaaggaggccagtgtcgctggagtagagtgagagaagtgatgtgagtatggcaggtggtggtagatgatgtacacagtgagttgattcacaggttcctctacatacaaagttcttccacagagggaacatgctggagaccttccctgaaacactcaagggttctcctgttaggacagaatctgtctggaggtatttgacctgagccctctaactgccatcttggggacaatgtggggagccctggtgtgggctcctaggacwgacttccctgagccttagtcttttctccatatagagcagttcatcaccaaaaggcatcttggcattgcctgcctgaagataggggccgacnttaatggatctctttaagtaaccttatcttctaagatctgtggcctacatttatgagagaaaatggttgctttctgggatgatatagaatcatggattcaactcctctcccagtggggatatggcttgtttggttatgaattatagtccagtgaaagcaaattgttagtttctcttgctctagactccatttgccattcarcaagtatcgatctagcagaatggatgccaggcaatagggataaagctgtaaacaaaacagagaaggatctctatgctgntggagggaggatggacaaaaatcatgataaataattgcaggatgatctattttagaagatgatgagagtggtgggaaaaactaagcaggggaaggagcttccagaatatggaggtggggtgcaattgtaagtagggagctgggtaggtcttactaagaagatgacatttcagccaagattggaaggagggagccatttggccacctggcagaagatacctcctggtagagggctgagctagtgcaaaagccccagtgcaggagtgctgcatatgtttgaggaaaagtgaggttagtggggctggagagggttggggtggagtggggtgaggggcggccgaggagggaaggagagagtgtgtgggcaggcagggaagagaacagatcttgtaaggatctagggatccttagcaagcactttggacattattaagtaaaatagtgaccttactcgttcttggacaactccatggagccatatgcttactgaggtgggccaaggaggcccttgagatgctaagattgttttggtttacaccactaactcagaaactctaaaaggagcatcacatgcccaaatagctgtggaacagatagcttgactataatttggtgtttccaaagtgttacggtaggagagaaggtgctgaagggtgagttttgttaagtattttatatctaagattgaaaacactgtttctgtttaaatatttgttaaagcaattgtttaaatgagatatcggaaattctagaaaacgacttttcatataggctgaaataggtttaatttcaagttttaaaaaatgttgggaaccaaggaacagtggtatttatagtaactggtacccataatagctcattgttgggctctgaaacctttattacctctccttaggagaatgggatggcagagtttatatatatatacacactctgtgtgtgtatatatatatacactctgtgtgtatcactctgtgtgtatatatatatacactctgtatatatatacacacacatacatgtacatataaagtatatatataaaatatgatatcatatatatatttatttatgtatgaatttaatactctgtgacataacaaaataccatagacttggtggtctaaacaacagaaattaattttcttgcagttctgtagattctaagaccaagattaaggtaccagcagggttggtgtctggttaggactgtccccttgggttgccgataactgccttcttgccatgtgcccacatggcctttccttgggttgtgcctgcagagagagagtgagctctctggtgtctcttcttataaagccattaatcctttaggatcaggccccccctgcacttatgacctcatttaaccttaattatttccttagaagatatgtctccaaatatggccacactgggggttagagcttcaacaaatgaattttggggggaacacaaaataggaaggtaattttaaaaattcccacattaatgaagttaggaactagggtttttcagtttctgtccacaaaactaattttgtaagccttcatctcaatcaccaaattcaatgccctacatgtagtaggtattaggtgcttaataaatacttattggacaacaatgggagatcctctgttttaatggaagatttggattgtcagattcttcagtttcaaggcttttggtgtatttttgaaggcagtgtctgttaaatgggtcagaactttgatcttagagatttkggaataaataacctagatttgctaaagacagtgacctagaattacacagaagtgcacagatttaggacttgagcccagacaatgcattaagctgtctgacagctcagagtcacatctgatgttcagtcacagctctacttacctttcccaatgggcagacttgctgcttctgctggtcctgctctgggtttctgtttctattttgcatggagttacaggcataggctttgttttaagtttttctcttctcctgccactcaggtccaagcccccatcatcttttacctaagttattgcagtggcctcataacttgtctccctgctttgaccctttccctgaaggtgattctctacctggtagctgtcacagacctctgcttcaaacccctctgatggattcttatctcactctaaaaaaaaaaacagcaacaacaacaacaacagcaacaacaacaacaaactgaggtcttcatagtggcctgtgaggaaggctttgcatgttccctcttatgcacttcactccggtcatggtggagttggcccgcaaaacaccaagcatatttccacctcaggacctttgcatttgtggttccccttccctaaacaccattcctccagtatctgtatggcttgatccctyccttcgttgaattttttgctatagtgtcactttattgcagaggtatgccctgaccatccaccataatatagcaacctctcctactcatcactgcctgtccttcttacactgcattcaccccagtgcttacttatctatcactacctgacttattgtaaacatacatatgtgtttaatgcatccttccctactagaatgaaagttccatgagggcaaggacttcattttattcacgacttattccccaacacccagaacagtgcctgcatgtagtaggcactccatatatatacatatgtgcttcattgaataaatgaatgactgaagctgacctaagtctttttttctggaagagcacaatgtaataaaataaaatgaattctttgttgttcatggttccccgtgttttccacgagcttctcaaataagaactctttgcataatgtctacaaagtgcattgaatttccccaggaattgaaagctctaagccaaaacgggatatggaattttttcagatatataaaatctttgatttcagacttgaaagtaggctgaaaatatgcatgtggcatttggatttttaaaggtaagaaagaaggtgaacacccctgtcattctgaagagttcctgttattaactcaaaacatgattgtgtgggaggcaatttgtatggctagaatattcattagtataaaaaaagtaaagtaaggttgctaagaatagttacttaattaaatctatgtacatattctttattcatttatatcataaaagcaatattttgccaatatttagattaacaatttaagttaattccagttgtgatatacagagtagagttagaagtgggaaactggtttaataacaaaggggtatcacttggatctcgttagatttctatacaataataaaactgttacaaaccatttctgtttctgctacaggttgggttatgcaagaatctcccatgctgaactgagtgattcagaaattcagatggcaaaatttaggatccctgatgaccccactaattatagagacaaccagaaagtggtcatagaccacagagaagtttctgagaaaattcattttaatcccaggtgagttcctttatgctgtagttccagttatgagctactgcatccctctatggaacctacatattacctcaaaatgagctagaaattatattttgtcctagaggtttattccaggtaagggagactgtgacaaagatgataaaatctggtttgggttgaagttacggtgcttgctttctggaatcaagaaatatgttgtaacctcaggttaaaaaagttcacagcatcatcatcatcattatcatcatgaacatcatcaccatcatcatcactgtcacctccacgatagctagtatttgaatgctcctatgtcccagaccctgttataggtgctttttgtgttgtctcaattaatccttattggttggtcctcttattatccccttttaatagatgaggaagctcaagcttaagaacatgaagtaacttcactggggtcacatggctagtgagtgatggaactaataagtggggagacagcctattagcatcgttgggttgctggtattctcagctctggctgcacattagattcacctggacagcttttaaaaaataccactgcctgggccccaccccagaccaatttatcaggacctcctggggtggtatctgggctgtggaatttaaaaaattatttccaggttattctaatrtgcagttaggattgagactgtggatgatggataattcatttacatcacatgtgaaaaattcattaccatgtgaaatacaatttttttttgagatggagtcttgctctgtcacccaggctggagtgcagtggcatgatctcagctcactgcaacctctgcctcctgggttaaagcaattctcctgtctcagcctcctgagtagctgggactacaggtgcacgccctgatgcctggctaatttttgtatttttagtaaagacagggtttcactatattggtcaggctggtctcgaaagcctgacctcaggtgacccacctgcctctgcctcccaaagggctgggattacaggtgtgagccaccgtgcccggccttgttttgtttttaaaagagaaatctatttgcagcaaaacatatgagttggagtatgtgctcttttctctcccatgactggataatgagaggaaacttctacataaagccaaagacagaacatatcgtatacattattattatttgacatttctaccgcttttaccagctaataaacatttctcatttttttgggggaaaaaagaaatttctccattctctttttcttctttgtccctccttacaacaagaaaaaattgtaccaaagtgtaggtgatgaatatgaggagagttatcaccaagtctagatttgttccaattcctgtattgatcttgccctgtgtaagtgtaatgtgactaggaaaccgcgggccttagggtcatctgtctggttcaaatcctcactcttgccagtgaacagcttggtaactgtgggccagttgcttaacctctctgagcctcaagtgcctcatctaaaaatgggaaaaatagtagtggctacttcctaaggctatgtgaggtatgaatggcacaaaaagtttttagaatagtgcatagtgagtgcttattgtttaacagtagctgcaatagcaacattagtatttgcagtagtaatggtagaagtaaaatagaaggattccctccttttgctgattgagatggtttcttaaatggaagctaaaaaatcagagaagaaaaggattttcttgtgtcgttattcttcacatagcaggagtgcggagaaatccaaataaaatatttttggctaaccacaactgcagattgakccaaaccaactgtgaagggagctagatttgctttcccactcagtttaattacgaaaatagtaaaggcataaatagaaggcatgccttaattttaaaactgtgatgagaatatttaagcaattttcaaatatacaagtaatattaatcacaccttagcaattttcacatatacaatacattattattaactatagtcacaatgctttacaatagatctccagaaatttttcatcctgtctaattgaaactttgtatcatttcaccaacatcttctcaaccctcatctcccccagcccctgccaaccaccattctactctttgcttccatgagttcaattttttcagattctacatataaatgagataatgaagtatttacctttctgtgcctggattacttcacttagcatgatgtcctctaggttcatccatgttgttgcaaatgacaagatttcctcttttcaggctgaatactattccatacatatgtatgtttgtgtatagctgcattttctttatccattcatctgtcaatgggcacttaggttaattatatttcttggctatagtgaaaaatgctgcagtgaatgtaggagtacagatatttcttcaacattaatttctttcctttggatgtataccaagaagtgggattgctggatcatatggtagttctatttttaatttttaaaggaactttggtaatgttttccataatatggctatactaatttacattcccacaacagtgaacaagggttccttttgctgtacatctcctgccagcatttgctgtcttttgcctttttggtactagccattttaacaggtgtgaggtaatgtctcattgcgcttttaatttgtatttctttgattagtgatgagcatttcttcacatactagctggccacttggatgtcttcttttgagaaatatttttcatgtcctttgctcatttaaaaaaatcagtttgctttcttgctattaagttttttgagttccctatatgttttggatattagccgtttatcatatataggttgaacatctcaagtaaaaaaatccaaaatctgaaatgctccaaaattcaaaactttttgagcactgacacagtgctctaaggaaatgcttggggcatttcagattttgtacttttggatttgggatgctcaaacagtaagtataatgcaaatattccaaaaatgaatccaaaatctgaaatacttctggtcccagtgattttggataaagaatactcaacctatatagtttgtaaatatattctctcatcccataggttgtctcttcagtctgttgattgttttctttgctatatagaagcttgttagttcgatagaatcccatttgtctatttttgctattgtttcctgtgctttagggatcatatttaaaaaatcattgcccagaccaatgttgaaggtttttcttgatgttttcttctagtagtttcacagtttcaagcccaaaaatctttaatctattttgagttgatttttgtatatggtatgaggtaagagtccaatttcagtcttctgcatgtggatacccagttcccccaacattgcttattgaaaaggttgtcctttccccattgtgtgtttggggtacctttgtcaaagatcaattgactgtaaatgtgtggatttatttctaggctctctattctgttctattgatctatatatctgtttttatgccagtaccatactgttttaattactacaggtttgtagtgtattttggaatctggtagcgtgatgcctccagctttgttctttttgctcgtgattgcttaggctgcttgaggtgttttgtggtcttatacaaattttagggttgatttttctattcctgtgaaaaatgtcattggaattttgataaggattacattgaatctgcagattgcttttggtagtatgaatattttaacaatattgattattccaattcatgaacaccagatgtgtttccattaatttgtggtcttcaatttctttcatcattattttgtggttttcagtgtacaggtgtttcacctccttggttaaatttattcctaagtattttttgatgctattgtaaatgggattgttttcttgatttctttttcagatagttcattggtagtacatagaaatgctactgatttttgtatgccgcttttgtatcctgcaaatttactgaatttattaattctaacagtttttcagtttttttcagtggagtttttagggatatatatatatatataatcatgtcacctgcaaatagggacaatttaactttttcctttccaatttagatgtattttattccttttacttgcttaattgctctagctaggactttcagtactgtgttgaatagaagtgctgagagtgggcatccttctcttgatcctgatcccagagaaaaagctttcaacttttaatcactgagtatgatgttagctgtgggttgtcatatatggcctttgttatgatgaggtctatttctgctatgcctaatttgttgagagtttttatcatgaaaagatgttgaatttttcagatgctttttctgcatctattgagatgatcatatgatttttgtcttttaccctgttaatacattgtatcatatttattgatttgcatatatttaactatccttgcatcccaaggaaaaatcccccttgatcagggtgtatgatccttttaaggtactgttgaattcagtttgcwggtattttgttaaggattttctacatgtgtgttcattagggatattggcttatcattttcttgtagcatccttgtctggctttggtatcaggctaataatggcctcataaactgaatttgcaggtgttccctcctcttcaattatgaaagagtttgagaaggatgggcattaatttttctttcattttttttttttttgagatagagtctcactcttgtcacccatgctggaatgcaatggcacgatctcagcttactgcaacttccacctcccaggttgaagcaattctcctgcctcagcctcctgagtagctgcgattataggcgcctaccaccacacccagctaatttttgtacttttggtagagatagggtttcgccatgttggccaggctggtctttggtcttgaactcctgacctcaggtgatctgcctgccttggcctcccaaggtgctgggattacaggcatgagccactatggtcaacctaatttttctttttttctttttttttttttattatactctaagttttagggtacatgtgcacattgtgcaggttagttacatatgtatacatgtgccatgctggtgcgctgcacccactaatgtgtcatctagcattaggtatatctcccaatgctatccctcccccctcccccgaccccaccacagtccccagagtgtgatattccccttcctgtgtccatgtgatctcattgttcaattcccacctatgagtgagaatatgcggtgtttggttttttgttcttgcgatagtttactgagaatgatggtttccaatttcatccatgtccctacaaaggatatgaactcatcatttttctttagatgttttgtagaattcgccagtgaggcaattgggtctgggctttttgcttctgaggaggattttgattaccagttcaattttcttatgcattattgaactgttcagattttgaatttcttcatgagtcagtcttggtagattgttactatgaactggtccatttctttcttttaggctatccaattttttggcatattattgctcatagtagtcacttatgattatttgtgtttctgtggtatcagttgtaacatctccacactgatttataattttattaatttgattttctctttttttcttagtaagtctagctaacactttatccattttatcttttcaaaaaaccaactcttagtttcatatttttttttatttttctatcatctatttcattatttttttctctaatatttattrtttacttccttttgttgacttcaggctttgttctttttctactcccacaggtataaagttaggttgtttgatgtctttattttttcttaaggtaggtgtttattgctacaaaattcccttttaaaaccgtgtttgctacatcctgtaagttttggtacattgtgtttccatttttatttgtctcaacataatttaaatctttccttttgatttcttctttgatccattgtctgtttaggaaagttttgtttaatttctacatatttgtgaattttccaattttcctcttattaatttataatttaactattgttgttggaaaggctactcaaaatgatttcagtattcttgaatttgttaaggcttgttttgtggcctaacataagatttgtcctggagaatgttccatgaacatgtgaacccccaaaatctgagacagttctcagtcaatttaggaagtttattttgccaaagttaaggatgcacacctgtgacacagcctcaggaggtcctgacgacatgtgcctaaggtggtcagagtacagcttggttttatatattttagggagacatgagacatcaatcaacatacataagatgaacattggttcagtccgggaaggcaggacaactggaagcaaaggcaggacatctcgaagcagaaaggaggctttcagttcatatgtaagagacaaatggttgcattcttttgagtttctgattagcctctctgaaagaggcagtaaatatgcatttatctcagtgagcagagggatgacttcaaatagaatgggaggcaggtttgccctaagcggttcccagcttgacttttccctctagcttagtgattttggggtcccaagatttattttcctttcatttgcacttgaaaagaatgtatactctgcggctgttgggtgaaatgctctctatgtatgttaggtcgatttggtctatagtgttgttcaagtctactgtttccttgttgattttctatttgaatgatttatccattgttggaagtgggttattggagtcccctactactattgtattgctgtctagttctcccttcagttctgttaatattttcttcatatatttaggtgctctgatggtgggtgcacatatatttataattattatattatattgatgaattgagcactttagtataatgaccttctttgtctcttctgacagtttttgacttaaagtctactttgtctaagtagagccatcccacatctcttttggttatcatttgcatggaatatctttccaaaccttcgctttcagtctatgtatatcctcaaagctaaagtgagttttttttataggcagcaatttcttataacttatttttttcactctgtcttttgattagagaatttaatccatttacatttaaagtaattactgatagttaaggacttagtattgccatttaaagaattgttttctgactgttttacagttccttcattctattcttcctcttttcccttatgatttgatgagttttttggtaacagtatgctttgattgctttctctttatcatctgtgtatctactataggttttttatttgtagatactatgagtcttacataaaacataactatttattttaagctgaaaacaactttgtctgctgcatataaaaactgagatttagcttttcctcccactacattttatgttattgatgtcacaattcatgtattttatatatcatgtacccattaacaaatttttgtagatatagttattttaatatttatcttttaacttttacactggagttaaaaatgatgctgcatcagcattaaagtattaatgttttctgaatttgattctattattacctttacaataagttttatactttcatatgtgttcacatttttaatgtcctttcatttcaacttgaaaaactcccattagcatttctcataaagtgcatctaatgatgatgaactcctgcagcttttgtctctttgggaaagtccttacctttccttgtccctgaaggacagccttgctacatagtattcttggtaggcagttgctttcttttagcactttgaatacatcatctcaatttcttttggcctgcaaggtttctactgagaaacacactgatagtcttataggtgttcccttgaatgttttttctctttgcttttctcttgttgcctgcaaaattttctttttgtctttgatttttgaaaatttgattataatgtgtcttggtagcactctctttatatttaatatatttgggagttatttgggcttcatggatctgcatgtgaatcttcctctccaaatttggaaagttcagctgctttttttaaaataagctttctctccctttttccttctttctctgcttcttctgaaacaccaataaggtttacttaatgatgacctataatttctgtaggctatctccactttttcattcttttttctatgactctggttgggtaattttgaatgaccagactttgagctctctgattgttctccttgattgagtctgctgttgaatctctttattgaatttttcagtttagttatgatgttccttagctctagaatttctgtttggttcttttttgtgatttctatctctttattgaacttttcattctgtttatgtactcttttttcttattttgtttagttgtccatctgtgttctcttgtagctcacttagcttcaagatgattattttgaatttttcattatgctgtttttcattagcatcagttacttgtgctttatttgttcctttggtagtatcatgtttccttgattatttatgatctttatggacatgccctggtatctgtacatttgaaaaagtgggcatctcttctagtctttacagattggcttggcagggaatgcctttaccagttggctggtccaaagattctcagtgggctatctagctgggctcatgggtggacttatgctagagttcttgggccaacttgcttggtgcctggatcagcaagtggataggctttgtgcctgggtctctgggggccagcctggtgctggggtccattgggatgggcctggagcctgtgtcaatagggactggacttgaagtctgggtccatgagagccaacytgattcctggggtagatgtgtggggttaggccttcagcctgagtctgcaggagccaccctggtgctggaatgaacctggtgcctggatccattgggatagatctggaacctgggcccatggagcctaggcctcctatgttaaactcagtgctggggtctcctccataggtgtcctatgggcctgtactctggaattggtggagcaggcctagattctgttacctgggctgcagggactggtctggagctcgggtgggttaaagcctgggttcacagggccagtctagaacctggaactggcaatgctgtcctggtgcctggggttataaggggtggcctggagctggttgcataggggccagcctagcaccaggttgggcttggagcctgggtctgtgggtattgctctggaggccaggtccatgggcactggagtcagggaccacagggctggcctggagctggggtaggcataaaggctgggtccatgtgttctggcctggaatctggggcttttgggggtggcccgaaactgatgccagtctggagccttgggtggggatggagcctgaatttgctagggccggcttagggactggggttgttggggctggcctggtgtttaggtgggcctggaagcttggtctgtgggtgccagcctggtgccaatgttcattggcctggacctggtgctggagtctgtggcaaagttgggtgcttacttcactcattttaccctatgcagagagtatctatctctctacttactatgctacctagtcttgggggaggagtgatagaagtaatgtgaagttgtccttcttacccttctcaatgagacttttcttatttctctaatacattcaaatgctataatctctcatctgaaatctttagctcttgtgaagatatttttgtgcatggatagttgttcaaatggatgtttctacagggacaagcactggaaagtcctattttgccatcttgctgacacaactcttatatatatctatacatcacacaattatccttcttttgtaaatrtatgacacatatatgtatgtgcgtatatctgtgtgtatatgtgtgtttttgttctatttgctaatctgattctttcatccaaatagtatattatgaacttcattccataataaagtattcttcttaaaatatgttttaatcattgcataatatttcattgtatggatgcaccaacatttagctaatcgattttgttatttttgcatatttattattttattattataaaaagtcttctaaggaattcttatctgtttgagcataaccttgattacttccttagggtctagctctagaagtgaaatagcagaatcaaaggtgatgttaaatttgatattccttgttattattcttttaagatgacaaaggaagcaggtctcctgtctcttacattatagaggttagatattatggttgcttatgaagaaaaggaaggaagtggcctcttatgtgcaagtcttagctttcttcctagtgtcttttgtattctatcatatcaaccagagctgtataattaaatagttattcatgtgcaaagagttaatctgcagcacattaacacatgtagacaatttagaagttctgcsaaaatagatttttatatgcataaatgtaacatgaatagcatttcaggcttaatggcccctttgcctataagagaatattattcaaactcaagatgaaagagaaaatctggacttatttttcagcaatgctagccaataattcttaaacagatgtkcttttggaattatccayaaccatggaaagaggactttgggggttaaaattttagtttgcctttcctatatgcatgaatcttttttatttattcatttgctattttattttatgattgaaattttacataagaacatacctttctgaatggtttttacatgccaataactttttatttattttttatttttttagatttggatcctacaaagaaggacacaattatgaaaacaaccatnattttcatatgaatactcccaaatactttttatgaaacatttaaaacaagaagttattggctgggaaaatctaagaaaaaaagtaygtaagataaaaagaagagattaatgaaagtgggaaaatacacatgaagaacctcaacttaaaaaacacatggtatctatgcagtgggaaattacctccatttgtaaactatgttgcttaataaaaacatttctctaaattgttttccctaaattttgataaaaaatagaatttggggtaatataagaaagtttcactatggagttaaaataattaaaaatgtcttaccttttgaaggcttagaaataggaaattttttttgtttgtttgttttcttttttgagacaaagtctctctcagttgccaaggcaaagtacagtggtttgatcgctgctcactgccaccttgatctttaaggcttaaaaataggatttttttttcttttttgagacaggatctctctcagttgcccaggccaaagtgcagtggggtgatcatgctcactgtagccttgatctcttgggctcaggtgatcttcccacctcagcctttggagtatctgtgactataggtgcttgctacaatggctggctaattgtttacttttttgtagggaagaggtttcactatgtttcccaaactggtctcaaacttcagggctcaagcaatcctcccaccagcctcccagactgctgggattacaagcttgagtcactgcacccagctggacattgatttgtggatgagctggaaggactacttgtgaaaatcaagcactttaaacccttcttgggacaaagctggggaaaatgttcaacaaattaagtctaattactagaagaataatgtgcatgtgactattattgacttaacataagcagcagcccatcaccatccttccctgaactgtgaggggtcgtctgtctttttccccatgcttctgtcacttcatggctgtacatggcacactgtgttgatgcctcccatcagtcaggccaccagactctcagcaagcataccttaacacacagaggggtcccatgaagtgactttccttctgtagaatcaagtaggcaggcaaaggggaaaattcaacacaacagcaccatctccacagaagataatgatttgaatataggtcatagaggcacatgaggtcttagaactggaaaggacactgaatgctgctttatcttttgggggcagggataaaagttgtcagaaagaaagtttctaaaagtattatgtcacaatctaaggagattccttagatctatttaacaaaattgtatcatactagtctgttctcatgctgctataaagaattgcccaagactggatcgtttataaaggaaagaggtttaattgactcacagttccacagggctggggaggcctcagggcacttacaatcatggtgaaaggggaagcaaacacatccttcttcaaatggtggcaggaaggagaagtgctgagcaaaaagggaaaagtcccttatgaaaccatcagatctcatgagaactcactcactatcatgagaacagcatgtgggtgacctcctccatgactcaattacatctcaccaggtccctctcatgacacatggggattatgggagctacaattcaagatgaaatttgactggggacacatccaaactccaaacgatatcatatactgaacacattgccatatgcaaaacactgaattcctatagtagttttaaagatgagtccgtgaatgatcctgcagtttcttcaaaaggtggaacctcactcacttctcttttagtatgggctagatttagtgacttacttctaatgaagagaataaagtgaaagcgatggtatgtgactccaagtctgggttataaacaatactggggctttgtcttaatctcactgtctgcttctgagagaagccagctgctgtgtcatgagcagccccttggaaaggtggtgagaactgaggcctcgtgccaatagccatgggagtgagtcaccttagatttggaaactccagccccagaaaaactacagatgacttcagccccatgttggctacaacttcttgagagatcctgagccctaagcacctagcttaactggtcccacatcttgacagataataaccatttgttgttttaagccactatgtaatggggtaatttgttttgtatcaatacataagtaacacagtccttaaacttacttatatttgaaaaactttgggaatctgggaacaacaaacatatttattcagtgtccgttttgtccattatactgtactaggcatgtggcagtggtgggaggtgtcacttaactgaaaaagacattaacctaaacacaagtatggcagatgggaaaatacgaagacatcttgaatagcagctactgattatttaccctctattgagctagatgctttaccaatgttatctcctgacaacaataatgaaggcaataacccatgtgccaactggggtctctctacctttaagctctaggtaagacagccagaatgcccattccactccttccagaagagagtgtcttcccaagatttctgtgaattgtgggaagtgaaggagacaagactcacattcttataggcatctctctcactgatctccttctgctgtcatatttcaatttatacgtggtctcattgcatttctgacaccagaatcatgctactgtgcaaggtaaatgcaagcagatatgcatttaaaacacattgttagtggctggggagacagatccacacacagacagcaggagctgcctctgttctatgccaagcagagagttcggttgttttcttgacttcctcaaaagaaacaaataaaaaactcttactatgtatcttagtgggtagcatcttttactgaatgtttgggaagatagagaagggtttacattgtagaactcaaaacatattcaaatgaggtaattagatattcccttgctttgcaaatcttttctccacatcatgtagtttggcaatatcctattttcttctctagttgttcatatctcccccaaatttctactaatttctaatgccaatcagattaactgtctttttgttttagcctcctgcttactcattaggctcttgggatcttaacttctatgtccatggcttatctaagtgggaggtttccatacacctctctcagtaaatgataaaacaaggagaaagcttgaataacacaattaattgaagtgacatatgtagaacagtgctccaaggaacttcaagttactcattattttcaagtgcctgcagaacatttaccaaaacagaccatatgctaggccaaaaagcaaggctcaacaaatgtcaaaatattgacttcatacaggattatattttctgatggtgataagactaaactagaaacaaataacaaaaagataatgggaaagtcccaaatattggtaatataataataaacttctaggtaatccatgggtcaaaaacgaccacaatggaagttagaaaatattttgaactaaatagtaatgaaaatatggcatatcaaaagttatacgatatagttttgtgtttagaggaaaatatgtagacttaaatgcatgaactggaaaagaagaaagactaaaagtcagttacataggtacccatcaagagaagctgaaaagggaacagaaaattaaacccaaaagagagtagaataaaggaaaaaaggctaagaacagaaattagtgaaatggaaaacaaacaattacaaaagataaaagtgacaaaaccaaaggttgactcttttgaaaaaactaataaaattgaactctttggtaggaccgatcagaagaaaaaggaaagaaagaagacaaaactgaccaacattaggaatgaaaaagtagacacaactatagaccttacaaacattataaagaaaataagaggacattattaacaattttataccaattaatgtctcaaaaaataaagtttaccacaacagatacaagaagaaatagaaaacttactaaagaaataaaattaataattaaacaaccaaacataaaacaggacttctgagccacacatcaaggtcagaggcaagaaaaattgacatcagttccagtctactctcatgtgctccagctcattcctgtgtcttccagcttgttcttgatctccccaactttacatccatcttcctttctccatggcctgccttgcagatttcacactctaatattaactttcaagacaatagccttacaggtgacttaatcagcaaccacagctatgtaaagtcaagtctctgtaataaatccttatatatattctagttccctttctctgattaaatcctgattaataaaacttcccacagcaaaaactctacacccagatagattaccggtgaattttagcaactatgtacggaagaaataacaccaatcttatagacttttcacaaagaataaaaaaaaggaatacttcccaacttgcatgaagtcaccataactttggtaactgtgatggttgattttattgtcaatttgactggaccacaaggtgcccagatatttggttatatattatcctgtgtgtgcaggagtgggtgtttatggatgaaattaacatttgaattgatagactgagtaaagcagattgctttccccaatgtggagaggcttcatccaatccattgtaggcctgaatggaacaaaaaggcagggtaagggagaattcactctctctgcctgcctggttttgagctggaacattagtcttctcctgccttcagatttggattctggctggaacttacaccattggctcttctggttctcacaccttcagatcagactggaactattgtgccagttctctttagggtccagcttgctgactgcagatcatggcacttctcaacttccataaatacacaagtcagttctttatcatacatctctctcatagtcttttctgtctttctgcctctgcctctatctacacacacacacacacacacacacacacacacttgattctgcttctctggagaacccagactagtacaatatcaaaactgaaaagaatattaaatgaaaagaaaattataggtcaatctctatcatacacatggatataaaattgctaaacaaaatattagcaagtcaaatccagcactatatgaaaagggactacattatgatcaagttaaatttattctaggaatggaaggttggtttaacatttgaaaatcaatgtaattctccatatcaacagtatatgtaatgatatatttaaaaagcatttgatgaaacttaatctcttttcattattatttttattattatactttaagttttagggtacatgtgcacaacatgcaggttttgttacatatgtatatatgtgccatgttggtgtgctgcactcattaattcatcatttagcattaggtatatctcctaatgttatccctccccactcccccaaccccacaacagaaaccatcattctcagcaaactatcccaaggacaaaaaacaaaacaccacatgttctcactcatagatgggaattgaacaaggagaacacacggacacaggaaggggaacatctattcattatttttaaaaccaccaaaaatctcttagtaaactaggaatagaggaaaattttcttaatctaataaagcatatgtacaaaatcttatggtgaacatgataactgtgaaagattgaatgctttcctcttgagatcaggcatgaagcataaatgcttactatgtgctattgtactagaggtcctagccagtgcaatacagttagaaaaacaaataaaggatagaaggtaagaaaaaaacaaatacaattgtcattattttcagacaacatgattgtttatgtaaagaatgaaaaataatctacagatgaactattagaattactggaagcagaaatcaattagaaaatacccacattagaagggagccaagatggccaaataggaacagctccagtctacagctcccagcatgagccaagcagaagataggtgatttctgcatttccatctgaggtactgggttcatctcactagggagtgccagacagtaggtgccggacagtgggtgcagcacactgtgtgtgagctgaagcagggtgaggcattgcctcattcaagaagtgcaaggggtcagggagttccctt

SEQ ID NO: 96667 - DNA, 14334 bp, Homo sapiens
  misc_feature (1)...(14334): n = A,T,C or G
cctggggagccacggaaggttgtgggtgccagagggttttggtcagagtcacagtcaggggccttctgagacctgtgccccctccccaccctccctccccacctcatcaggccagctctggggtctcggcaggtggtccgcaacatgacctctgagttcttcgctgcccagctctgggcccagatctctgacaacaccactcacacgatctcctactacaagcccaagttctacacgccggatgacaggggcactgctcacctgtctgtcatcacagaggacggcagtgctgtgtccgccaccagcaccatcaacctctagtaggggctgctgggccgcctgggtgggaaactgccagaggtgggtggcccagggaccacccacttatccagtcaggtggctccatcacctcttttcctggtgggaaactgaggcccaatcttggtagcttatcctgggcctctcagtgagtatgtttcagcctcagtgggtggatagggaccaggctggcccaggcaaggtcgggcgctgtctgaccctgctgggcggtagctttggctccaaggtctgctccccggtcagcgggatcctgttcaataatgaatggacgacttcagctctcccagcatcaccaatgagtttggggtacccccctcacctgccaatttcatccagccaggtatggggtggaggtccgggggtgggggactggggtggagaggggcgggtgtcctgggcaggcagctgacgggcatccctgtcttctcccatcagccgcagggaagcagccgctctcgtccatgttcccaacgatcatggtgggccaggacggccaggtccggatggtggtgggagctgctgggggcacgcagatcaccacagccactgcactggtatgcgtcaccccttttctccctggccctgcccactccgcacagcccccaagccatgctgatcacactcccatgccccaggccatcatctacaacctctggttcggctatgacatgaagcgggccgtggaggagccccggctgcacaaccagcttctgcccaacatcacgacagtggagagaaacattgaccaggtgggccaggggttggagaaactgagtcatggtgtgtggccccagggcatcctgggctggaggcctggatcatcacagagtgaacaatggttggtgtcctctctctagtgcctgggccatctggagcccctgtgccatgagggccaaaccccctgctccaatgagacccagcaggccccaacctgctcttcctgatgacctggcctgaaatggcaccacctgggctgaggcctgtgaccacacaggcgtggttcaggtggcatctggagccctgctcagccttcccctctccccccacccccaggcagtgactgcagccctggagacccggcaccatcacacccagatcgcgtccaccttcatcgctgtggtgcaagccatcgtccgcacggctggtggctgggcagctgcctcagactccaggaaaggcggggagcctgccggctactgagtgctccgggcagacaaggctgacaagcaatccagggacaagatactcacgaggacgaggaagaggactttgggggacgggcttcccctgtgagcagcagagcagcataataaatgaggccactgtgccaggctccaggtggcctccctggcctgtctccccactctctgggcctcagtgtattgtgtgtgaaatggagccgtctggctggggaggaacagagaggtgggattcggagatcttcacgatgcgggcactggaactagcctcagcatcttcagcatggggagagccgggcacatggctgggggccaggggaaggttcacaccaagccctgccccttcccaccctgatccctcggactttggggccaggccctcccttactggggctgggcagtgacactacctaggatcagccaccagggggtgtcacgaccctggcgctttcttaggcagagggtggccagctgatgctgggaacctgggcgccttctcagacccgtaggcctccagctcaccctgccgatgacactggcggtgaagctgaggtccgaggaatggggactgggcaacaggctggaggaaaacatctcggtcagagccacgcccctcgggggttcccaagagcaagcccagagtgaaacccaagcttgtgatcctctccagagggaggcctggttctcagggaacagcaaacgggaagatgtccccagatcccagggatcagggcttggaccagctggggacgcagcccagagggagtgggtccagaaggaaacagctagacacagcagccttcaccattggcagcccctccaggcctcccttggggcctgctccctcctctgtgcacagttccaacacctggagcagggttctgggaagggctggtggaggtgggctggtgggaggcggtgatcacagcccagcacctggatatcaccaggggcactggggccaggggccaggtgaggccaggtcggggctatccttcaggagccccaaaaacctggtgattccaaagggcccatagacaaacagggttttatgcctgtggagtcaagtcccactgggtctgagctctggagggctgtgtctctggggctctgcaagggtgaggtggaggtaggctcaactggtgtacaagtcactcttcaatccttattttatttatttaatttttttaaaaaaaatttaaaccaatagagatggggtctcactatgttgaccaggctggtcttaactcctgacttcaagcagtcccccaatctcagtctcccaaagtgctaggattacaggggtgagccactgcacccggcctcaatccttattttggcctgagaggaaaagccgtggccccatttgcaggggagaagactaaagctggaggggcaggccttgctctgggttgcacagcagcaagagaagtgggagctggccatgagacttcctggacccgacacgctggtggggtacaccctggttctccaggtcccatggggctcagcccaggactacctcggggggtgagggacttaaatcctctccttcattctcatcaccccttcccccatcatttcctgaggaaggacattcagggacctgaaggggtggcctgcccctccacacctgtgggtgtttctcatcaggtgggacaagagactgagaaaagaaagagacacagagacaaagtatagagaaagaaaagtgggcccaggggacctgcactcagcatatggaggacccacgctggcaccagtctctgagttccctagtatttattgatcattatctctaccatctcagagagggggatgtggcaggacaatagggtaatagtggggagagggtcagcaggaaaacacgtgaacaaatgtctgtgtcataaacaaggttaagaaaaaggtgctgtgctttgatgtgcatatacataaacatctcaatgcattaaagagcagtattgccgccagcatgtctcacctccagccctaaggcagttttctcctatctcagtagatggaatatacaatcgggttttacaccgagacattcctttgcccagggacgatcaggagagagatgccttcctcttatctcaactgcaaagagtccttcctcttttactaatcctcctcagcaaagaccctttggggtgtcgggctgtgggatggtcaggtctttcccttcccaggaggccatatttcagactgtcacttggggagaaaccttggacaatacctggctttcctaggcagaggtccctgcggccttctgcagtgttttgtgtccctgcttacttgagattagggagtggtgatgactcttaacaagcatgctgccttcaagcatttgtttaacaaagcacatcctgcatagccctaaatccattaaaccttgagtcgacacagtacatgtttctgtgagcacagggttggggtagggttacagattaacagcatctcaaggcaaaagaatttttcttactacacaacaaaatggagtctcttatgtctacttctttctacatagacacagtaacagtctgatatctctttcttttccccacagggaccttcctggctgtgcctcgggtcaggaccagaatgacacccattcgtttccctgggcctttgctcggatggtccctgcaccctggcctctgcctgatgaggatggtggggagaggaggggggacgtcccccacactgctgtctccactgttcctgctgcccaggcctctgggcttccaggactgcagcgggtcgatgggtgggctggcctgagccgaggaatgcacttcagctcctggttgagcaatgtcactgaggcttgggagtcgggtgggggcaggaggaggtgtccacaggcccccataccgtgagaggcagccgtgggaacagcctacctctaaacaatcactgcagcccaggctgaccaggggctctggccagacataggggcctggcaggctgtgtggcctgtaaggacacagtctgtctctgtgcctcagtttctctgctgcccagatggaggggcccggactccaggtgtagacatctggagcaggcagtgttcagctggggaggaagcggggaggactgtgggggccatgtgggaaggattccaccccacatcacctgcacccctgctgagccgggtcaacggagcccctcagtgggtcctcactcccctggctgcctcccatttaggcaccctgaggcctggggagaacagagccaggccagtgtccccagagaggctgtgctgccagcacagtagtagcggatttggattcagggaagcagacctgcagccagggtgggaaagagctgcaggtggggtggggcccccacatggcacagcccccctccctggaggtccatgctgcatttccaggacagcaagtcccagggatggatggtgccgggtaccaagggctagaggcatggtctgtctgcatttcccacataagtgtctcatagtcaccagcatttgatgctgtcaagtccccctgtcctctgtgcagactgggaagcccttgttaaccttgggggtttgggggacccaggccaggctgcagaaacataaggacttgaacccgggtcctgagtgacaccaccttgggtcctcctccttctgcctctgttcagctccaccttgatgctgactaggctgggccatgcggagagggttaggggatagagatgggagctggggagcagggctccactctgggaggggggcagccttgccagatccagggcagagttaagcggccccaactctgctttcccagagcagctgagaacctggggaatggtgtggaggttccggggagccctgcccctacctggcaacagcagtgcagcaggcaccaagttctcctgcacattgcgacagtgtgaccatgggctctggcaggcagtaggtggggcctttggacctaccagcagtgagggagttaacacagcagctgacttctctaggcaaagaaaactcccctcagacgctttgctgcctggcctcctgccaggaacaagcaggagctgaaaactagaagttgaggcatgagtttggccactccgtagtgtgcacttggtgagggcagcagctcaccacagctgccagccatctgtccattcacccatctgtccatctggcagcccgctgttcagacctgtctgtctgtccgcccaactgtaagcccatctctgtcccattgtctatctgaccatctttctcttactgtccactttttctagctatctggcctgtctgtcgatccatcttcgtgtctgtcttcagcccccacctgtttgtccatctgtccaattacctgtgagtctatctatgcatcttcttgtctattcatctgcccaaccatctgtccctccgtctgcccaccggcctcccctctccttctgggccacagagccatggcccaggactgcggagccatggttgacctggtcctgctggggctggggctggggctggggctggcgctggctgtgattgtgctggctgtgttcctctctcgacaccaggccccatgtggcccccaggcctttgtccccgctgctgttgctgctgactccaaggtctgctcaaatgttgtacggtgagtgagacgtgggaggaagctgggtggcccttggcagccagcccctcctggagaaggcgtgtgtgtgtgagcatgtgtgtgtgtgtgagattatgtgtgagtgtgagtgtgtgtgggtatgtgagattatgtgtgagtgtgtgtgtgggtatatgtgtgagtgtgtctgtggggtttgggtgggtgtgaatgtgtgtgatcgtgtttgggtgtgtgtatgtgtgagtgtgggtgtgtgtgaatgtgtgtgattgtgtttgtgtatgtgtgagtgtgtgggtgtgtgtgagtatatgagtgtgagtgtgggggtgtgggtgggtgtgaatatgtgtgattgtgtttcgctgtgtgagggtgtgtgtgagtgtgagtgtgagtgtgtgggtgtgtgggtgtgtgtaaatgtgtgtgattgtgtgtgtgagtgtatgtgtgcgtgtttgtgggtgtgtgtgagtgtgtgagtgtgagtatggggggtgtgggtatgtgtgaatgtgtgtgattgtgtgtgggtatgtgtatgtgtgggggtgtgtgtgcgcgtgtgtgtgtgtgtgcacgtgcactggcccaggaagcaggagctgtgtgtgtgggcttcagcacctgcagggcttgagcgcaaggagacagcctcagggcccttgcacagaacaggtggcagggtgtgcccgtggggcagatggggacttggggacaatggtggtgtgtgagtccatacctggctccaggattcaggaggcccatttgcatatcccaggtgggaacctgtctggccccgcctgaccctgctggccggtgcaggccccttcagtgaggccaattctccaaggctggggtcttctcccagggtcaagggtgaaggggtttggaggctccctgcgtgggtactggcctgctggggtacacacaatgctgccatagccagtctgccccaacacccagcccggggccacatcycaggtctctcagtcctggggagccyggtgccccacccctcacatcctctctccctgagtcagggcctgggtctcgtgagctgagtgactgatacttggtgtcctggatgagggcgtggtggagaggggccacagtgggtgtttcctgaccctcttccaggaaggtgctgctgcygctgcagggaggacacatacaggatgccccttcctgccccctgcctcccattgggcccacaaaagccagggcaagcctcccctccctgccagccacctggtctgcttcccagaaattctgtcttgcaggctgttgggaggatcccagtacttygtaaactaaagcaagggaggagtggccgttctctctctttgttcattcattcaccttttcattcattccttcttccctccattcccccatctgtccatccttccctgccctgattgctcacaccaccccccagcccctcctgacctggtcctttggtttctctttagggctttctgtctcctcccacagggctgagaatggcagctcagggacaagtgggggctggrgactgcttagtctccccagtggctctcaggggatttgagggtttgacgccagctgccaccccgggctgtgcccctcctctgctcaggagcacatacagggatgcgacacccacttaaactcgaagttgcaaagatgcaaatgagactgsggtctcaggcaccagagaccacccatgggcacgtggcttttgggagtggggacctgctgccacagatctctgaagagtctggacctgctgggtctcaccgagtgactgtctgggggtctccatagcatgccttgctgtgtgcgtgatggtcactggttgggtaggggtctctactctaaagctccctctgccggcatcccctcgaactctcccttggtgaagagaggatgtggtttgccccagtgttttatcaaacaactctctccacttccagttttaagaagctgagagtggaagagagcctggggctggccccagctgctgctgtgaaacaggggtcactggatgctgggaccctggccgggctggctggaggcctcaggaagaggcctgctacatcgtcatcctggccaagattcctccctgcagaggaccctggccacactgccacrgggtctgctggggccaccagaagcccatgctcctgcctccatctctcccctctgtgctcacctctcaccaggaggccctcccagagttcagtgtcctgctttttttttttgagacggtgtctcactctgtcaccaggctggagtgcagtggcgcgatctcagctcactgaaacctctgcttcctcggttcaaatgattctcctgcctcagcctcttgagtagctgggactacaggtgccagccaccatgcccagctaatttttgtatttttagtagagacggggtttcaccatgttggccagatggtctctatctcttgattagcccaccttggcctcccaaagtgctagcattacaggaatgagtcatggcgcccggcctcatctcctactctttcagcaccaggttttattcttaggattctgctacagctggagcccctgggtgcgagctcctaagctttgtgtgagtgtggacccagcaccgtgcctagtagacatacaaaaggagcatggtgacagtgaggtctgtcatctccagcataataactgttttgatccttgtagaaaaggtgatttttggctgggtgtggtggctcacacctgtaatcccagcactttgggaggccgaggggggtggctcacgtgaggtcaggagttggagaccagcctgggcaacatggtgaaaacacgtctctactaaaaatacaaaaattagctgggcatggtagtgggtgcctgtaatcccagctacttgggaggctgagacaggagaatcacttgaacccaggaggcaaatgttgcagtaagccaagattgcaccactgcactccagcctgggtgacagagcaagacttggtctcaaaaaaaaaaaaaagaaagaaaagtttatatttttgttctaatggttatcttaatatcttcattctataattatatgttttatataattataattgctatataagatataatacccctagtatgttgttttttggatattctactcgttcctgatggttaatttatgtgtcaacttggctaagctatggtgccccgttgtttggtcaaatacttgtcaatatcttgctgggaggttatttcatagatgtggttaacactgacagtcaattgactttaagtaaaacagattacccaccataatatgggtgggccacctccaatcagttgaaggccttaagaacaaaaacaggtttcccagagaagcaggaattctgcttcaagactgtaacacagaaaccctgcctgagtttctggcctgctgactgctctacagatgttaggttccagacttcgagatcaacccttacctgaatttatagcctgctggcttgccctacagattttaaacttgctagtccccacaatcatgtgagccaattcctaaataaatctctctctatgtataatctattggtttagtttctctgaaaagctttcacatccagtttcctggatgttaagaattactgaaactagctagtaacttttttttttttttttttgagacagagttttgctcttgttgcccaggctggaatgcaatggcacaatctcagctcaccacaacctccacttcctgggtccaagcaattctcctccctcagcctcctgagtagctgggattacaggcatgtgccaccatgcttggctaatttttgtatttttagtacagacagggcttctccatgttggtcaggctggtcttgaacccccaacctcaggtgatccaccgccttggcctcacaaagtgctggaattacaggcatgagccactgcgcctggctcctagtaaattcttcttttccgtgatgtgtctcttacctctaataatactttcttcttaaagtctacttcattaaaaatagttatgctgggcatggtggctcatggctgtaatcttggcactttgttggagttcgaggtgggtggatcactgaagcccaggagttcaagaccaacctgggcaacatggcgagaccctgcctctacaaaaaatacgaaaattagctgggtgtggctaatataattctaagttggcacacttgtagtcccagctacttgggatgctgaggtgggagaatcgcttgagcctagaagggagggattgctgtaagccaagatcacatcactgcactccagcctgggagacagagtgagactctatctccaaaaaaaaaaaaaaaaagttatacagctttcttggttagtgcatgcatgacttatttttcattattttccacctctctgtatccttatataaaaggcattagttgggttttactttattttcaattattttaatttttattgtccttttaaatgtaactaatgatttatttgggttgaaacccaccaccaatttgttttccatgcctattctatttcttcttatctcctctcacatcttgttttggatttattatttttattatttaatttcctccttctctattagtttcataactgtgcagtcttagagttattttaaaagatgactggattattttgagcttacaacatgcatccttcacttatcaaagtctaacatgagctagtactttttgttgttgttgttgagatagagagagtcttcctctgctgcccaggctggagtgcagtggagcaatcttggttcactgcaacctccacttcctgggttcaagcaattctcctgcctcagtcacctgagtagctgggaccacaggtgtgcaccattatgcccggccaatttttgtattcttttttagtagacacagggtttcaccatgttggccaggctggtcttgaactcctgaccttaagagatctgcctacctcggcgtcctaaagtgttgggattacaggcgtgagccaccgcgcccagcctatgagttagtacttctatcctcttcctagtcagtacaagaaccttggaacaggaactaaatttacccccagtgacttatatgctaatatttttgtgtattttaaatatgtgtgtgtgcatagatgtacctgtgtgttttttgtgtttttattcttatttatgttgagagtgtagagctatgtaagagtaaagagaattgtgtaatgaagccccacgtatccattcaatttcaacaacaatcttatggccaagctcatttcatgtatactctttcctgcttccctctaccccacattatttcagtgcaaatcccagatatataactgtacccatacatatttcagtatgtttattttaaaccccacaagatatcattttctatactactgtaattttataccaataacattcatttagatttacccacacgtttaccctaccctccgggtcctgtttgaaaatcaaacccatgctcacaggccaattttttttcttttagagacagggtctcactttgtcacccaagctggagtgcagtggtgtgattatagctcaatgcagcctccaattcctggactcaagggaccctcctgcctcagcctgccaagtagcttggactatagctgtgtgttttannnnnnnnnnnnnnnnnnnnnnnnnnnnnnnnnnnnnnnnnnnnnnnnnnnnnnnnnnnnnnnnnnnnnnnnnnnnnnnnnnnnnnnnnnnnnnnnnnnnnnnnnnnnnnnnnnnnnnnnnnnnnnnnnnnnnnnnnnnnnnnnnnnnnnnnnnnnnnnnnnnnnnnnnnnnnnnnnnnnnnnnnnnnnnnnnnnnnnnnnnnnnnnnnnnnnnnnnnnnnnnnnnnnnnnnnnnnnnnnnnnnnnnnnnnnnnnnnnnnnnnnnnnnnnnnnnnnnnnnnnnnnnnnnnnnnnnnnnnnnnnnnnnnnnnnnnnnnnnnnnnnnnnnnnnnnnnnnnnnnnnnnnnnnnnnnnnnnnnnnnnnnnnnnnnnnnnnnnnnnnnnnnnnnnnnnnnnnnnnnnnnnnnnnnnnnnnnnnnnnnnnnnnnnnnnnnnnnnnnnnnnnnnnnnnnnnnnnnnnnnnnnnnnnnnnnnnnnnnnnnnnnnnnnnnnnnnnnnnnnnnnnnnnnnnnnnnnnnnnnnnnnnnnnnnnnnnnnnnnnnnnnnnnnnnnnnnnnnnnnnnnnnnnnnnnnnnnnnnnnnnnnnnnnnnnnnnnnnnnnnnnnnnnnnnnnnnnnnnnnnnnnnnnnnnnnnnnnnnnnnnnnnnnnnnnnnnnnnnnnnnnnnnnnnnnnnnnnnnnnnnnnnnnnnnnnnnnnnnnnnnnnnnnnnnnnnnnnnnnnnnnnnnnnnnnnnnnnnnnnnnnnnnnnnnnnnnnnnnnnnnnnnnnnnnnnnnnnnnnnnnnnnnnnnnnnnnnnnnnnnnnnnnnnnnnnnnnnnnnnnnnnnnnnnnnnnnnnnnnnnnnnnnnnnnnnnnnnnnnnnnnnnnnnnnnnnnnnnnnnnnnnnnnnnnnnnnnnnnnnnnnnnnnnnnnnnnnnnnnnnnnnnnnnnnnnnnnnnnnnnnnnnnnnnnnnnnnnnnnnnnnnnnnnnnnnnnnnnnnnnnnnnnnnnnnnnnnnnnnnnnnnnnnnnnnnnnnnnnnnnnnnnnnnnnnnnnnnnnnnnnnnnnnnnnnnnnnnnnnnnnnnnnnnnnnnnnnnnnnnnnnnnnnnnnnnnnnnnnnnnnnnnnnnnnnnnnnnnnnnnnnnnnnnnnnnnnnnnnnnnnnnnnnnnnnnnnnnnnnnnnnnnnnnnnnnnnnnnnnnnnnnnnnnnnnnnnnnnnnnnnnnnnnnnnnnnnnnnnnnnnnnnnnnnnnnnnnnnnnnnnnnnnnnnnnnnnnnnnnnnnnnnnnnnnnnnnnnnnnnnnnnnnnnnnnnnnnnnnnnnnnnnnnnnnnnnnnnnnnnnnnnnnnnnnnnnnnnnnnnnnnnnnnnnnnnnnnnnnnnnnnnnnnnnnnnnnnnnnnnnnnnnnnnnnnnnnnnnnnnnnnnnnnnnnnnnnnnnnnnnnnnnnnnnnnnnnnnnnnnnnnnnnnnnnnnnnnnnnnnnnnnnnnnnnnnnnnnnnnnnnnnnnnnnnnnnnnnnnnnnnnnnnnnnnnnnnnnnnnnnnnnnnnnnnnnnnnnnnnnnnnnnnnnnnnnnnnnnnnnnnnnnnnnnnnnnnnnnnnnnnnnnnnnnnnnnnnnnnnnnnnnnnnnnnnnnnnnnnnnnnnnnnnnnnnnnnnnnnnnnnnnnnnnnnnnnnnnnnnnnnnnnnnnnnnnnnnnnnnnnnnnnnnnnnnnnnnnnnnnnnnnnnnnnnnnnnnnnnnnnnnnnnnnnnnnnnnnnnnnnnnnnnnnnnnnnnnnnnnnnnnnnnnnnnnnnnnnnnnnnnnnnnnnnnnnnnnnnnnnnnnnnnnnnnnnnnnnnnnnnnnnnnnnnnnnnnnnnnnnnnnnnnnnnnnnnnnnnnnnnnnnnnnnnnnnnnnnnnnnnnnnnnnnnnnnnnnnnnnnnnnnnnnnnnnnnnnnnnnnnnnnnnnnnnnnnnnnnnnnnnnnnnnnnnnnnnnnnnnnnnnnnnnnnnnnnnnnnnnnnnnnnnnnnnnnnnnnnnnnnnnnnnnnnnnnnnnnnnnnnnnnnnnnnnnnnnnnnnnnnnnnnnnnnnnnnnnnnnnnnnnnnnnnnnnnnnnnnnnnnnnnnnnnnnnnnnnnnnnnnnnnnnnnnnnnnnnnnnnnnnnnnnnnnnnnnnnnnnnnnnnnnnnnnnnnnnnnnnnnnnnnnnnnnnnnnnnnnnnnnnnnnnnnnnnnnnnnnnnnnnnnnnnnnnnnnnnnnnnnnnnnnnnnnnnnnnnnnnnnnnnnnnnnnnnnnnnnnnnnnnnnnnnnnnnnnnnnnnnnnnnnnnnnnnnnnnnnnnnnnnnnnnnnnnnnnnnnnnnnnnnnnnnnnnnnnnnnnnnnnnnnnnnnnnnnnnnnnnnnnnnnnnnnnnnnnnnnnnnnnnnnnnnnnnnnnnnnnnnnnnnnnnnnnnnnnnnnnnnnnnnnnnnnnnnnnnnnnnnnnnnnnnnnnnnnnnnnnnnnnnnnnnnnnnnnnnnnnnnnnnnnnnnnnnnnnnnnnnnnnnnnnnnnnnnnnnnnnnnnnn

SEQ ID NO: 96668 - DNA, 24782 bp, Homo sapiens
tcttgtgcgtgcattaaaaaagtggcaaagcaaaatgaagaaaaaataattcagttgaccaagaaaaaccttttcccagcaaaacaaggtccaagaaaagggaaaccttttaaatatgactctaacttggatatccacttttagttaagctgagcactccttaagaaattcctcttaactcccttattatctgaatttagccacaccaagtggccaatatttctggctttcaaactttactaaaggctcagagaaaggaaaatccaaggcagttcatggagagaaatggaatcaacaaatagcaaaaggtcatgcagatatcaaaccaggtaagactcattccctaagccaggattgaatccaagctacacagaggctacacaaaaccttgccaagtggttacaggtcttgctcccaaggatgttaaacaagatggaggtcctcagcaaatttgctatggaccatacagaaagacatgcaaagcagaccagattggctacagcttcagatcagcctcacaaatcgtctctcgcaattaaaacactacagagagccctctgctcagtcctgcagctgcccactgccctcctactgtccaccgtggccctgctgcactctggctgcgtcctctctgggatcgctgccaccttccacctgggcctcgcagctgcggcctctgccagagccagctcctgatggacccatgtggaaatgggacctccagatatcatcctggcagtcattgaagactttaagagggacaccaatagcaaaaagatgaatctgggagttggtgcctaccgggatgataacggaaagccttggacgtgctgcctagcgtccccaaggcagaggcccagattgccacaaaaagtttggacaaggaatacctgtccattgggggactggctgaattttgcaaggcatctgcagaactagcccttggtgagaacagcgaagtcttgaaaagtggccggtttgtcattgtgcagaccatttctggaactggagccttaaggattggagccagctttctgcaaagattttttaagttcagctgagatgtctttctgcccaaaccaagctggggaaatcacacgcccatcttcagggacactggcatgcagctacaaggttatcggctttatgaccccaagacttgcgattttgacttcacaggcgctgtggagggcctttcaaaaataccagagcaaaatgttgttcttctgcatgcctgcacccacaatcccacgggagtggacccaggtctggaacagtggaaggatacagcaacaatggtgaagaagaagagtctctttgccttctttgacatagcctaccaaggctttaccagtggtgatggtgataaggatgcccgggctgtgcaccacttctttgaacagggcattaatgtttgtctctgccaatcatatgccaagaacatgggcttatattgtgagcgtgtaggagccttcactgtagtatgcaaagatgcgatgaaaccaaaagggtagagtcacagttgaagatcttgatccatcccatgtatgccaaccgtccccacaatggggcccagattgcttctaccattctgaacaccccagattcatgaaaacaatggttgcaagaagtgaaaggcatggccgaccacatcattagcatgcggactcagcttgtctccaacctcaagaagaagggttccacccacaactggccacatagcactgcccaaactggcatgttttgtttcacagggctaaagcctgaacaggtggagtggctaaccaaggagttctccatctatatgacaaaggacggccgcatttctgtggcaggggtcacctccggcaacgtgggctaccttgcccatgccattcaccaggtcaccaagtaatgtacctggtgcaaggaaacagagacgacctttctgtcttcagcctctgctattgggagcttcacacagaggatgagagagagcggatggtggtgagtggatcattttcttcaaccacggtgtgtaacactcagcaattgaatgtttctcagaaaagaacgtgtagtgacacagggcagagggatccgtggctggcgtctggaacattgtggctctaaaccaaatgctcccctgtccttttatccccaacttttctcaaagagtttacatgtacaagaaagtcaccacaccaaaaaacctgtcaattatgccattgcaatatttcagaagctttaactgaagtgtcatatagtgtcaggttcctcatgagaaatagcacacattagaggctttgagagaagacctagttctgtcatgaacacttggcctcatgtctgtcctcccatcatggagcagccttatcaacagaccacattgcagaaattatgttttatgaaaaccagtaagtctgctgccactacagcaaggaaaagaatgcagtttcctgtcttatttaagaaaaagagaaggctctcttttctcctttgccattgctgttcttttccttatgcacaaagatttttaatgaatgcagatttttatctcattctactgcctgactatcaaccccatcctattgggatttatttaagaataaacataattttctgctgatgccataccctcacttttctcagcaaagaataatggagagtaggtaactgtactttatctcagcatcctcttgaatgattttgtaatcttctctagttgtgatgttgtctctgcccagttgtacctcctcctttgttgaatgtggttgtgcagtcactcatctcacaccgtgagtccagtggcacagggtggtaccaggaaagaggatattctaggctttgtgtgctgccagttgggttcaggcttcacctcctggaaaccatgtagacttattgcagcctacagatttgtggaacttcaaacttgagggagatgatttagggtatctggcagaagaaacttctaagcattgaagcagttaagaggtgacttgggtgctgttaaaatattcagttttaaaagggaaacagaggataaaagtttagaaaatgttcagcctgatgatgtgatagaaaaaaaaccattttctgtttctccactgtgcacgagataagtggaatacctcctagcattccatagcactgtaggattactacagttaacaataatatgttatattgtttcagaaagctagaaagaggatattaaatgtttccaacataaagaaatgataaatgtttgagatgatagatatgctaattaccctaatagaattgttgtacatcatatctatcaaaacatcactacatactttatgaatatgtagttactatttgtcaattaagaaacaaaatggaagaaaggaaaaaaaaactgtaactaatcccgtttaagtatgaaattgtatttcctatattaaatgcctacacccacactgtgaataaattttatttatattaatatgtaaagttgtaatgtgagaaatgagcttacgaggttgcatttatgacaagattctgttcactgaagagaaagagtacctcaagtatttctatttaccattaaaagtagaactgatttcaaagatctatattcaagagaacagagaaagaaattttaagataatttctgcaagttaaggttatttgtttttaaatcttaccccaaataatgcaaatgatgccgtgttttcaaattttattttcagtaaatcatcaataactatttccaacaagttatcctgtaaatttcacaattatttgttattattttgcaagaaggtaatatgtgaatttcagatttttatgcacagttggattgtagttgagaaaataaccttaagatcccaaacttcttaatgttgtgactcatacacactcatgtcagaagtgacccaccactgagtctgatggtaccacacttgtctatttcctgtccaacaaggtggattcacccacttggttattaaggaaatgtcaaattgctatatgagtttttaaatgcttactctcaatgtctgtgatatggtttggctgtgtcaccacccaaatctcatcttgaattcccatgtgttgtgggaggcacccagtgagaggtaattgcatcatggggcaggtctttcccgagctgttcttgtgatagtgagtaagtctcatgaggtttaatgtttattataaggggaaattttcctgcacaagctctctctgcttgctgccatccatgtaagacatgacttgctcctccttgccttctgccatgattgtgaggcttccccagccacatggaactgtaagtccaattaaacctctttatctgtaaattgcccagtcttgggtgtgtctttatcagcagcatgaaaacagactaataaagtctgtgtttacctcaccatggactgataacacatagttcatgaactgccactgatccatgatatacactttgagtaataccactctaaggcaaaataagagatagatatattgtaactgctatgatgatgatgttagcaggggaactggggatgttactataggcagatctaaaaaatccaataaaggttttttcacttcaattttaaaaactctacattttttactagtagggccttttattaacatgccaccatctagcacttcacgtaatatatgactctccacacaaatgtttgccatttgtttatttaactaggtaataataaggaggaaagatttgagtcagcttcagtaagcatttctaactgcaacagactttgcaagtaatcattttattcaaaagccaaataacttacattctatgtgtgtgtcctaaaagaatcctggctgtgtacttatttacataacctttatttattgtcctttatatacaaaggacaataatgcatgaggcagaacatttcctttcttctgaggacaggagaattctgaatgcaattccagaaattaacagtcttgtgcttatgtattaactttttttcatatataatagacatgggcttacatttcatttactgtgatgacacatttaagaaacctagtcaaatttaaggccctgcaatcagatccttttatgcctgtcttttagagtttgaaaaaataaaggaagaaaaaaaaatttaaaccaccgtgatgcactgaaactcactcatttttcatagacacttttctttataagggttatattaggatagttatggctatatagttttattatttttattatccgtatgcatacatagcaaaatatttgttacacaagcaataaacttagatattaacatcatatctccttttccatacttcctcagagagagtcaaaaggtggaaggactattaaggcactacttctgaaatgtgatcgaggttgtttcattatcatgtaagaaaattataatcttactgtatcctgtggtgcaaagtatgtgtgtgtgtatacatatataatatatatatatacacatacatatatatgatatatatatatcaacaaattataagttaaattgaaggatgattatagctttctatgtcatagctaaaaacaatcataactgacaaaaagtcatctgctttttaaaaataattaatacatgttattttagaatagttttagggttgtggaaaaattgagtggcaagtgtagatttctgatttatcacttcttcctccctcacaatttcccttattattaacattgcccattagtgttgtacaatttgtcttgatgaacaaatattgatacattgtaagtaagtccatcgtttagggttccctctttctgttgtacattctgtgggtttgacaaacatgtgagatatatctgcagcagcctcgttgtctggggtaaataccaagattcttagtctcatggccaaggagatcgaggtctcggacacacacacagacagagtgagtttggagcaggagtttaataggcaaaaggaaagaacaggtctctgttagagagggatcctgagaagattgccaagttgtagttaagaatgtcagagtttttataaatgggctcttgaggagggggctcttgaggaggggcttgtgaggaggggatgtcttatctttctagggcccmagggtttagttgggaccaggtgtgccatctgtacagagcagatttttttatcatctcttaacccactccgtgaccacacaggccaactcttagtctgtgtttctttgtcctgcttatctggtagggaaagtttctgtgtctgttcccatacatcttcttgaagctgcaggcatcttggtgcgcctaaagagaaaggaatgtgcttattaaggcccactgttttactggggcccatcgtgtaagtgtgaagcttggtgattacccgggaractctcggctgtccaccccagtccttctgtgtcccagctgtcttttctgtgttttactgtctgctctttcaggcctcttgttagaaaagtgatttctttgaactgcatgaggttagcaagggagctatttttgagctgctttttgttaaaagcaaagttttctaccggggactggctttaccctgtctacccaaataattcgtttctgcctcctataacatatccaccattacacatagaatagtttcactgcctaaaaagctcctgtggcccagggtgggaatcggccccgggtggaggcctccattgggttccccctaatcccggggacaagggcatcctctgggtccttatcacagggtaaggggtccaccagacccggacaagcgctcctagctggaggagggtcgcgttcctgccggatgtggaaaggaagtccaggaatccccttcctgtctttctggtttctctctgggcttcctgctcgggtcacaagcgccagaagcgccggcggctgcggggaaacggtakgcgggggatccagccccaagcaaatctcccgcgggcgcgtgggaggtggsgccagtgctgggcgcagccgcgcctcgcgcctcccgccccccccggggctgcggcggggacgcttctctggagggtgtggcggaaacttgaggcttggagtccgcgggaccggaaggggctccgtagctcggggcagggtgggcgcgagagagcctagaagcccatgtagccgcgaatcccgcagccccagtacacctccctccgtgcctccccgccttttctgcagagctccgccctggagtgaaggaggagccgtcacctggagctccgaaaaaagcagaagaaggcgctttttatttagccagtgtgaccccgccagggccttctcggttgggtgagcactctctctgaccaggccatgaaaagaaaaatctgtgcgatgcctccccacatgtcacgggactctgacttgcctttgtcgtcagagtttgcagaactttgggggacctgagaggggagtgccccctggacgggccacggctgtctgtggcttaagggcttttggaagggcggagagagggaaacggcgtcctagtggcctgcttcagggccacccacgggccctcccccaacctctctctgatccaacttgtttttccagcctagttggaaacttgtggatgctgtgacctcaagaagacttggcattttatttggaagatagacatctatttgcaactgtcctgagcccctattttcctcccacctttcttggggaaacttgtttttaagggrtgccactgyttttgtaacatgttgctcctagctcttagcattcatggtactgttgtaaccgtccagtgggttcactttgtctgctagatagagccgatttatcaagacggggattacaatggagaaagagtaattcacgcagagccggctttgcaggtgatgggagttttattattactcaaatcggtcttcttaaatttgtgtcccggagcagtacgttctaacattttttagatgttacaaatgtaacttttggctaagttacattcctactaagttatattcttactaactaagccaaatgttatattctaaagaatgtttacagaaccgaaactaaatatttgttacctggtacagttgtgaaacttgttttttaaaatgcatcctgtgatttaagtttttcagatcctgaaactgagttaaaatttgatcagtaataatgctttatttmtctgttcttctgagagataattcctaatgttgtttttccaactagaagtctgaagagttattgtgttcagtgtgtaccttragagtggtatgaatttgcgggagtcaggacacactgtaagaaaggtagaagagaaataagtgagcaagagagaagtggaacaagatgcatgtgggaatattgctgcaggacttttccttatttcagctaaaaatgggattctttgtcccacggccacggaaattcaggctcgcagatggtttaaagggtgtgtgaagcagagttttattgggtgaaaaagggaaaaaaagggggaaacaggtactcttgcagggccagagtccttccgccggagcgcttcccacctgacagtttgaatcccaggttctacaaatgaaaaactggggccaggctcaggcttctctctgctgcaaaccttgtgaacttcccaaggctccacctcagtgggcaggctaattggagtttctccagggaccccttcccacctggctgtctcagtattagtaggaggggctagagatgtaaaaaagaagaagagaaagcaggcacatttagaagattattaagagaggcaaatgggagatttgggggaagttttaaggggagagttacacattaccctagtagcaatgaaaaagaattacggaagtcttagtattctgaacctttaagacaattttgcrttagtgtagaaccagaaagaataaaggttgatatttttatatgagccaaaatccaaacgatatttactgcttaagatcatccaatcttacccatctttccccctgtctagaatttaagctgaagctccctgttattcttgtagatgtatattaaacggacgaaagttggcagggacttttaaagtattataatttatattcagtaaaattyactcttttggtgtagatttctatggtaaacatatatactcatgttactaccataaaagtcaagatatagagccatacccacccactcgaaattccctcatgtccctttgtagaatgtctcttcctctaccgctagsccttggcaaccactcatctgttttctgatcttgcacttttgcttttccagaatgtcacatcgatggaatcttgcagtaggtaaatgtagaatctgacttcattcmyttagcaataatgcattttcaagtcatctgtattatagtatgtatcatttgtcaaagaaaaacaagtctggacttagggagaaactttattcaaaaggactgttgcaataggaataacactgatttcaaaaatatgttaggccaggtgcggtggcttatgcctataatcccagcaatttgggaggctgaggcgggtggatcacgaggtcaggagattgagaccatcctggctaacctgctgaaaccccgtctctactaaacaaaatacaaaaaattagccgggcatggtggtgggcatctgtggtcccagctactcgggaggctgaggcaggagaatggcatgaacccgggaggtggaagcttacagtgggccgagatcatgctcctgcactccagcgtgggcgacagagactctgtcttaaaaaaaaaaaaaaagttagtggtgtgggagagagcaggcaaagtctaggcgtttcagcaggaaatggtgcaatgtggtctgtggtcaggttaaggcaggatgttttttgcaagtctgtgctttgaggcatttaggcaaacttgcgggcaaacacgtgtagggcctgtggggaggagaaaaacctgacaaaagtttggccagctaacacacagtaagaaattgacaattgtgaatgtgtgatcgagttttttcttttattagggctgaggaatagttgtttacctcttcagcagctgaagcatatttgagttgttgctagttttttgtgataatgaataaacctggtgtaaaatattccttacaggtttttgggtaaacacaagttttcacttcccttgtttaaatacctagggataggatggctagggcatgtggtgaatttacatttaccataacaaactgcttaactgttttccaaaatgcccataacattttgcatttccagtgatgatgcatgaaaattccagtkgcatcctgtccattctctcactgctataaagaaatagcctgagactgagtaatttgtaaagaaaagaggtttaattggctgaccattccacaggctggccaggaagcatgattctggcatctgctcagcttctggggatgcctcaggaaacttacaattcatggcagaaggcaaagggggagtccatacttcacttggccagagcaggaggaagagaggaagtgagggagggcaccacacagttttcraccgccagatctcacgagaactcactcttatcacgacacagtgcsaagggggaaatctgcccccatgatccaatctccttccaccagaccccacctccaacgctggagattacaattcaacataagatttgggtggggacaaagatccaaaccatatcacatcccttcctcaccagcagttgtttctttttctgttttgtttgccactctaataaccatgtagtagtcactsatggttttaatttgtatttctcaaatggctggttatttcaagcatgtttttatgcacttgtttgctattcatatatcctctttaatcaagtatatctccaaatcattggcccactttttaatctagttttcgttttcttattgttgagttttgagttcttaatatattctagatacaagtcgctttttagagagatgtttttctgcctttgcttgtctttttattcccttttcagggttttttttctagcagagagttttaattacgttaaagttcaatttatcaatttttaaaatattgataatgcttttggtgttgtatgtaagaaatttttgcctaattcaagttcacaaaaatgtaattttcctcttctaatagttttagggtttgaggctttatatatgagtctaaaatttattttgagttaattttcttataaggtattaggtgtgagctgaggttcactgttttgcattaggacactcaattgttccagcactacatgttcagaaaatattaccccttacctacctgattactttccacgtctgtcaaatgtcaattgaygatacacgtttagatttgtttctgaaaccttttttctgttccattgatttatgtgtctgttcttttgtcaatatcatactgtctttgtttctattactttgtaaattacgaaagcagsttccctgatttccaaatttggccatttttttttccttcaaaattgtttggctattctagttctttgctttttcatataattttaaaattaccttgcttatttctacaaaaaattcatactgcaatgtttatcagkattgcactgaatctctaaacctgtttgggtataattgacatccagcaatattgcatattccaatctatgaatatcttatatctctctcttgattcaagtctgctttgatttctttgtccctttggtttccagctttcatcatactgatcctaaacatattttgatatatttatttgatatctttcatgttattataaatgatactgtttttatatttaaatttccacttcataattatgaatatggaaatataagtgatttttatatatgaacataggtaatcctgtagctttgccaaattcatttattctcatagccatttggtagattccttagaattttacatgcagacaactgtgttgtctgtgaatagcaatgcttttatttctttccaatctgtatgacatttatttcttttttcttgcctttttgcccctaataggacatccagtaaaatgttaaattggattggtgagagagatcagacatccttgccttgttctatgtcactgggggaaagcatttattctttcatcgttaaggttgttgctagttgtagtttttctgtagatgccctttatcaggttgaagaaagttcttcartttctaatttgttgagtcttactatcgtggatgaatattaagcttttcacatcctcttgctgcatttattcagatgctcatatgttgtcccttgtctcattctgtcaatatggtgaattacattgatttattttctgcttcccttgttgcttctaaccagctgctttactatggggctaaatctggattgtgtatgtttctttttcatcccaatttctactctttttccagtaactggaagattccctgggggtggggagaattcgatttttatctctagccctctttgggccatwattctcatttatgaaccaagcccttttgtgaaaggagttggcagtaggagaattgaagtacatctgatcttagtgttgattmtatgmtaaattttttctccctacgatattcctgagattgagattctgatgtttctattttacagataaaactctgcaaagacaatgtctagcacttatatctccagtaactcctgtcaaggtttattgttgcttgttcatcattgcagtcctgactacaagtgtgattgcactttctattgttttgtcagrtaagttacttgttctccaaactgtacaatattctccatatgtttttgttgtcaataaatatttattaagctccattatgtgcctgtcactgtgtgaaatgcttgaattacatcagcaaacaaaatacacacaaaagaattcctgccctttggaacttatattccagcagaaaaacacaagtaaaaataaataagggtggaggtataacaggttgcaataggttgacaaaactaagccttcttaggaagrtgacatttcagcaaccttttgaaagagatggaggaaccatgtgaaggaacctattccaggcagagaacaagtagaccaaaagcctgaaggaggactcttcctggcttatttgaggaagagcaaggaggctgctgtaggtgaagcaaagtgaagatggagaagaagagtgataccatggggaatcaggaacggaggaaccttgagggtcagttaaagactttggctttgaccttcagtgcaatagggagactagatgagggaagttgtacgagaggaatgtcttgatgtgactttcattgtagaataatcatttaattgctatattgagactaggtaggggagggtggtcagactctggatattttgaaagctgagccaacagtattttatgtcaaattggataaaacgtctcagaggaaygtcaaaggtaagcctgtcttcttttgagccttggcaagaatgcatttgccgtccattgatatgagaaaggctatgggtataggaattccgcttacggaactatttcctgacaagttcctctcagaattgtcattttttattaaaaataaagtaagatctctacttgaaatgttttcaggcaaatcacctggccttaagagctggtatcttctacttaagcagattgagaatgcacgaaagtacagagaactgtatacrtaaaaaaatcatctcttgtatagaggtaataggtcctcagcattgctttgtcaagagaaagaagggctaatatgagggaggatatggaaaaatcatccgtatgaccctgtgaaagtacagtactatggaagtcgatgctatagaaattgatttccttgaaactgttagtgtcagtgtaaatttcagaaagtcaagggtgcagatacccagctggaaaccacyggactgacgattgttgtgcttaggataaggcactttgtgatgagttaggaaaacaacaatcagatatgtacacttcaaaaytgacctcaggaaggtaagcagaaaaatagataaaatgggtgagaaaatttctttattatgtttcattgtgattgtctcactwttagcaagaaaggaaaagccagtggtagagtcatctaaatacgctgcttgcccaaaaagctgaattagatttaggagtaaatgtttttatttttctgaaggcataagaaattagacattgagtcaaacgttctgtgtctcattagaagccagccttgctcagtttgcaactatggaggaactggtaagagatatttttggatcatgttttctgttaaatacttagccccctgaggcaggtcggctacatagggttaaagctgaaatactaagaaggatcccattccaggggcatgagatgtgttttcatgtctaacatttgttgagggtgtgttctctgcctggaaccctgtsagacattttagatatatttccccatgtaatrctcatggtgagctggtaagatgagatgtattgttctcattctattaagaagtaaggtaattatataatttgtcatctagattaagacatatagggcattaaaagtgatcattaatacattggtggaatgacaagcataaactgagaatttcccaatgaaactgggatttatgctcactttaaataaagtaatttaggatcagagacgttaaatgacttaaactgagaactgggaattagtctcactccagaatttatgctgcttaattataccacgctgccagtgaaaaagagaagggatagggaagagagactccagagtaataygaaagaaaggggctcatggtgttagtttctgttttattatagaatttcctgaaaagatacaaaggcccttctgaccattggattggccttagaagagaatcatcccatcgcatttggaaatggacagacaacatggaatataataacatgtatgttttgagacttctcatcttttgytgtgtttatgtatggttatgtgtgtgagttgtgtttatgagataagaaatgtagtatcatggaaaacttactgcaatatgaggtaagaaatctaaaccctttttatgctcttcagttkgttagctgtgtctttgggaaagctttacctgtgatttcagttgaagtctttaayrtgacagtgacatttctcacaattttacactttcatccactgatttaaaactgctgaaatccctacttatagctgatgtgcaacaaaggttctacaatcataggaagccactgaggagctgatatccacaaggctgttaagcccactcttgcaggtgttgcatccatttacaataggaaagcatccagggaactcatgggaatctctccctcctaaagctttatcaccagaaggaaactagtaacagttmcttggactgtgaacatttcaaaggggtattttgaatrtaatcattacattgcagcagataaaatgtaggaacccagtcatatccattaatcaaagctaagccctttcaggaatttactagttttttttttttttttagttttcacacatttayaaaacaatttgggaggagrctggaaatcatcttgactgaagaccaccaatggcagcagttcatttgggtacagcagcaagcatcagttaaatacctatcaacatagctgggcttggtatggatgaatgataagcttgtgattttcaagcaaggaccttgaggacataaaggacaytaaatacagaaatggtttatattactatgaagcaatattaatgacagacttttgcttttctcttattcacattgaaatatggaggggktgcagaagatgatggggaggaacaaatgcaggtgtctaacttacaaatatttaatatttttgtgtttggatttaggcttgctatcagaggargtggagaatgtgccttcctgaatgacaatggagtcaacagtggcagaatctacatgaacagaaaatggatttgtagcaagccaaacaattatgtctacagttgccagttatgtccccactgggatactacctagtagagctgtgagaagagggccaccatcctccagactccagaatggtggaatcakcagcagcttccaccatgcccctggaaaaactgcaagtaacagacctgcacatgtatcccctacatctaaaataaaagttggaaaaaatggaactttgatgttaagatgcactgatacaaaacttaaattttggtctcctacattaaaacaatatgagtctcttaaaatattgatttgttcttagtaagattacaagaggctttgatttttaattctgcaatgtttccttaayagccattctgaattacaaactaattcctatttctgccacattccttcctgagaactgtctagtcctggtttgggatttatcttaaaggtctagaaaggcaacattttacttcagcaaaacttgattctatattgttgttttttcttaatgtgtcaaaattgttttgttactaggatttcctatgttgttaytaaatgtattcccctgatcaaggtcactggcctagaaaacaaagattctgtgttttaccaagataattcccagtgcttcatggtgtctttattaggctttgactgcttagggaaactgagccttaaaagggtaaaagtttttccatccatgtaactttctgaggtctttaggttgtcactctgattaaatgagtagtattcttagcagtgacttattatctgttgaaggaagtattttaagctttttgacatctttggcaggtttctctagaatccaaatcctaaattaagccttttggcctaaaattgactgggatttttccaggtggaccccctagatatgctcctccaaaggcttgtctttcttgtagagttattaaatgattaggcttatttggcaaatactgctagaagcattgtcaaataagaaatggtgttttacctttctttaagctgtgtttgtgtaagttcatcatttatagaaatgtgaaattttatgagattcctaagatactgacatgctgagatacctgtaataattgcaatttttatgttggatgattgtatgccacagaagcacttaaatttcctggttaattggtaacgttaatcagatctttacctatggctgttctgggtttttgtcattcacagttattattttaatttcttctttggaagcgttcgcaatcagctatagtccaaaattgctaattaagatcaagcaaaacaaaattaattacgtaaaattaatttataaggatgtttttatgacgtaaatgttttattttccagagccaaggaaattttctgtcacaagctatctaccgtttgcaataatttgataaataatcctttgtgaacaaatatggaagcatttgctttttctctctacttgattcctkcaaaattcrgaaactatttgtggatatttttagttttatttatacaacttcagtaaaaatccactctctctttataagcaggatccagttggaaacattatttatattgctaaggtttggcttgaaatgtcatatttcagaatgtgcatagaggccaggggtggtggatcacacctgtaatcccagcatgttggcaggctgaggtgggtggatcacttgaggccaggagtttgagatcagcctggtcaaaatggtgaaacctcatctcttctaaaaacacaaaattagccaggcatcgtggcgcacgcctgtagtcccagctactcgagaggctgaggcatgagaatcgcttgaacccrggaggtggaggttgcagtgagtggaaatcccaccactgcactccagcctgggcgacagcgtgagactgtgtctcagaaaaaaaaaaaaagtgcgtaaaatgccttgcttcatgagttcccagctttacagggaatgagtaaaaattgtcactttctggcaggttcaagaaccttattataagcaaaatccaaaggctgctttggtttggtttcctagcctcaagaggttctaaaatctaagacctcctacatcatcaacgggagagaaaaattatgcttctaaggaaagcaaagttacacctgtttttagattttaaccctgtacattgtcttcaagtccttgttatctgcctgtggactgaactagatcctgaattctcctaagttcctccaatattaggttataacagtcctgatggagtcccccaaccctcttgcctcgatcctgactagggatgctccagggacattcaggtgacttccccttcttaaaaatctgaccagctagggacattagataccagaattgggaacaaactggatccataagatactatggtcagtaatgagatcttattggtcagtgactttttttttttttttaaatggagtctcactctgtcacccagagtggagtgcagtggcatgatctcakctcgctacaacctcccatctcccgagttcaagtgattctcatgcctcagcccctcaattagctggggttacaggcatgtgccaccacacctggctaatttttgtatttttagtagagattgggttttgccgtgtgggccagactggcctctggcctcgaactcctgacctcaggtgatccacctgcctcggcctcccaaagtgttgagattacaggcatgagccactgcacctggcctgctcagtgacttctaacattgctgctgtacctgggtaaatacttccagtcatatttaagcgggcttggagttggcaaaatctctgagagagacatcttcggaaagcctccatgctggacttagtggataaagtttccaatgtccagatattttcagctggtttctccttggtataggatttcttctgcattctaccctgcacatcttaatgataaccctcatattttggctaagcatttgactcccctttagaattgttctaacttgtttttaacagatgtctacaagagattcccaccaggatcctgcccatgcaatctttgagactttaaactcactccagctggaaataggaaccaacttaacccaagagactttggttcacatttaaccagtactttcctgaatgcctctcctaagtaaatggctctagtttctctattggccactgcactgccactaggattcctgcaagggatccgatgggcccagagcaggtagccaaccacttctctgttggatggaatgcaatgctgtttgccagcatgtttgagccagtccttcaagatggattctgagtgactaactggacctaaatttaaatagcacaaagcagccatttgctaactagatttcatacaaatgctctgagttcctggaaaacccacactccttaactttgggactttcaagactcacctaaatcaatcaattaaagctcacttgtgtcagctaatcagggatcagctgtattgactaatgaaaactaagcgagtttcaaattttaaccatttatttgtgtagaagacttgattgggagcctgggtatgaatacttgctataaaatctgagcattccctttgttctctggagcaaacaatgttaagttgttaactctctgtacctttctctagaactggatggaaacaactccatctgaaatgcagccctaataccagggaactcctacagtaaagcgctaaacaactttattactctaaccaacgtttatgtccctaatcagcaagaagtagttagaatggtcatcatccctttccctcaagattgaggaatggacataaaaaggaggggatttgtaactgctccagactgatctgttgtcagaaaggggctcttgaaccagaccatgaaagagggttcttggatctcctgcaggaaggaattcaaggagagtcacagagtgtagagagaatagacagtttattgaaagctactcagttacagagtagggcatcctccaaaagcaggaggaggaatgtgctgtctttgttttaaactcttcttttataggggtttaatctatgtaaaacctaagctatgtctacatgtgggtaggctgtcagtgtgacaaaatttagtattttgttgatataaagaaacttatccttgtcatcttagtgcataagtacatcaaagtatgactttagctaccttaaaagcatgtattgttatgtgatattgggacatctggacattctgctgtcgtaggagtttgtccttgcagcattactaaatcgcttccttagctgtaaacatcttataatcgtaggtcataactgtcaaggaagtgccttgctagtttttagatggagttgattttaaaatagtgtcactctggctttcctatgctcctgctttcctaacaaatctggttcaacttttttttttttattcaacataatcttttttttccatactacctcatttacagagtgcttcctatagatatggttggtctgtatgtttcctttttcagctttgattcttatttttttgaatcacacatgctttatgggggcttccactaccatgagccatattttctgtattaccagcaagatgtttgggtttgttttttgttttctttatatttcaaattttattttagatttaggaagtacgtgtgcaggtttgttaacatgggtgtattgcatgacgctgatcttacaataccaatgatcccatcactcaggtagtgagcataatatccaataggtagtttttcagaacttgccttatcttccctctctccctgctctcttaattcgaagcctatttttcctatctttatgtccacatgtttccagcatttagctcccacttatacgtgagagtatgtggtatttgtttttctgtgtctgcattaatttacttaggatgatggcttccagctgcatcttttgttgcaaaggacatgactttgttcttttttatgactgtgtagtattccatggtgtatatgtaccacattttctttatccagaacactgttgataggcatctacattgattccatgtcttggctattgtgaatagtgcagcaataaacatgcatggttcaacttttatggtaacaaagctgtgagttgttcttcagttgtcatggaccctcactcaggtcatgtaacctgagcatggacaggtgaaacaagtgtgcaaccacaagggaaacctaatcgttcagactgaggtacagggaccgaattaagaggtggacacaggatggcaggatccaggatccaactggatagaactcaggcatcacttcatggcaggatccagtcagatcttgcctcccagcatcacctcattgcaagatccaatcagattattcctcactaccctatgcttataaaacctgacccacctcccagcttggcgaggtactactttgggagctttgtccagtgttctctttactttctgtaagaacaaaatctccttgctaaatccaccttgtcggtggtcattgggttgatacctgccaagtgactgaacccacctgttgtgtgggtaacatttagaacatattttccatttctttattttccttgactgtctgcattggtgtctgtgcaccagataaaacagcttcctttccagtcttcacagacaggtctcagataggacaacacctttaccaatcagtccagacagaggttctgggtgccacttaaaccttcctggtagttgaaaccacaatgtttgttcttaatggtcctcaggcatctagagtatgccaggcccttccagtgctctcagatacatgagataaaatccagttcctcaggtagcagccagaaaagctggggtgctagttatttggtctgtctcctttgcttttcagagagaagctggaagccaggctttatcactgcactgagccaaagtggggagcagggggaagtgcccacatgcttattaaaaaccgctctgaaaatatttgaagtaacagggctataacaattattattttaaaagcaactgctgttttggtttgtgtagccccagaggtttagcagatgctgggccctgtcagctcaccaaaacagggaaattagaaaccagtctatctggtagtatctagagaagttgtgataccagataggtggtccaaacccttcactcctcagggatagactaagagatgggagttccttcccgatcatatggcattgtattagggttgggggttatgatcacagtgtgtgcaagttttttcctatcagttttgatgtggatagtttcacactcacctagggtgcaggagtggctcagtcagtttctggatttccaatgatgggaatttgcctctgtgttgctgttgaattgatggtggggaaggagagtttagggccttctattctgccatctgtgactctgacagtttcttttaatgttaaactatcatacagtctagttactacatttgtagacatttctctcgcacaaatgacaacttatatttacacaaaagcctgtatataaaatgtgcataacagctttattcataatagtcaaaacttgtaaacaactgtatgtctcacaatgggtgaaaaattaagtaaattctgttataggcatacagtggattactactcagcaataaaaaggaatgggctattgatacatataacaacttccttgaatctcaaagtacttaggctaagtaagaaaagccaattactgaagatcgcattctgtgtgatttaatttacgtaacattattgaaatgacaaaatggtatagatagagaatgagggttatggatgggtgagtggagaagaaggggcagtatggagaaagggtggtgtggctctccgtcgtgatggaagagtttcgtttcctcattgtatcaatggcattatcttagtcgtgatattatagtgtagttttttagatgttaccattgggagaaactgagtaaagaagatgtgggatctttctttagtatttcttagaactgcatgtgaatctacaactagctcaaaataaaaagtttaattataaaataaaagctacatgaaatgaagcaaaaaataattcacccttgtcacgcacacagagtcagagactgtaacataatttgcaggatctagagcagaatacaaatgtaaaacatcttgttaaaaaattattaataattttgagacattgataaagcattaagccgcctgtggggccctttaagcatgataaactgtgctaccacacagattgcacattcacgtatctggccctgcaaatggaatgatttttgcccatgatcaattcaccatggcctctttgggctcagtgaatttgcttcttcaggagggtaattttctcttctttctctgctaagctgtttaacagtagttgccctgcctaatgggcttcatccatccatttctctcagattattttcatgatgcactaggatgaagcacaccctttctcctagtcttgaggaaacgtcgatattcagaatatttaaacgcaggcactgaccaatcagaagagtttctggccaacgttccacacttgagggaaatgacattatctgagccctgaagaaaaacgttgtagatattctccagatcaaagcatcgacaggaagattttagatgttgaagttcgtaatatttcctaaagcaggtatgaattactagtaacttaataggtatattaactgatgaagttttcatttctcagaacaaaccagtcaaggaaggtgctattatactccttttattcatatagatcttgaggctgagacagtttaatcaatatgctataattattgtgtaataataaattaccataaactaggggtgctatgatctcaatatttgtatctcccactcccaaattcacatgttgaaatcctgactcccaaggtgatggcattaggagatgaaacctttgtgaggtcattaagtcatgagggtagaataccgatgaatgggattagtgcccttacaaaaggggcccaccaaagctgccttgttccttctactatgtgaggacacatctagaagttaccatcaatgaaccagaaagtgggccctcaccaggcaccaaatctgccagcactctgatcttggacttccagcctcctgaactgtgagaaataaatttctgttgtttataagttacccattttatggtattttgttacaggcacatgaactaagacaagtggattaaaaacaacacaaattattattttactgtctagaaatgagaggttcaaaatggctaaagtcagggtgccactgatagggctgcatttcttttggaggctctagggaagaagccgtttccttgcctttttcagcttccagaggccacctgcattccttagcttatggtcccttgctacagctttaaagccagcagcacagcaccttcaaatctctctctgacagtgacattcctgccttcccctaataaagacccatgtgattagattaggcccacctggattatccaaaataatccctctgtctttagacccttaaccatatgtgcaaaatgtcttttgtcatgtaaaataacatccttacctcaaggttttgggaattagcttattaatgtctttagggggtcattattctgctttccacatacatttaaaattaactatcaggctacaaaagtcatatatgaattgagcttgttttgccccaaaggctgtgttctttttttattttttttatttttattttttgagatggactctcactgttgcccaggcaggagtgcagtggcacaatctcggctcactgcaacctccgcctcctgggttcaagtgattctccagcctcagcctcccaagtagttgggattacaggtgcgcaccaccacgcccagctagtttttgtatttttagtagagacaaggttttg

SEQ ID NO: 96669 - DNA, 81706 bp, Homo sapiens
  misc_feature (1)...(81706): n = A,T,C or G
tattcgagctctactaaaccactctaggacatgccttctttgggtcatcaaaaatcaactctcctcgcctaggttttattcttgccaacttagcattcccacggcaattcactaaaaacgccttaaaaaatcattagctctcatttattcaacttgaacatcagcatggcctgaagctcgggaagaaacagactggcatagtgacgctgccagcaccaagtaaagttttacctcccagcgctccaggttcccagcaagacttccagccagggctgccttccactccatttcagcctggcaccctgactctcgctctaccagctgttggcacgccttgtgttaaccgagaatttgtgagaaaagcagaaccttcccactgcgtgttagttttgcttggcaacactcaacaatctcaaattggaaggccccaaggaaaattttttgttgttgttcttctgcccccaggatgattttttcttcttcttcctgaacctgtttggatttttttccacttaaaaaatctagcagcccccacctaactgatggatacttgtaggtaaatgactctatctgagcaatgatgcgctgactgggcctataaattatgacccattgtggttagttcaaataaaaggaggttccgataaaggaaaactgacactcggaattttctctctcaaaaaggatgatgtctagggatgcaaaattcaggaatataaagagagaccttgcaaatgtatcaggctcttctaaaatacaagggattggtataaaattgtcctggtgaaatcaaggggaagcacacaggactaaggaaagagaggcaagaaatatatttcttctcctttgcagggaaaacactgcattgggaagaagcttgctctttccaaatacattccattaaattgacaaccacagccaccactgccaccacaacaaaaatcaggccaacctagatcaaattactaggaataggtctaatgttacttttatgaccatgaggtcctggccctcatcagaacctctgggttacccgtcctatcacttggtaatgaatttcatatatgtatgtgctgttaaagcaaaaaaaaaaaaaaaagtaaactcataaataattcatcacactgtctcctgccaactgatcatatattgttcatgtttcaccggccatattaaataaaaatttaaaagtgtttccgtttttcatttaaaaacctagtctataattggaggtgaccacacgaagtgtcttgaaggtagcaggcattaaaaaaatcattacttaaattgcacagttaaaaaatattcattagaaatggctaaattaaagaaaaaaatgttagggaatcttagggaaatgtttctcctaaatgttgtccctaaaactgcttcactctaaaaatctgttttgagcgacctgataaaagggaaagagagagtttcagctcaaactcaggaaagaaaggctgtaccagtttcttcagaatggaacattaaaacaggccactactgaaacagttcttgtgcctttgtggctaattattacataattgatcttaaaaaaatttttttaagtttaggaaaaaaaattagaagcctagtgaaagtaccaaaaacactgtaacttttttgtttaaaaatttatatcatgaatcgaaaatcagaggagatggccgttttggcctggtctccgtcctttccttctctattttgattgagccagtcccttgttaagccatcagaaaacagagcacacttagagctcttaaactgctttagacacaaagaaaaaatttaaaaggaaaaaaaaagcaataatcgtgtgacatctcagagatgatagcatatactgttgttttgcttgatgacgataacacaattctttttgaactaagtatctctctagactacaactgggtcaaaattatagatattttttgtggccctggatgaattttctatttgccaaaactcaaaggattcaaaaccaggttgatgtctagttaaagatgatgctccaactgcttgagatgctagttcatttcaacagacattaagattgaaggagtgtcatagattgcttaggcaattagaaatttaaaaccgtttcaaagaaaagaaaaaacaacaacaacaaaaaagttatgccataggaagcatgaagcctcatttactaaagtggagaaatgtattttattttattgtccttatggcgttgattgccagttctgacacatattacaaatttcacattgtttttctgaatgctgaggtcagacctaccataagcttgtcccgttgtattaccaaatggctaattccctcccaggtattggagaaaaaagtcagaagggcagcatcctaagagaatgggtgcccagtatgacaaggagctgctaagataaaatgaactttctaactaaaaacagaaaagaaactataaaattgattttaaaatctgcaggacatttttttaaaataaaggataaattaactatgaatatattgagtggttatgaaactaatatatcttagcataacagagtagagacagctttaaacttttctatgatactcatatagttatattttatgatggtctaataggtatggggtacataatgaagaagaagctgtttgtggattcattgtattttattttattttattttttactgctttgagtatgaagagtctgcccaaatatactacttataaatcataccaaaagtgcatcagtgaaaaccacagttccatttcttaggggaaaaaaaaaatcaagaatcaagttttagaatccaacgatcacattttccttaattacaaacgaagacatcatgtattatttttctgtatccacaagagatgagagaaatgtaatttttatcgcatgttaagttttcactgaatcacagtattattaagctttaaatcagaggattgtttccttcagctaagtctaacaatactagaaagtaaaagggggggacaacccccacctcatctggggctgcaatatttgctgaaaaaaatctacttcaaaacattaatcaaatttttcgcccactgggcaaccatatggtacagcagcatgtgaatctcacaaacttgctgatctcctgtaactgggtgcaattaattacgctggctgcatccatctcttggattttcgccttgtgaaaaaagtatttattgcaacagcttttacaaaacaagggaatgaaaatcacaattgattaatgagctgaatggaaatatttccgttagcagatttttttaaatgaataaggattaataccatggatgggaatgaacacacgtcgatctcgccttgtactttttggacccccaaaaaggtggcaaaagagtgggcagagacggtgctgtgagttctaacatgcataattcactagcaggctttaggtcgcaagtaataaagccttaaaactggtgaagtaataaagaggctggctttacaagatactatcctgggagacagaaagcttgttctttgatgtgaaaacacagatattaaatactcagtgggtgaggaacattacaggcctgacaaagaagagaaagggaagggctcttgaagtaagcaacctactttgtcctcagctatttaggtgcaaaggttgctgcacatatgggccgattactgttttaagatccctccataaaaccaagcatccgagagtccgtcagaatggtaccactgtccttacctactggctaaaggcacaaacaatgcataattgcaaaatcttcccccagcaatgttcagccatcatgcacttgactttgcttaacagtcagacctcgttctggtgctgagccatcctacggggcttcatggagcttgtttcttgatacacatgagggtcgtaatccctcccttctaacttaatttttttttttatttttatttttcagagacagggtctcactctgttacccagctggagtacagtggctcactataatgttgaacttctgggctcaagtgatcctcctgcctcagcctcccaagtagtcctccaaaggactacaggtgggtgccacccagcccggttaattttgttttctctttttttagtagagacagggtctcactgtgttgcccagggtagtctcgaactcctggcctcaagtgatcctcccacctcgcctcccaaagttctgggattatagatgtgagccaccttgcctggcctcaatccttcccttctgagggagtgacagatccaaggctgacagtctataaacaaagcagaagcagatgcactttgccccttttcagaagtgccctctgggtttaagtccaccagctagccaagcattaatgacatcatcattacatgcatgcctatttcagaaagatcagttccattttccctaaatagacagcagaggagaccgcttccaacattttgctagttgttaaatatgtatcttgagaaaacgaaactaatactaaacataatggaagaaatacgtaagtttgaaagatcaaatatcgtatgactcttgaaacagataaaggaaaaagctgttaggaccaagctttgtaagtcaactcttaagccaacccttttctttactgcatctattgcatttaaacttctaccaggaaattctgcaaaggacttggttaaagagaatttactattattttattaatgcctgcagagtgtgtgtggctagtatgatgatttctctgctcaagtttgttgattgattttgtagaaatgtccacaggagataaaatctgcaaactcctcaaagatgagactgtgtccaagaaaagagtaatgatactttataaaacaagaagtaagtgacatttgaaacgatggttcatctcaaacaacacatttcctctgagctccatgtttatgttaacatgtaagtttgggaatgctgatgtaatagacaaagataactcttgccacttcaaagtagcaggcatgcctaggtgggcaagaggttcagaaagccagcacttaaggtgttgaaggggtaatttttaaaaatcttaagaaaatcattccatttgagaatcggagccaccttacaatcaaagaagccactgttttgaagaaaccactatcctgcaaaaagtagacggaagttaccaacaaaaagtacttggctcccgaagaagaggaaaatcagatgggaacgggttgtccaaccccttaaaccagtgaccctacaaagtacaccaccacccaccaccacctctcagatgatctctaaacccctcctacacgcaatggttgttggcttaaaagtttaaagagctaacaaaatgttttaacgagatacaaatctcagagatcattaatcaatatgttcaatgttatttgtgataattcatcatgacgtgatattaatgggttactgtacccttcagaggtgagattaatgcaaatgagctgccacaattaactttactgctcccacctcacaggaatggacagatgattataaatgacaactatatgtcaattacaatatccaataaagtgaagcttagagaacaatccatctccttttattgctcttccttgacgtagctgaatttagctcaacccactgttgtcactatgtaaccattgtttgggggagggaaaagagatttttcttctttttttttttcttttttaatttttcgatgtcttaagaagtgcttcaaaaacgtccatgtaaatacgttttctaaaggaggagagccacaggaaaccaggaataaatgccacattcatcctatgtgagttaaagaaaactgtatccgttttcaaattgtagcagtaaggccagcaaggaaacaacctacccagctgtgtataatatatttactcaattaaaaaaggaagacattagcacagcatcctgaaaagccttgagtttcactaaacaaaagttatttgaaaatgactccatcgaagtaaataggtcacagagtggaaagcaggtatgaggccgagggcgggatgaaaggtttgatgtcagtctgtacacctgcacttggaggtgtggagtggggagcaggtcagtaaatactacagtgctggccctcacagcagagaatttctgtgtctgcatcgttcctccttgcatggatggagtgatttttgacagcagtctctctggtgaaggtaggcacgttgtcatgttgcctcctcaacccagattctcctgccgggctggtgaacccagaagctgtaagaattagctagtatctcacagctaccccttcctgccccacttgagaggctatgtccacgccgccctcttccccagcagacactggctcatcgctgactgccataggtcagccaggccctggtctcagtcaggaccaactctgctgtacaattcaccctccagagcttcccgtgggatcaagctgaagctgatcttcagctaagccacatccttcctggacattttccctgtccttttttttttttttttttttttgagatggagtgttgctcttgtcactcaggctggagtgcaacggcacgatctcggctcactacaacctccacctcccaggttcaagcgattctcctggctcagcctcctgagtaactgggactacaggcgaacaccaccactcccggctaattttttgtatttttagtagacatggggtctcacatcatattggccagcctggcctcaatcgcctgacctcgtaatctgcgcacctaggcctcccaaagtgctgagattacaggcgtgagccactgcgcccggccacattttccctgttctaagccactcttctcatttcctttctgaaagcatcctgacccccatcaaatcagtggaacaagaagactaccttgacctgtgcttccaggtaacagaacgcaaggcaggtatcaatgagatggaaacaggaatgctcttaatgcagtgcaatttacaaaagaactgttctttgctgaccactagtaagagaccatccaacaggctcctttctgaagccacatcccgaaaagatcccctcctgatgtctctagaaacatgcaaaaataaaaytgcaacgtcagaaccataaaaggatcatagcagattgacggtagaagctatagatttgtgtgtccagaatgtttccccaggtgcctccttttgcaaaattggacctcattttwccattagggaacggggcctctcagactcygtggagaagcagagaattatctccagccttgactgcccaggctgcagagaaccgcatcatccggggacatgactgattcagggataggtgtctgcctaaaactaggccaatcctggttctccctgtggcttttgggccaagggtagtggggaaaacagcttcttgtcactgggggaacaagccaagatgggacagtgctcgyctgccagtggcagccccattyggagagaattttccctttgaagaatataacccataaaagatcatcaaaactaagggawtaaataaagaggggacctcgatgacatatttaagctctgaataaagctagactctaagcaggggttggcaaactataaccgctgggccaaacacggctgtgttcttatacagcacacaggctaaaaatgcttcacatttttaaatggttgggggcgggggggaaagaataatattttgtgacacatgaaaatgtatatgaaattcaaattccagtatccataaataaagtttctcgcagccatgcctgctcctttacatrtcgtttatgcctgttttygcactatgagggcagagttgagtagttggcaacaaacactacaaggccccaaaatatttattaaatatcccatcacagagaaactttgctgactcttgcacaaaacttcgcattttgtcagccagtaatgaccctttcctcttaagctagtttraatttggagctttttgtgtgtaagaggaaactcctgatctactaaaagaaaaagctattcttagtccttcccagatatccctgaacctccacccacccagtctgctgggatcctgatatagtttggatatttgtcccygcycaaatctcatgttgaaacatgtccgtaatgggaggtatttgaatcactggggcrgagccctcatggcttggcgctgtcttcaccayagtgagkgagatctctggagatctggtcattttaacccttttcccatttgccccaagaatacttactggtgtgcagtgtttaccctgagatcgctttgccatgaaatatctcgcttttattatttttttcacatcactctagcatatcgactttggaaacgaaggatatcattctatttatagccttctgtttttagtagtggtatttccatttacaaaatataatagttctccatcactgaaaatgtcaaatccgagaaaatgtagcattcctgcatgtgatgttaacatcattctcgaacagttgttggctgaagattcatttgatgaatccgatttttccaaaatacacaattctgatgattcagatgattctgatgttagttctgttcagaaataattccaagaactgtttttatattttattatcactttgaaaatcggtcacatttgcttcagcttcaaagagcatgtttatgtaaaattaaatgagcgctggcagtgagctgcgctttttttttcctaaacaggaaaagggttaaaagtggggcacctcccacccccaccccacgctctgtcacttcccactgtcaccatgtcacctgctgctctctctttgccttctgccatgattgtaagtttcctgaggcctccccagaagcagaagccgctatgcttcctgtaccacttacaaaactgtgagccaattaaacctcttttcttataaattacccagtctcaagcatttctttacagcagtgcaagaacagcctaatacatatcctacaggtaacgtctcaatatccagatcaagtgactggttgtttctcttacctgtttcgcagaagttattgcattctttgttgaatatcacaaactgttaatatgttaatcttaaaacatgtgaaatatatataatatctatcattacaactacaattccaaatatttatatataacgtcagccatgccaatggacatgcaattctaggcccagcaatggacgataaagtaggttaaaagtgggggagaaaaactggttttaaaaaactgtacctgaagaacatatttaatttaaagggaaatcccacaacagctaaattgttcccccagttgggtagagcctgccatgattagctgtaactgcctggaacactctagactcagctgacgaaactccagttgcctggtgagaacagagtgattttgatgacttttgcagaggatcagaaagaggggaaacggattcatttgattcatytgtggtttcctgttttccataaggagatagttacaggattaaatttctcctcccttttccctatgcactcacacctgggtcccaggacagmaggaccaatcgtcaggaaaatacatccatactgcatcccctgatacttcatctcaggttgggcaggagggttagcagaagagttatttccctttgcgaagattaaagggtatctcacttttattttaacaatgtgaagacaactgttgttccttactattaccaatctactacactggattctaatagctctattacattttccatacattctcctggcatggggcataaatgggtgagacagctctggataaatcactgccagcagcagaggcattttctttagggaatgaaggcttccatatagcatttaactaactctctttttggaaacaccccatcacaaatgagtctttcaaactgaagaaattgaaattgatttcttagggtaataattaacctcagaaaataatgatgaaaagttgcttattaattattttttataatatactttgggaatatttcttttttccatgaaagatagagacaaaagtagacacattttacaatcatataaaatgtgattagactcatattttataggagaatgaaactcatttaatttgcaaaatacttaatatgagagggaggtgtccccctacacacacacactcttttcaagactcttaaatagccctttttaaaacaacacaatctctctgttctgttctttatttcttcacacataactgccttggagcttttaatatattattgctatttcaatcccccatggtttttctacttattcaaaaagaaggtatttttcatctgaatagccattgacagcgaactctggtgacatcctcagtcttccttgacaatgggaggaggagttgtcaccaagaaacttgttactatcccaagtaacgagctagcatccctcagataatacaatagagatggactagtgtttttcaaacaatttaaaacacacacacttatgtacacagaaaaacacatgtatacacgtacacgcacacacaaacacacacactttaaaacaccctctttttctttagtcacctgaagagtcgtaaagcataactgcaaactgataaaggtataaattaaatcatataatagatgttgttgcaaatcgtacatgtctgtcagatcaccgagatagaagtcaaaacatgaaaagaccaggaaatacccacaaaagaagatgtaattgatgagactattcaagatcttttattttttccttcttttgctagtggaaaatttttattctgcacttttctggcggagggtggtattttgttttctgtaagatacaaacaaaagacagttgtgtaaaattaagttatgagaacaacatagaactgtttcttgaagcattccaaagataagtttttgctaattaattaacaaattcaagctggttaaataaaaccttcttccaacacctcctatttaattgcagtttggcaccaacaaatatatatcaaaattatagtatttcccctgacaggaagctccttccttccacacactattatggctctctgcagagtaagccagaattgctgacaaccttgaacactgctacaacaatattactatacttggcagagaagtacccttgcggcaagagaaaagctgtaattttgactgtcacttcacattacactagatattatttcactgtatacacatacacacactcacaaactcttaatagactacagttttcgcactgcctgcctttccaatataaatggcaatataataccagcaaaccgccaatgagatcctggagagaaacaaatgtttggcattatggaaacatcatcagaggatgcattttaagggatatttcattgctttgtcccccactcacaccgttcacaccccatcatcaacttcataagatcatcaccttggttatcaaaaagaaattcactttttttaaccccatggtgggccaagtcagcattaacaaattccatgtttaaaaatttccatggtgttagcaaaggttgtgctatgactcgtaatattttggacattcttcaaatctgatgcctgttatgtaaaatttccagatttcaaaatgtatcctttttcctgcatttatctcgctttccttcacacccggggggartytgttaaactgcagtgaccactggcmgagtcccaagccaagccaaaccgtgcaaacatgaaacggccccacaaatcatgcaaaccctacacgctgtccctgccagagagcagcgcctgtctttgcagagaactaaatgcaacatatgcttccttcttaccaagctcacactgaagcagattgggccaggttccccactgtgccctcccccaccccctgcccagctttgatttacaagatgctatgttaatattccctctatttgtcccaggcaaggaattctgtgatgtcggtatgagctccaaattgagaactccctggaatccggagcacaggtcagaaggatgaatacacagagggagaaaactgcaacttccctcaaggagagaatgctagaaatggcaatgggcaggaaagaaaggatcctkacatcattttatagagagtcgttcatcccttacacaaacctggccaaaaatctacagaatgctgaggaaacacggctattcaacaagaaaatcggagcttctctctctacttaatctctgccatccccctttttttcctcccctttcaaattgctacttcaaacgatttaaataagatttaaacttgttttactgaatcaaggaaaagcaacagcaaactctttgccctctgttaagagaatgtatccaaaacttcaccgggtctgctgaccacaccgaatttaacaaggttcgcaaatgaactagagtaagtttcccacagtgacacattaataataagttccttatcccatccatcccaagccatgaatatgtwatgttataaaatgagtccttttcacacaacggaatctcagacgtgaataaataaaaactatccatcacaagcctgtgaaaaattaatgagagttcggagatgcaaagaaaaatggggacaaggagagatggcccagttcataaaagcctccctaaaactttcagacaktaaatatcctagcccccgtccctcaccaaattgccaggtgtgggtggaaagcaacagattttatttttaatgggctaaaattttacartcttaaagcacaattcatgcaagcaactgagagatcacagctacaaacactggactttctattttctccatgcgatcccaatttcagctgcagagccagagtttatttctttaattattcataattcataaccaacctacttccagaaggatttgaggttgctcacagcagttatgagaaaagggagaagagtggggctcgcgcagggctcaaacatcaggagactggaaaaactctgctttgtgcattgttccttgacatcgctgtggacacacagtgcctgattaaattgtatgtgtcgcttgggttataattattatcattgycaaaaccacttgctggatgctcactctctgcccagcattacactagtgctatgccctgcataaactctgattctcaccctctatgaccccatttgacaaacagggaaactgaggctgggaggagctaactaacctaccccaagtctaagagctggtgagagtaagagccaaaggaaggaggttagccagctccaaatcacctgtgcttcccacctggggccactcactaccactcatgagttaaggtgtatgaaaacggctttggtaacctccttcttgccatcatgaaactgcagcacgctaatactgtcagwctgtctcagaaacccctgccagccagaaggcttaactttgagatgaatgcaaagcagaatgaagcccaggaactttgggggtctgggctaaggctgatgctgggcagcagattagaggcagagcagagcccagaagtccagcctcccctcccagtgcactcctcgacaagaggctgcacttcctcgtcggaaggactccaggtcccactttgggaccagacatgctgcaaaaacaaagaaattcacccaaactggtttgccctttactggattttttctgagactgaaagtgttgccttaagggacaaataccaaaaggaagatttaaaaatggaccaatggggacaatctgcttaatctggcccaacctcctccctcctcccttctccaccatccattccatgtgggcagaacacgtgactcatgggattactgggagcctgccatgctgttctgttttcaactcactacttttgtctgygctattctttcattcaggataccgccccaacctctccacctggctaaatcactcatcctttgagatgcagaagccaaagagatcctcagcacatacctccagaaagccagttactgcaggggatgcgtacggaccagccaggtaatgtcaatttggaaagcgggccaggtataaattaataggggctggttggtgtgagctgacccggtgggcacaagccccatcatccaactggggcggccaccgtacagggtgagtcaagggctgcgcccgggaaatgtgggagcaaaggtgccagaccttccagttttttaagagaaaccaagaatccaggtttttatgcgaactttaaaaaaagrggatgtgggggtgggggcagcaaacacatgcctgcaggctgaattcaccacccccctccacgttttagatcttataattacatcttctctttaggatccttaaagcataaaggcaagagccaagtctcagtaaactctgcatgggccacagctcggaaaagaaaaaaacctgttatatcrtgggagctcagtgcttgctgaactgaactgattcacatcatgacttgggattcatgaaccagaagcacaggaaattaataaaaactgaaaacgagccaaagagaagggaaaggctctcttaccactgttgagaatgttatgtttaatccctgcaagcagtagagactcagtgtacttccatgaagtgctgcttgggcattcatgaggcattaagggagaaagaatttttaaaatctttgtcttctcaaaagggaataccacgatggggccatgtctagagcaaggtgtctaaggtgattctagggccctcgcccaagaaacgaaagcagcattgaacatgtccaggaaggatgtgaagcctgaagccaatgcagaagacaaagctagataacccctgtctctaagacatagggacttagaactcttaccctgatgagcaacattgaacattggatgtgttcaccagaatggaaggagacacactcctgccgaaatcatgaagggcaaactgacccagaaaagggacaggtcaaggaaggtattacctctgcatagttctaggtgtcctgcttaactcattcaggaatttcrggccagagggatatycaacaggaattctaamctgaagagtttagaaaccagtaggagaatcaggatgaattcagaaattactataatatgcattttcaagtgataaatcccatcaaaaacagaaaaagtgcttgaagaactggaaggaacagtgatcattcttgtcagatggaatcttaaaatccagtgggtttcaaaggatgagcaggagctggacatgaagggattggaggatggggactggaaatggggagttcattgcaatcagaaggaagagcaagaaaggaacaaaaagcaagcagtgtttggggagaccaggatgtgattccagtttggccaaaatatagggtatactgggagaatctattgaggttttgggagtgtatttgtttgtagtttgaaaacacctaagcaattttgaagagaagcagactctttaagtcagatgctgggttctccagtccaaatatgccaatataattgtgtctggtcaatgtctatcctgtccatccctcctgagtgccagatctaaatccaggtgccaatggatgacttccacttgggtgccccacaggcgtcatgaattcagtatgactgaaaaggactcctcctatcttcagcgatggttccactacacaatacactgtccaagccagaagtcccaaactagccttctgtccttccttctccattcaccacgcctgtcatccccttcagagctgttggccaaatcttgttgattttaccaagtatctatcaaaatgtttcctcttcctccctgtactcactgcaatcacttttgctcaagggctcatcatttcgtgcctgggtgactagagttgtttcccagcaggtctccccaccctcctttctcacatggctgccagaacggtcttctgaaaggcaaatctgaccattcgacaactctgctctaaattcctcctatggatccccatggcttggatttaataaatgtttattgagtgaatgagttctctgcatacatgttgttctctgcctggtaccgtggaggtcaggctcgcacagaagcatacttatggtcagagttagtcaataaaaaaagtgatctattctgagttccataccaccccaaaacactgatcagcttggggaaacttagaaagttcaaccacctggggataaagtttggamaactaggctagggccaattcagggtacaggtggaggctaggaagtttggcataggatatcattaaaggtcttctaaggatgaaggcaattggagctacactataggaaggcacagcaggcggagaacagacttgagaaggatttgggaggtgaagaaacagctaaaagactctatctctgacaaagatataatgcccagaattagaagagtggaaatgaaggaatgatgaatgaaagagattatcaagaagaaacaaacaaacaaataaacaaacaaaaatccctgtaatcagtaaccatctattattatgtcccagattttggaaatgagaccctaatgacaagcactcctaaaccttcaacatagctgctgttaaggatgttgtcttgtgggggtgaaaggcagaccaaaatgatactaccaccctactcctyaccgatgagtcctttctgattttaagcaaatggcatacagtgtggtgaattaaaaacagcattatcctgatyttattactagtatcattactattagcattattgctactgctgttataggtaaaaatgggaaygttgtgaacatttcccattgcctatccaaggtgcttggtactttacatgatatctcacttaatcatcagaaagtttggagttattctataggtaatgagggagatgctattattacctgctgtggtggaataaagatggctgcaaattctttgtcacttctaccagaagaaagtgaggtgtatgtctgctccccttgaatctgagtgggttttgtaactgcttagtccacagcagtcatgctgtgccaacccctaagccaggccataagaaactggcagcttcctgttactttcttttggaatcctctgggagccctgagccaccatgtaagaaatctgatggccctatatctgccatgcaggaaaggccatgtgtagggctctgggyaagagtccctcagctgagccaagcatcccagtcatcctcgtgaaagtgccagacccatgggtgaccatcctggaccagctgaagtgccagtccaattcatcctccagcatagcaccactgactgaccccagtcaacaccacaaggggcagaagagtcactccactgagcccyaacttasagaaatcacaagataaaacaaaatggttgttgttttaagcctctaagttttggggtaatgtattatgcggctatacataaattggaacatccacgttttacagatgagctacttgttactccaaaagtttggctgacttatctgtagtctcctggctgatgaggtgtgcagcctggattagaacctccatctgcctgacctggctgcacacaatgcttgttaagttatcccggaaaacrtaaggccatacaggtgtggcagactaattaaattcaccatgctctttgggctgtgtgactgctaccaaaatgtcctaccctacctcacatattcccttgttaggtagagaaggctggacgatgctacaactgcttctccgccaggcctcccaacgccctcgctgggcagagtcccatgtgactgttttcactgctagaaaaattaacttgcataatgaccaggaagtaaagataaactcaaggatgagagaaaacctcccacctcagaggctccacctcactggggtgaacaagcactgaccttctatcatcctataaggaaaacaagaagaagagatgyttacttgaattactacataggctccctgcctacatccacatcttgaaaattctgagctgtgaagctctygtggttggctcctgggaacttgagattcccagtgatattccaatgctgaaacagcccagcaaggtgatgcaggtaagcacgcttgtaggatgtaacaatgtgaaacctcagcacattgtggttatgtttcaaagcacgaggtgacggaagcaagagcgagtttacatgggcttgtgatttcctttgacaagatacacgcactcattccttcaacctaagcaaaatttccaggactacaacagatttgaaactcaggtggacgaaaaaaaccatctgtgaatgggataacatacgaaatcatcaaaggtaattgttttaaaaacgtgactcaagatggcacagaacagcgtccacagatgtattcttggttacttaaaaacacaatttaaagtaattagcttaatgttgatgtaattctaragatcgataaataaacctaaaaatcttaatttgatattgaatcgccccaaattaaacaacatattttcaaaccactaaatattgattcatttgtaagatgaggcctttcaatgcaactatttgacctgaacgcaaacaggaaagggttgacacattttctctgtgaagggccagatagttaagtaccttcatcttcgggccacgtatcgtctctggcacacagccttctttggattttttgttcatttttgttttttttaacgggtcataaataaaaggctactggctggagttagcctttgggccataattggttcattcctaccttttcataatctcagttattgatcaggtgatttttcaaactgtgaagggtctacacgttcamcctcttccttgtaagttaatgagttagctaccaagttttgaggaagctagcagaaaacaggagacccaggatcagatayagaggacttcgttactcatggcasagcaaacagcatgagctttatttctgcactgattcccattgccctggcccctagtcmcacagggaggatgtggaacagcccggtagatgccgtgctcatrgtacgtttcagtcatggctgargagccccaagcttasaaaccccaacctttatcaagcaaatctgccaaaccgttgtcctggaaggaggcactgtctttattatactggaaagaaagccatcctgtcctctgctcctgagggagacactatctgtaccttgcaagtttctttgctagacaacgttccttggaaagatggcctgaaaccaaagctgccagcacttctgttcccaagacatgtgaaaacacaagagacccgaggatcactgtgtccaaccaatgacagctaggagaaaatgcaaaaactagcattaccttaatcacaggggtctttttctatgaaccaatcaagcagatttatgtatttttttcagtgccgtaaaaaaaatttgatgattttgaggcttaacatcaaataccagtgagatcamaagttagatatgacatcatacacatcatttctgctgaaaaagtacctttagttaaaaacagaaaccaatttgtaaatgtgaattaaatgcatactccacaaaaaaatacctggtgaaagtaaaaaaaaaaaaaaaaaaaaaaaaacttccttatgtatagatatgtttcctgacagatgtaaatgaaaactaatacggtgacatttttcaaattagccactggaaaactgtgtgtgtgtgttttcaaacagcccgagcaattttcagttatgtcggcctcggaaagtatttatgaaaaggataataaataattaattctactggccagaagctgcaactcctttctgcttcgacaatatacattgaaatgctgtttaaattagaggagcaaattgattcaaaaggcttccattagtgagctggcaaacaggtttgaagttggctaataaattttagataaagatagagcttttgatgaggatggcaatgccggactgctgatctccgagtcaccagtttgttaaatcggtggctgaagtcttgatttcgctccctgtgtcataactcactgtgttaaacaatatgtcacagggcagcacgagcacagtcaaaccagaatggctgctgcaggagccatcagcatgactgtgtggcagctgctcacagagcagggactaacatgggaaccagrctagcttttgcgtccctttctgagtctccagtctatccgggtttgcagaacattaatcaaggttaattaggcccacctgtgacataaaaatttctacctatgctatgtcttgcagcataaagtcacgtctgacatatctattaagaaagattcttaatcaaaatcaagaaactacgcatgaagctcttaattccacttggatatacatactttagctggcttcaagctgctcctctgggttgtggaatattacacagctctgtaaaggaatgatttaaagctgtacatactagcctgaaagggcacacactgtacactacctggggatggtggagtatgtgtccacttatttcagaaaatgagaacaaaatcttatatatgtgtacatctatattaacatgaaggaggatgtacaagaagtacaaaatactaatcatggttgcctcagagggatagaattagatgaaggaatagaaagggtttttttaatgcctcctttagacagctctataattttaaaaaattattcaaataatgtataataatgttcttttataattaaaaaaatctaaaaccaagaaataaacaacatgaaggcttatgtgacttgcagaaaattataaaatggggaagtcatttatttgcttagcttatttctacctggccagtttggggaagcctgtggagaactgatcaatctgtctttctgtccatccactcttccacgtatttaaccaagaaaccagacctaggaaatggtgggtgaagagtaaacagctttagaatccaccaggcctggagagaaattctgcctctacccacttgcaacctatgcagctttggaccatgctctcgatgtcttccaagaataaaataattgtaagagctacagcaaatgcaggtagtgactctacaatttcatccacaaaggttagctcttttcctgtgcacaccaggatctcagtatggctaccctgagcagaataatctacacttggccaagatggcaacccaggatgataaaagcaaaacacattgcagagatctgattattaaggaattcaaatttacactttctcaaatttgtactacttaccaatggggaaaaatagaatgctactttttttttaaggaatactatattttcccttttatttgtagccacttttcaaatggagcctttgtgaagtacttccagccttggtcccaccatgggaaaggtggaattcatagaggaaaatcgtggagcaagccagacacggcggctcacgcctgtaatcctagcactttgggatgacaaggcaggcagatcgcttgagtcaaggggttcgagatgagcctgggcaacatggcaaaaccctgtctctactaaaagtacaaaaacttagccaggcgtgggggcacgcacctatagtcccagctactcaggaggctgaggtgggaggatcacttgagcctggaaagtcaaggctgcagtgacttgagattgcaccatggcactcctgggaggctgaagaaggagaatcacttgaacccggcaggcagagatgagcctgggcaatgagagtgagaccctgcctcacaatcaatcaatcaatcaatcaatcaatcaggtggaacagatactatccctcactacaagtggacaagtggatctgaagcagtgtagggagcaggatgaggacctcacaggcaggtctcttaaaagacagtgtcagatgtcctgcagctcatgtctcaggcttggtttccatgcctggatttcgctgccaaggactgagccttcctcaggggctcattcccctcgagtcctgggctgaccccagcaagagggaaggacagatacaatgcattccaatcagatggccttcctttaagaacactcatgaaagctactgacactttacactgactttcacattttaatagactacaaaataaaatatccaaattgtgcaaatgcagaaaatgaagcgaaaagtcagagtgattcatttttatttcttaattataaaacaagaaaacatgcaattaatatccgtgtgaccacattaagcactccacacataaatgaagcagaaagaacaactaaaaagtatttctcccctttcttagatacaaaaattacgtgtgtgtgggtacatgtgtgtatgtgtctatgtgtattagttcattttcacactgttgaaaaagacatacccaagacatggaagaaaaagagatttaattggacttacagttccacatggctgaggaggcctcagaatcatggcaggaggcaaaggcacttcttacatgctggtggcaagagaaaatgaggaagaagcaaaagcaaaaccctctgataaacccatcagatcttgtgagacttattcactatcatgagaatagcatgggaaagactggggcccatgattcagttacctcaccttgggtccctcccacaacacatgggaattctgggagatgcaattcaagttgagatttggatggggacacagccaaaccatatcactatgagagagagggggagagagggagacagagagagagagagagagagaatagaagaatagaacttgcatttatcaagcacttattacataggaggcgatgttggaagcgatgagtttagctaagttaacttggttcattccatacaacccaaggtagtggatactcattatttcttccatttgatgaggaatctgaggttgagaaaaataaaaaagctcacctacatccctacaggtagtcagcacagagccaagactagactcaagcaggctagttccagagagtcttatggtcaccctatgctatcctgccttcagagggaagggacaaataagaagaacaaaggcagacgtggagatgatagtaggggttgccaagctttctggaaaggagcagagagtattttaggctttatgggccatayagtctccatcccaactactcaactttgctggcatagtgcaaaagtagccacagatagcttataaatgaaggtgtgtagggctgtgttccaataaaactacttcagatctctctggaayttcaataaaagtttttaaaatttagttatgaacactgaaatttgaatttcatacaatttttacatgtaataaaacattattctattggttttttcccccaaacaattacaaatgtaaaaaccattcttagctctcgggctgtacaaaaacatgacaggccacatctgaccttcaaaccacagtgtgtagacccttcatatcagagacagtttgatgcaggggaaattgtttcacctttagtgtgagacaggtctggtgttcagcccatgctctgcccctgtgaaagagctctgcaaccctgggcaagttcttcaacagctctacacctcaattcccacatctgtaaaatagggattaacacccacttcatcaatgtgttttgaggattaaatgaaactggatgtatattaggccaagcattgtactggatacaggatagacaatttattaaggagtctatttacttgacaaataacttactgagtcctgttctgtgctagaaactattttaggatgaagacacagctgtgaaaaaaaaaagctgatacaactttgtgccctcatggagctgacaaaaaaagatattcgtgttttttgttgtttttttttttttgacatggagtttcgctcttgttgcccaggctggagtgcaacggcacaatctcagctgactgcaacctccgcctcccagactcaagcaattctcctgcctcagcctcccaagtagctgggattacaggcatgcaccaccatgcccggctaattttgtatttttagtagagacggggtttctccatgttggtcaggctggtctcgaactcctgacctcatgatccacctgcctcagcctcccaaagtgctgggattacaggcgtgtgccaccacgcctgcccgttccaagatatttctaaatatgaaagcaacccaacttttcatcatgattcttagtccatccaggctgctataacaacatacattcaacagaaattaatttcttggctgggtgaggtggcttatgcctgtaattccagcattttgggaggccaaggtgggcctcagggtcaggagttcaagaccagcctggcctacatgatgaaaccccgtttctaccaaaaatacaaaaattagctaggcatggtgccatgcacctgtaatcccagcaacttgggaggctgaagaaggagaatcacttgaacccggcaggcagaggttggagtgagctgagatcgtgccactgcactccaacctggacgacggagtgagatttctgtctgaaaaaaaaaaaaaaaagaaagaaagaaagaaagggaagggaagggaggggaggggaggaaaggnnnnnnnnnnnnnnnnnnnnnnnnnnnnnnnnnnnnnnnnnnnnngaggggaggggaaaaagaaaaagaaaggaaaggagaaaaagaaaaagaaaggaaagaaacaaagatactgactgatttcttacagttctagaggctgggaagtccaagatcatggcaccagcagatctggcgtctaatgagggctccatctctacttcctgtatgtgctttcttgctgtgtcctcacatggcagaaggcagcaaacaagttcccatgcgcccgttttgtgaatgtaggggttatcaacaaacattgcagccataccacatgtatagaccctgcccgttgaagaatgagtcaagaaattgggtgggtgttctgtcatcgatcaactcttgcttatcacccctctgcagtgctgcaagtaggaatctcatatacgtgatggaagtgatttgtgctttcagctgagagtagcactgtatccattccaaagtttcagttagcctcagtccctgatgatctgcaggaatttctccttctctcttaaaaaagaaggaacatgatatgccacttgcaagattaggatattytgtttaaaaagaggggataatttaagcagggctggcggtgggrgcggggagacaatggaaaaggctgacatctcctgagcatggctcaagaaggcataattcttccgcatgtataagaataaaacctcttaactcatctcccaacacactgatgtggtggcccaaagtaggctttcaggacagtcaccaggagaaatgttatcttgtgggctataactcaccttctcccaagtgggtccctggggccctctgtggtgatgagcaaattcatgccaaatgtcacttcgtaatgaccaagactcaagaagtgatcaccgttacaatattcagatacacttagggcaggtggccagaaacaaaccatccagagataaatgaacattttgcgctccacagcaaaaaaaaaaaaaaaaaaaaaaaaaaaagatttcacagccaaacacatatttctttgttgcattaagggaaaagtcgtgagatggcaagcaggctgtatttttaaaggatgaaatacagcaaggctgcttccacactggccagcctgagaagcacactggtgaatccatcccaaggcagagacttctagagcctgagagttggcttcattggaggcaggtgtactggggaaaactgatatcctttctacttactccaggtaagtggcagataaatctctgggaagttctggctcaggcattcttctcatcagtaattacaaacctaaaaattacgatctacatttgagtggaacaaaatggactggtggcacttctttcttttctttctctctctctctctctgttgacagccccatcacaaagtctctgcaaagctatgataacctcacggtaagtaacaaatcaactgcagccagcaagggttgattaagaggcgtttcatcactgcatggtgttaatgagcatttgctgttcttacctgtcctgcacttatatccccttctccccattcacctttgggcaacccctcttctctgtgcacttcaggggagccggaccccacatcctgaattaaggggtgagcacatggccctggatggaccaatcggagatggcctcatgactcaggtctgtccaatatgcatgaagccctgggcactgattggaactttgaggaaagagaatcactgttgtcctggtcttgctgagaggacacagtgtatttatttctttgagaggaagtctcgctctgaagtgcagaggtgcaatcttggctcactgcaacctccatctcctgggttcaagtgattctcctgcctcagcctctcgagtagctgagattacaggcacgcaccatgtttcccccagcttctggcttgctacactrtggaatggaagacggatgcccaagaagaccaatgtaaggaaagcagagccaagggatggagacagagcatgccctgaaaaaataaggcaagcccatgagagttgagcagggctaaaaactgttttgtctctccttgttgtttgatagtgtttcaaagccctcagggaatgctgcaaatagcttctcaggctatgagaatttcagctcctacttttatgatcaacagagtaagggcatctaagaatgactttttctcaggctgtcacctccccacagcccagatgggcctatatttaaagatccgagtcttagcagtccaggggctatctgtcatcacagaccatctgtgggaccttaggtagggcaggtctgtaagtctaaatatcccctcctcctgagttcctgtcctgtcccctttgcctgaccttctccaactgttctcattagattatacttcatggaaaggggcatatatgccttatatgctggatggtaagctggggacaggggcctgtcatctctggtgtccacaggaagtcaactgaatggctgcatctgcccccattatcatctctgaaacctcagcataaggactagggtttgccatatagctggttctgaataaaatttactgaataaataaattaataaagagattgctccaaacagactgaaggtcccttgagagcaaatgtagacttctgtaaatctgatcttctaacaggaagatcagaatagcagaatactttgtatctaccagagattctctgtatctaacagaatgctctgtatctaacagagatacactgtatctaacagagaccgaaatatatttgttgaatgaagacagatgccccattagcagtaaaaagtaattttaaatccacttacaaccaactggtactatttgtaattcaccctggataggaggatgtatatttccctctttccttcttttttttttttttttttttttttttttgacagagtttcattcactctttttgcccaggctggagcagagcgcaatggcatgctctcaactcactgcaacctccgcttcccaggttcaagcgattctttcttgctttcttaaagccctactcagatataatgaggccttggcctgtactaggtcttccaatttgcattattgatctaaaatttaacttacacagtcaatttcttaatgcaagttatcagaattggtggagaaaaatgtgaattacaactgtgattcgagaacccaccacattataactatatatatatatatatatatatatatatatatatatatatatacatagatagatagatagacagacacacacacacacatggcaaatgggcccacatacaacatgttttaraaattgtgatattgcaagtggagcctcaagctgagatctgagattgttcttccatagtctccctgattcccaaacacgtagttgcaatcagactttttttcctaaggttaaaaggacaaatgcttgcaggtatatatgcaaaaatacatacacagtcaatcacagatgaaatacaaaactaaaaaaaaatctgcagaagagaaatggaatttgagtggctttctttttagtcttttctttttatacagctatgataccttttacaaaatatttatttatttatttatttatttatttatttatttttagagacagggtcttgctctgtcgcctaggctagaatgcagtggtgcaatcatagcttaccatacattaaaagtatcctcttacctaattttatatgtatgtatgtatgtatgtatgtatgtatgtatgtatgtatctatctatctaccttaccatacattaaaatcttacatttctacacgtgcaggactagaatgaacacacataaagcatgataccaatctgcttttttggccaccatataaacattctatgctaaaatgtcaagttgtttcattttacttaaaaaatgtgaatgtgaaatgatttaaacattcaaaaaaaaacttcgaatatcaataatttcacttaaagcttcacatcatatttgattaaaaccaaatatttatgaatcaataaaaatttcatactttcattattacttgtaatttatatttaaattttaatcaataacttttttttttttttttttttgagatggagtcttactctgtttcccaagctggagtgcagtggtgtgatctcgrctcactgcaacctccacctcccgggttcgagtgattctcctgcctcagcctccccaatagctgggattacaggcacgccaccacacccagctaatttttgtatgtttgstacagacggggtttcaccatgttgcccaggctaggttcaaactcctgacctcaagtgatccacctgcctcagcctcccaaagggcagagataactaatttttttttttagatggagtatagctttgtcacccaggctggagtgcagtggtgcaatctcggctcactgcaacctccacctcccaggttcaagtgattctcctgcctcagcctcccaagtaggtgggattacaggcacctgccaccatgcccagctaatttcttttgtatttttagtggagacagggttttaccatgttggccaggctggtctcaaactcctggcctcaagtgatctgcccgccttggcctcccaaagtgctgggattacaggcctgagcctgtaatgtaaatgagccttacatttttgtgaatttatctggcttcgatctttcaggctgctgacctttggatggggtctttgtgggaacttgtttgttagtgatgttgttgttttctgtttgtttctcttttaacaatcaggcccctcttcccagtaacactgctgtagtttgctgggggtctactccagaccctgttcacctgggtccctcccacaccaggaggtgtcacctgtggaggctgcagcacagcaaggatggctgccygctccttcctctgggagtctctgtcctcaagaggcatcgagctgattccagcagaaacgctcctgtgtaagttctctggcaacccctgctgggaggtctcacccagtcagaaggcacgggatctaggattcatttaacgaagcacttagtttacatttctgtaaactgcataggattttatcctatgcagtttagatcatcataaaataactcaattgttaaatattttaagttttttaaaagtctataaataatataagcataaacatcactgtacataaatttgtggatatatctttaaatattcctttacaatatttttctagatatgaaattcctaggtaaaaaaaaagtttataaaacttttgatagagatctccaaattatatctcagaactatgaaaatcaattgttcttcccatccacagtatattagaatgcccacttctatacttctcaaccttgtgtattaatagtttaaacctaagttaattttacatttataaaaatggggtcgaacatggtggctcatgcctgtaatcccagcactttgsgaagccaaggtgggtggatcacttgagcccaggagttcaaaaccagcctggccaacatggtgaaactccatctctacaaaaattagctgggcatagtggcgtgtgcctgtagtcccagctagtcggcagactgaggcaggagaattgcttgaacccgggaggcagaggttgcaktcagccgagattgtgccactgcactccaacctgggtgacagagcaagactctgtctcaaaaataaatataaataaaaataaaatggaatacagtctctcttctaaattgtgtcttctctgctaataactttaaacatttttcaaatatcccttggtcttttgtatcactttttagagttttgccaattgtcccattatttgtttgttttatttgagcttggtgatttgaaagagctgtttacttattaagcagatgaactatatgaacagacagttttttaaaactctatttctamctcaaacacatacttacagaactaattcaaaatggtgcttcttttattaacgtggtgctaaattactttatgagttcttaaagattcttatttttggcacgtctgaggtaaggaatgagaagttctctgtttccatatgcgagcactagtaacactgtttgcaggccaaacacatgtttaaagcaggcagggaagtgaactctgtaaagtggagatttgtggagtgtgataatgaggcaagtcgttatgttctaactggtcttaactgttccataaatgtttcttttaccctgtaaactttaaggtcaagataatatgaggagtacttaaagtaaagaaaagccatgtgggccttggctagggaatatgcccttttttttttttttttttttttttggagggaggaatctggaatactctttaactgtcgaacgaacacataaaagtacattttcttctctatcatttttgccaaactcagaataaaaacaactgggctgcatcattcaccttctaggctgttcctaggaattccatggaactgtcaaggcctccaaaagggtttgttttgttttttaaagcagagccctggcagacacaccataaacttagcacagattacccctcgtagcatccgagtgggaatctagttttccaaaggaaaagatcatcgctgaaggcattttagttttcacaccaatgcaatatgttaataccaaaaaagaacatgttggcattaaatcttccagtgaaactacattcagtgtatatagcctatttttaaatccctttttagtcccaccaaacggagagcaaacaatatacggtagaatttgctggtacgttaaataaacagtggaatttttttgttattaatgctatgatatgnnnnnnnnnnnnnnnnnnnnnnnnnnnnnnnnnnnnnnnnnnnnnntgatttttaaatcttccttcaaacttcattaggaaatgtgcaattaatggagccatgtctccgaaataaaatatttttaattatagggagaatattttaataaatgagcagctcagaagtcataattgtcacacaattaacagattttcctacatcatacttacatacagtatgagctgcatttaaatatagttgtttttctgggaaacaaagtttgtgagattttatatatatagtctctgatgttttttaggagaaataaaaaaatattggaaacatactcagttcctgtttctagaaagaaaagaaaatcctatgcaagagagtggctatttgtcccacgtcacataaatgagatagtaccagaatctaagtcttagaaggctaagagttttgaaagttatcaaatcacttttccattcaaagcagcagagcatgagtgataatcgtttcaaatccttccaaaagaataaagaatctgggatctaatttttcttttttttaagcctcccaatgcagaaggaatggagatggaaaaaaccgctgcggtagacatcagattccattccttggttttaattgcgtggttgcagtggggaatgaggagagtaaacagcagtgcctcccacggagctccctgcaggttctccttgtaggagtgagattttgctggtgatttatattgtttgagasatacccaaagagtcttgtgtcactcaatccccagctccatccctggctcggaggagcctgcaccgcctcacgggagcctgtaactgtcaaatggcattccccgaatccatcaatactgtttgctgccaaataaataccctgctgctctacaggttgcaaatatttcaatcattgtgcagatctgcacaaacttggaaagaaaactcatgcaatctcawggccttatttccccttcctacataagagaaacatacatgcctaaaccttcactttccaaatgtttactagaagattagaaaaacaacagatgacaggcaatgtgtcagcctagaagaatcacaaaaatccttctttaaacaatctagtagccagatgaagaccccacgccacgagcctgtatgtggttaagaagttcatggggcgaccccattccttctgattgctgcgaaatgtaaaagacacggcctcaagtccaaagcctaatgtgccattaagagtagactgccttggcctcacctgaagcaaatgcatctagacctgtctgactctttgactcacagtgcaggagattagggattccctgtatggttgttcagtctgtacactgaacaactcagttggtcaacatttacatagactacgaaatgatagagacttctacaggtatgcaatcacagatgacagcttgtgtgattctaaaggggggcgtctgaggcaatctactaccattcaccaatgttctgctctactctctgttcatgtttctgtacatcaaccattcattcagtcattcaacaagtattcactaaatgcaaatgaaatgtcagtctcatccaatccttcaaccaccttatttggcagacactattcttcccattagtcccatttagcaaaggacagtttgctaatgaccctctcctggcctcagttaattgaggccaggagagggtcattacattgcctaggagggtcacaaagctctgtcctccaagtctgagtccagtacatttctctcctggactgagctacccagtttattggagcaaaaatttcctttctcaccaatgaatttaagagtcaagttctcaagagaagctggaaggtagggtcagagagattacagtgagaagtgaagcggtagaggccagtaggtttagaaaccagtgctgtgggctgacagggrgtgacaatttccagctttggttctcctcatttaggagagacatgaagtctcatggtgtggtagacaggccacacaagactggaagtctgaagtgtgctcacttcatggagtaaatgtgtagccttgaatgagttacttttttttttttttttttttttttgagatggagtcttgctctgtcgcccaggatggagtacaatggtgcagtctaggctcactgcaacctctgcctcccrggttcgagtgattctcctgcctcagcctcctgagcagctgggactacaggcacatgccaccatgcccgactaatttatgtatttttaatagagatggggtttcaccatgttggccaggctggtctcaaaccccttaccttgtgatccacctacctcagcctctcaaagtgctgagattatgagattacaggcgcgagccactgtgcctggtcgtgatttactcctttctttgaactttaagttcttcatcaataaaatgagaataataagacctcataaagctactgggaggagtacatggatttataagaactagaaaaatgtctggctattgtggatgttcaataaatgatgggtattattattattgactgttcttgggatgtgttctacttgggtgtgtctctggcatctcaagtgtacgtattttcctaagtggggtgtgtgtgtgaaggaagaagatgcccttcttttgtgcctcgccttccccaaaagacatcaggagagtaaacatgccccctatagtgccaagagagaaaaatgtaaattcttttggataaattagcttttgcagctacctctctctttgctatgacttctgtttctcctctgcttaagcaacaaagagagaagtaaccgcaaacgctaatttatccagcggaatttacatttctctttctcggcaatatagtttcttagtgtcttccamgtttttaaatcctttaggtttattcattatgttcctttttcctgcttctaaaaggtagctgttcttgcccactgttttggaagtaagaaaacctaggagctgttctgtaagctcataaacatagtgtgccagaaactgactagaaggacagcagggggacgggggatctgaatgtgccaagacagttatacccttatgggttatggcaaacattaaatggtctagaaaatcagaggccttggaaaagacttgtaaaaataacaatgtgagaacttagcataaaggccaggaacatgaaaggggaagccatgggtggcacatgttggaaactgtgctggaaacacatcctgaactgctcttgcaaagtgaggcctcttaagcagttcctgcaatcctcctcccagccctccataccaggcagaccaagatgtgctcccagcctctgggcagacagtgggttttcaacaaccctgactggggctgaggtatgagaggtgcatatcagagccccaagagggctcttagaaagggaagttggccagatgtggtggttcacacctgtaatccgagcactttgggaagatgaggcaggcagatcgcttgaacttgcgagttcgagaccagcctgggcaacagagtgaaaccccatctctaccaaaaaatataaaaattagccaggcatggtggcagtggcatgcacccgggtgctcaggaggctgtggtcccagctacttgggaggctgaggtgggaggatcacttgagcctgggaggtagaggttgcagtgagctgagattgctccattgcatactagcctgggccacagagtgagggccctgtgtcaaacaaaaaaaaaaaaaaaaaaccaagaaagaaaagaaaaagaaaagtgatggaacagaggtggtgaacctctaagcaaaaagataacatggattttctggggtggggtggggtggggattaatgatcaagagaagaattcagctgggtgtggtggctcacacctgtaatcccaacattttgggaggccgaggtgggaggattgcttgagcccaggagttcgagactagccctggcaacataatgagacctgccctccaaccctgccaccaatctctacaaatagtttcaaaaaaaatttagccgagcttggtggtgaatacctgtagtcccacctaccaggcaggaggatcgcttgagcctgggaggttaagactgcagtgagccatgatcacgccactgcactctagcctgagtgacagaacaactcattgtctcagaaaaaaaaaagaagaattcttcacgaaagacattaaaaaagaccatcacacagagacctctcaaaagttatgctagctaagccactacaccagattttctgagtaagcagctatgcgatgagcttcccggttgcactcaatttgtaaggcaaaatgaaatgcctgttgagttgtaccaggggaatgcgaggctggaggtgggaagtgtatgccgaaagcatgtacgtaagcttaccaccttacatttttctttcccaagtcaccaggacatagctcctacaattaatctcttgggttttatttagtaaattccattttagttgaaagtcatgttgtttatgctgctctaagactctttaaaactaaattgaaggtttatgttagtaaagttaaatatcttatttctaatatcctaaatatatttacgatatctttggaacacccatttgaatcaaccattaaaccaatactgtttgaacaggtttgtgaaatcatggcattcatgggtcatgagaagacggtcaaagcacaaaagtgtgacacttctgcagatactggaacacagtgatgacttccatcatccagttctgccacttactaacccagtgatcttgagcagggtacctaactcctttgcacctcagtttcagctataaagcgaacatcataataatgtctattcacagggtttctgtaaaggctgaaagtcgaagcacatgcaaaacactttgtgcatggactggtaaaataagagttaatatgtattagatatggttataattattatcattactattattaataaattactggcttcagacatgctaagtgttatatgatggaaagagtacttataactttagaagcaggaccttaagtaaattacttaatccatctgaaccccaattccctctcttcagtgatatagggagaataccaaaaatctttcaaaaattaaaagacacaaggaagtagatgccaaattcatctttactttcttgcaaaacagagctggaaaatttgaacaattgttccgatctaaacagagggtatggtcccacatttataaagggcctacgtaaatagatgatattactgccactgtttgcgtttctatcagcccctatgctgaataatcaataatgaatgttgtttaaacaaatggtgtaattttgcaatcctgtgttgttcctaaaccgannnnnnnnnnnnnnnnnnnnctgtgttgttctaaaccgacctttactccttattgccatttgtaatgcatgcataattcaatgctgaagccgagggagaaataaggatgttggtctaagtggccctttttgggttgttttttgatgatttgctataatcctataaataatacaaagcttgtcactgtaaatatgtattgtgttatctagaggtatattcagtggctaaaacaataaaagctcgtctacgtctcctggcaatctcaaggcataattaatcgctggtaagatgtattctagaacgtgagagcccttaagtagaaggaaaaataaaggccattgtcaacacaaatgctaaaagaaatgcctaacgggcatagtcatttgccatctgggaaaagtgtttgctagtgtacttgtttggaaggcaagaaggatgattcaaaagggatttttgttcaggtggtgaagaagtgtgtgtgtctgtatgtatatacatacccacgtagtttttaataaattataaatcaagatgtttaccaagctaacttgtcaattttaactcatttctgttatttgtttacacacacctccatctgacaaatatatacaaaacaatgtatgtgtatgcacatatacatacatatgattttttttaaataaagcataaatcaggaggtgctcagagctagcttctgtccattctaacccatctgctatttgttcacttgcacacactcactgtgcaataaaccctttcaatgtgggagacaagtgcaagatgcccctctttccccaaagggcacctctgtgtgctccctcagatcatagctgatgacatgtcaatgaaacggtgcttgctctcatcccagagatcaaaatgagggcttaacctgcaatttactttacaagtcccatgacacttgccagatctgaagacttcattctaatcttccctgttgaaaaaataatcaaatactccaacaaagatgtattgacaactcttaattaaccatgctaatggagggaagagatagcatggataaatgaaatccacacataacccaaaaccttccttccccattaatttccaacttcttgactaaaccttactgagataagtgggtggggagtagggagaggctgactaatcctttaacgatagaattacttgatgtctacatctgtactatgccaatcagctgttggacaaggtaacaagcaaggaagtggccaaggacaccatgtgttcccaaagcatcggggttcagcggtaatgtttttgaatcttctcgggtgtaagtaaatatatttcagacagcttttagaatgaagttagctagaagarttttgcagcaatagaagctgatttgatgtagaccttcaggtttcttatctatttattggtgctgctcagttggatgggaaagagaggagaagctgagagacgcctggcacctgtacagagtgaaacaggcaatgctgtgtaacgagcagttgacagcaatgaataagggttgcagaaatggcaaaagagggcaccaaattaaccaaagcctagggaagatgacgaagccagagtattcattaagggaccagatgaactagcatttattgagcaccttctgtttgccagggcatataagaacatactgtgatgaggcaccatgaaatacgacctttgaacagaaactgggtaaaaaacaaaagtaggcttcctcctcctcctaacagcatctagtgcagccacattagatgggaagagccagaactaggcaagttattccactccctgatcctcagctgcctcggttgccatctctgcacctgcagggtgaacacaccccaatagcggtaacgtaagcatacccttagaatgatcctgtgtgggagatgcacctgaatgtgtggtccgggctggggaatccaggagtgaccaacccagagatttgtcccttatatataacagacatctgtgccccatgcctgtcccgtggaacacaggccaaacagrggattgaggtcctgagtttggagttaaatgaagaytgccaggtagaggttgttagggsgagggtgttaagtgaaggtgtgatataaaccacatgacatttgcaggtggttatggttttcctgcccagcccaccgccaccactggactgtagggaggtggatatcctgtccagcctactgccactggaccatttctgtatgtaaggtgggcagttgtactatccagcccgccatcactggactctctcccctatatgtaacctcctaataaaaccccatgtctatctgttggctctgagtgtcttcttcagctcttgaacctggtgcctttcctattgaggttaataggggttcagcatgacagcacctccacctcccatggcacagcatatgtacccaataagcagtccttacaataccaatagtttctatctgttgggcactgccaattagccaggcatgtcaaatggaagatctcacttaatcttgccaaaaaaaaaatgttgttcgttgttgttccttctattacagaggaaaaaacaaaggcagatggaggttacattatttgcctaaagttacacagctagaaaggagcagagttaagaatcaaaccccggccatccagctccagaaccgagcttgtgaccctggcatgggtatttccggagctctcgctaatgtgccagatagacgttgtgctaaagaaatgatctgtgtgtgttttctcatttaatatccatacagccccctaaattggagattactactgttacacaaatgaggaaactgatcttggagagggccagtcagctgccaaggtcacagagccagggagtgggggtggcttgcccaaggccaggtctgtccctccaggtgaaggtaatgattaagaacacaggtctggagtgggtttgaatcactgtgtgttcagccgctcactggggacctggcctcagccctctgaytactgcagggctttattactttctgagttctctttgctatctcactcgccctttcctcccatttctccttctggtgccccttctccycttccaggcccccagcccccagcccccaccccacagccatctctgtattaaatgtttgtggaatgttcaccgttcaaaagccacgttctagtttgaggctttcaattcttgggaagaaaggggccatataaatacaaaaaatcaagtccgaaatgttgttgaaatgatcattttggtccacctaagtttatacaaaaacattttccatgctctgatctccccacttgcactgttgggtagcccaagttccagatgaacggccttctcacctgcatgctgaaaccagccgaggctgctgccacattaaaaactcagcccaggctgctcctgaaaatgtttctgccctcagagccacgtactaaaaattaaggggattaagggaactctagatttacatttaaaataaaggagaaactcattggagaggctaatgcggcgtgcactggaggtagctactatcactaagcattaagataaacaatacgagtggcattctggyccacgcctggcaaagtgcaggagtccctggaggaaaaggaatgagagtgcatcagcgacctcgtgaggcagtgcagctttgcattaatgcctgcagctctggaggcggacttcctgggttcacattcacaacacctccaccgccaccactccatgagcttgggaaagacatttaaccattccatgccttgtcatctataaaacggggcatgacgccagacacggtggctcacgcctgtaatctcagcactttgggaggtcgaggtgggaggatcacaaggtcaggagatcaagaccagtctggcctggtgaaactccatctctactaaaagtacaaaaaaattagctgggcatggtggcacgtgcctgtagtcccagctgctccggaggctgaggcaggagaatcacctgagcccaggaggtgaagcttgcagtgagccaagatcgtgccagcctggtgatggagcaagactctgcctcaaaaaaaaaaaaaaaaaaaaaggccggggggcataagtacttcctcagagggttgtcctgaggactgaatgatgtcatttaattcacattgatatggtttgaatctgtgtccccaccaaatttcgtgtcaaatttatttatttattttttgaaatggggtctcgctctgttacacaggctggagtacagtggtgcgatctcacctcactgcaacctccacctcccgggttcaagcaattctcctgcctcagcctcctgagtagctgtgactacaggtatgtgccgccacgcctggctacatttttgtattttagtagagatgaggtttcaccgtattgtgcaggatggtctcaaacgactgagctcaagcaatccacctgcctcggcctcccaaagtgctgggattacagagtgtgccaccgcacccagccttcatgtccaaatgtaatccctaacgttggaggtggggcctggtggaaggtgattagatcatgcggacagatttctcatgcatggtttagcacgtatgctgtgtggtgagttggctctcctgagatctggttgttgaaaagtgttttgcacctgcccccttgctccctctcttgctcctgtttgcaccatgtgagatgctttccttcccctttgccttccaccatgattgtaagtttcctgaggcctccccagaagccaagcagatgctagcatcatgcttcctgtacagcctgtggaactgtgagccaattaaaggtgtcttttaaataaattacccagtctcaggtatttctttatagcagtgcaagaatgaactaatacacacatagaggatggagcactctgcccagctcatgccaacactccatcaatgttagtacttagcatcagcattatgttgcatagctgatgattcatatacacattactccctgcaatcaatgcccaagccttgcaagatatgtgcttcaatccccactttacagagggctatggatcgccaaggctccacctgcagttgggttctacataagtgtcctctttcctcacatcttcagtaaagtatgagacctccatcaatgcctgcttgggtgaggagcacaggtgggtgaaaggtaagggaacaagtggaactccatatccaaggtaggcacagtgtggaccagaagagcatccctaggacagtgaggtgatccacggactgacctgccccaaggccagagacgcaggagtggaaagtcacatggaaccatgagcttttataaggggcagggggcaggtgttgggaaattgcagaactagtgtttgagcagatgcaacagatccgaaggaaatagagattgcagttgaaatctgggtccaactggccctatcagctgcattcatgtgttacctccctggtcagctgtaccctccttcaggattaggactgcatccttaccaatgctgagtcctctgggatccccagaggcatcttttgcacccatggcaaaaaaaagaaaggtgggcagcagcaatgagaaccatgtccactaggtgcaagtaataacgggtgcattgttcgctaaggacttaaaagtattaataaaagtgaccaaagtttaactgctttttatcatcaccatgcttggtgattccaaacaatgtcagtgaaaacagattcctcctgctggcaggggggcggccacacccatcacaccccctcttggcaccgccatgattttacacactgcactcaacaaatattctctgaagggctgaaaaaaagggggctggggaagggcagaaatcctgttgatttctgagcagcaaacacgtaaacataactgacattaagatatacaaaatacatctttcaaggaaagatgtgccattctttcttgtgtgaaataaaaacacctccccatgcaagattccaactgcacagactgatactgctatggtctgactggaaacaggacatcttgcattcttgtggctccgaaaatcactctggggtccaaggatttatttcctctctcgggagtcagggacagataataaatacccctcatcagctgatcaattgctcgcacttccaggcaagcacccakcactccccaccaaacacaccgccccacgccacctgaacraggttaaaagaacggactcatgactgatggtcggggggaactggcttcagaagaggaagttgaaaatattaagaaatcaacacgggcatttaaaagcaaagccttttccatgccacagaagacgttttgctattcatcttgttccctgactctgcttcaccaacttgatggaagatggtttaactgacataaaaaccagctatacatgaacagcrgtgattgatggaaccattccaaacatcagccaaaaatggcactgaaagatgccttgggcttcctgttaactgttttatgaggggaccaacaggtttcccccctcttctttaaagaatatattagcagtacaagtactttcaaaaacagggtagtgttataccaagagagaaacagaaggggaaaaaaaaggtaggaggtcttttgcatgttagtatatgtatgaagggagttaggacctggcaaactgggttatatgaggctttttccatacacagctctttggtttcacggtacatgatttaaataggttgtatttaattccatgtaataacaaactgtgccattaagtagttctcctgtacaaatgcaatgtttcaatggcaacagaaagaaaatccagcctttaaaaaatgcacagatgctccaaatgagccatgataaagaaaggggtggggagcgggatgatctgcaaaaaagaatgagggaaggcagatttgtaccacttgtgctaaagcgtggagccttaccattcagggagaatgagacgtttgcaaaatggcatcctagtctttgaatgcttcttaatatggaacggacgagaacagaggtggcaagagggttagaattccccctctttgttctcctttctggaatggagaggaccttttcctgcctttctttgctcttattttgaagaggttaattatgacctggaagcgcccaggcacttgggtctcagctattgtcgaggaagaatattgtctgcgctgtaccgcaagaactaacttaggaaacattcaaatttggaactgctttcagaagcctcaggaccgattccatgtggtggcattctatgggatgacaaatccccactccgttcccactacttgtctttgaagacatgcacattagtgaggcagaaaattcactcgactttaaaataaaataagctggttatttggcccatctagaatacattcgtatctcaacatttcaaatcaaaaggcccacttattcctgtcctcatcctggctctgaagccaagctcaaggtgctctcaattacatggtagatttctggcccaagttaatatgtatcaggacttctcaagcgtttgtacctttgacctagaaattctacttctggcaaatcaatcccatagaaataattttaaatgggaaaaatgctttagaaccaaagatgttcgtggccatggaaatgacgactgaaaagagttagtgacaacctaaaaatacagttagaaggagaatgatgaactaaaccgtggttcctctcattggtttactaacatgtccccattcaaagcactgttcaggaccgtctagaacaacctggaggcatgcttttaaaatgttaagagagaaaagaaactattatccatatgggataattaacaatgtgttaaaaatatacatatctctggaatatttgaattgcaggaggagaattaatttagagataacaagcaaatccatcacgagtacatatgccacaattgtaacaaaacaaaataaaacaaaatggcctgggcatttgaaactactgtaagaatatgtgccaaaatgctaagagtagatatatattggaggattttctttttcaatctttttttcaactttggagtattttcccttttttatgaatatgtccctattgtgtatgagaaatagctaattttaagaagaaacagaactccaagggggaaagaaaacacttttttttgctcctatgagaattcactggataagggctgtacatttcgggcccgcctacttcattccacaggaattagtaactgcaggtgcaagtgttgctactgctcgaaggctaagccctgataaggcctggggaggcccagagactaacaaatgggtttcttccaggactttgctgctgattgatcactgcacttaatcctttccagagatagttactcaaaaggaccaggaaaggtaaatttaccaacgcaggccaacgtgactaaaaatagaaccataaaaatcttggggagatgcaatgtggcaagaccatggtcttcattaaggcagggctgaaggtggaatcctattccagatacttcacagcttagatcttttgccaagcctctcacagtctcaaattccccatcatcagcaggagtcataacagattgcaaggaggtttaaatgaggcaatacatgaaatatgccataaacggcaatttatcagcatctatgatccctaacattaaacactgaccacttccttatgtgccagacacaaagctgagcacttcacatgtactgcttcacatactccgagaattattttatttaacccccatcgggaagagactattatcatctccttatcacccacagggatgctgaggttacgaggtatcaagggacctacccaccattgcacaggcagaamacaggagagccaagactgacacccccagcaggaggtgttccagccaccttggacaccttccaccacaggctgagccgcagtgaagggctttcagaggggcagtccacactggacatcaaacggtagagtggagattgggtcaaggacaggagcttcattatcttaaatgaattaatgcgggaagagaaaaccaactaccacatgttctcatttgtaagtggaaactgagcattgagtacacatgcacataaagaagggaacaataggccaggtgcggtggctcacgcctgtgatctcagcaccttgggaggccgaggcaggcagatcactcgaggtcaggagttcgtgaccagcctggccaacatggagaaacactgcctctacgcaaaatacaaaacttagccgggcatggtggtgcacacctgtagtcccagctactccggaggctgaggcacaagaatcgcttgaacccaggaggtggaggttgcagtgagccaagatggtgccactgcattccagcctggaagacagagtgagactctgtctcaaaaaaagaaggaaacaatagacactggggcctactggagggtagagggtggaaggagggagaggaccgaaaaagcacctattgggtaccatgcttctgacctgggtgacaaaagaatctgtataccaaacccccatgacatgtcatttacctatttaacagccctgcacgagtaccccagaaactaaagttttttaaaaaatgaaaattaataaaaattaaaagaaatcacagatgtttgcatatcacatcagttactgcagatatttcaaaatatcatttacactcaacactactcaaaagtataggtgttagtagatacactattacctcttgtgatttaatgtactatagaagaaacgtgtattactatagaacaataaaaatgttgatatttgtatttcaaaaacaaaacaaaggaataagggcttccaaactttaaaatgcaagagagcatcatgggatgacagtggaagaatggacctgggtgagaggaggctaggatggggagagggaagggaaggctcacatgtctctttttttgtttttggttttttttgagacagtctccctctgttgcccaggctggagtgcagtggtgcgatctcagttcactgcaacctccacctcccaggttcaagcaattctcatgcctcagcctcccaagtagctggaattacaggcgcacaccaccatacccagctaattttgttatttttagtagagatagggtttcaccatgttggcyaggctggtctcgaactcctgacctcaagtgatctgcctgcctcggcctcccaaagtgctaggattacaggcgtgagccactrtgcccggctggctttcatatctcttattctttctgcttccgctctctcctgtcccctattagccatgggttccagagaggagagaaggctcgggagagcaggggactcaggaggtcaccctgctaccctcacctttttaataaccctcctcaaaccctggttccacgtctccctcactcaaggatttatgtctcattttcaatggaatgttacatttggtcagaccacgaagaaaactcctcattataaactaggaaatgtgtggagagagaattatttacccaaggcagtgctcaatcagtgttgcccgaatatttatttagcccacacacggagaagttgtgttaatgtttgccaaagaatgtagctttataaagtaactgggtcaaaaaagacagcatatcattttacaaataactttaaaattgcttaagttaaatagctgggctctctcaggtttgtcttttcaaaaacgctgcagaaacaatatccagaattatgtctaataaaatacaggtattacaaagtggctgtttagcccattaaagaaaatggagagtgaaatctgaattatttctacccgaggcagaagcagacaaagttaccaaaattatgttaggccgacgtcgcaattcttcaagtctgcagggcggcaaggctaacagctcctgcaccaagactctattaggagagctgtatttttcagtcaacaatgacaggcattccatttctcagcctcaaatctagtgtagctatggggaattcacccaaaacatttgcttttgctttatcagtggcatttgtctgcctcaaaagccttgtgagggagagggctactacgtgacgctgccaggcaatgctgttggaggcagctgatttgatggacaagaaggggagcagtgaccacctgggtcactctgactccgccctctctgagccaagtgaatctgagcaatgatgtcataataatcatcaatagcaacagtggctgcgcgtgaggggcgtggtggttcacgcctgtaatcccaacactttgggaagcygaggtgggcagatcatttgagctgaggagttcaagaccagcctggacaacatgctgaaaccccatctctactaaaactacaaagaattagccaggcatggtagcacatgcctgtagtcccagccactcaggagcctaaggcaggagaattgcttgaacttccccagcttcaagaggaagagtctgcagtgagccgagatggcgccactgcactccagcctgggtgacaagagtaaaactccctctcaaaacaaacaaacaaaccaaaaaaacaaatagcaacagcaaccayaatcatcatcaccatcaaggctggaacaaggatgaggcaggcaggctctgatagcaacaggaggaagcagaccaaggagggagagaaaggaaggcagagaaggggaaaaaaaaacacaaatgataataatagatgctgacatttacggagcacttactatgtgctgggaaccatgctgacggcacaccgaatccactgaacaggtgggtaagtatcatgggtcaatatcattctcattttaatgttgacagtcacaagactttcatctgtacaatgggggtactgctggctcccaaggccagtgttggtggaatacagtgaatagaggtgagtaccgtgtgacaggaggctgcatcagtaagcaggggcagccagccaggtgaggaacatgcccactgagatggaggtcaggacgttgagagatccccaaattgcaagttgtcatcctgagacaagcgataccttgctggacactaattcattcttggagtctctccctctcrgccctttggcttcatgttctggagagaatgaccagagagacccatttactcaacgcttctcaatgagacagggatcttctaaagggcactgtcttatatagatccttgcacctgcaatacctgcctggcccagcctggccctcgcaggttcttgtgaaatatttgcttatgagtaagcaaatgcataacacgagacggctgctctggaatgacagttgcgaacacaggaggctgctgagacttccagagactgtagataaagaacaaagaccctgtgaagttcctccgggaaaccagatgtggcagtgtgctagggctgccctagcgtatcagcacaagctcaacagaaactgactctcacagttcaggagaccagaagtctgaaaccaaggtgttggcaggggtgactccttgtggaaaccgtgccaggtttctctcctcgtttctgggggctgcccatgaccgtggcatctcttggcttgtagacgcatcactccaatctctgcctctgacttcacagagccttctcctctgtgtcctctcctcctttttctgttttgtcttttggtgttattttttttttaagagatggggtcttgctatattgcccaggctggcaatgaactcctgggctcaagtgatgccccctccgcagcctcccgagtagctgggattgcaggcacacccaccactgtgccccctgctttcctcttctcatgaggataaccgtcattggatttagggcccactctaaagcctgaatgatttaaccttgagattcttagctaattacatctgcaaagaccctgtttccatataacgttacatctgtgattctgtgtgggtgtggattttggggagacgctattccacccactacccttacactgcaactcacccacactgacagcttcccttgcctgtgtctgtccaactggcttagaaccggagcatggcatcgtcaccatggactttgagaatgtataaagacaggtgcctggtcccattccctgtgagtcttgaggaaaaaagaaaagtgagcttcaaaaactagaagagccagcctggtgtggtggctcacatctataatcccggcattttgggaggttgagactggcggatcacctgaggtcaggagttcgagaccagcctggccaacaagtgaaaccctatctctactaaaaaatacaaaaactagccagacgtggtggcatgtgactgtagacccacctactcaggagactgagacaggagaattgcttgaacccaggaggcggaggttgcagtgagccaagatcgcgctgctgcactccagcctgtatgacaaagcgagaccctgtctcaaaaaaagaaaaaaagctagaagaaccaaatcactaatgcctaagcaagaacagaggggatagaggggcctgggaagcaaggcctgtaagatcccttgacaataacacaccagtcccatgagcaggaacacaaaacattatccctggacccagttctccatcagggtctcagcatgaatgaggctcttccttcctcacggggatgggaggaccaccctgctttctttgcccttcccaggaggaagggaacagcaccttccccatctctgccagcatctgtccatcaagagctggtcaacagcttagactcaggggatgccacagtccacattacagtgtcactgggccagggctgggagaagccgtgggagaaatgcagaatggggaggctgaggcaaagtcaggatgaaccaaaatgtaggtgagcaccagacacagtggccacctgaggaggaaacacacaacagctgagaatccacgggggatgcgtggccaggttagagcatcctggaatcaggcaggtacgaggagtccacgaagtggagaggtgatgcaaatctgcaggccttggggacaagagcacatcaaacccttgggggccgatgccttcagtattcctaattcctccatgttagaaaggtattttgggccaggtactgtaatcccagcactttgggaggccaaggtgggcagatcacctgaggtccggagttcgagaccagcctgaccaaaatggagaagccccatctctactaaaaatacaaaattagccgggtgtggtggcacatgtctgtaatcccagctactcgggaggctgcggcaggagaatcgcttgaacctgggaggtagagatcacggcragccaagatcacaccactgcactccagcctgggcaacaagagcgaaactccatctcaacaacaacaaaaaaagtaatttagcacatatactgcatattacaaaatacctttgcggggtttggggcaacatcctataacaatgacatttctatttcttcagtgaaaatatgattattcagcctggccaacatggtagagaaaccgcatctctacaaagacacaaaaattggctgggtatggtggcacatgcctggagtcccagctacttgggaggctacagcaggaagatcgcctgagcccgggaggtcgaggcttctctgagctgtgaacacactactgcactccagcctgggtgatgaagtgagaccttgcctcaaaaaaacaaacaaaacaaaatgaacattcacactagaaasgagaaacagggacgctaaagctgaagtcaaatttcaccaccaaataaatttgctataaatatacaataaatttgtttttgcttttcagatctctttgggttttggaataacaaaaaagggactgtacatggatatttccaagctggaaccgaggcactttctagacgaaggcagccttatccccaggaggtaaggtgtggaagtgagttgagggttgaggccagcaagactcagaccacagcctcctgctccaaacagccacatcacttaatctattttgtaaaccaggcttccctcaagggatctggtttaatgagagaatttgggagctacaaaaaagactgaaaattgttgttggacatcagatgctggcaaactttttttgtaaagggctaaatagtaaacaacttaggctttgtgagccaagaggcaaaaccgaggctattacagaggtatttacataacaggagagaaaaacaaatttctgcaaattttttattgatgaaattcaaaactttatgacactgaaatcagaattccatatcattttcctccttcaagaaataatattctcctctttattcttttttgcagatgattgaaaatgtaaraactrttctgagcctgcaggccatagccaaagaggtaccggctgtattttgtccatgggcaggagcttgtgactgctggtctaggtcattccaggtcaaccaggggcctctcccagagtgagaaccactggtgattccccagagtgggaccaagtgaaagcacttggctggatcagagggataggagcctggctgctcctaaaacaagacactacttgcctttgatgttcaagtcatttaagaaygcaattgcttcctactcaatttttcaaaaccaaaataacaaatacgatatgagccataacttagcaaaattacgtgttttaaacagtctctttcaaaaaacaatagattaaaaagtgcaatatttttaccccctcttaaattggaatcatggtatagcaggcaggatacaaacttctcatttccattacacattttcagtgccatcattaatctgaatgacatcaacaaaatgcccaatgcacataaatcagtcagactttgaatcattcctgcagcctctgaacatttaccatggagctcaataagccaggcaagaacacagatttttttttttttttttttttttgagacggagtctcactctgtcacccaggctggagtgcaatggcgtgatctcggctcactgcaacctccgcctcctgggttcaagtgattctcctgcctcagcctcctgagtagctgggattacaggcatgcaccaccacaccggctaayttttgtatttttagtagagatagsgtttcaccatattgatcaaggtggtcttcaactcctgacctcgtgatcctcccatctcggcctcccaaagtgctgggattacaggtgtgagccaccgggcccagccgtaggaacacagatattatcatcatgggacaagtcatccattcycagattccatgaccctctctggtgtccactgtggatttcagcacatgtttaactatgaaactctagtcacgctttttgatatacaggttcatggttactagtgtcttatcctgcttgagccaagaatatgcactaacacattagacaaaccttgaattaaaatgggcaacccaccatccaaatggggaaagatgattacagacaagttcgtacgagtaaactacttgaaggcaattcctgtgcttaaaatggccacgtgaaaggtgtccctgacatggaaaggacaaaccatgaaatgacccttgaagctcttaakgtgtctgtcaaaaaagcaaagccaactgtcaaactgaaaagccaaaatcatcacaaaaacacctattcttcagaggcctcaaatctcaaactatctcccaccatcctttgtaagtatgtataaggaggccaggaaactagcatttgctgagactttattctcagctttgtatgctttgcataaatgatgtcatagaacacattgacagtgagaaaactaacgtattaacattttaattaccttgccctatcacgagattagaaagattcagatatgagacatccaaagtctgtgatctgaacaccagagtcagaggctggcaacctatggcccacgggctgaatctggcccactgcctgttcctataaataaagttttattggaacacatccgtccatttatatattatctgtggctgctttcctgctgtaacaggagagttgagaagttgcaacagagaccataaagcccacaaagctaaaaatattgactatccagccctttagagaaaaaggccatgcccaggctcctgtgggtacctgctatgctacagcccctctgctgggggaaaccagcccactcacaggttcccagtgaggcaggatctctgggcagttccttagtaattggtggctctgtgacttccttcccccaatcaccttgaccatctagtctggacaatatgagcgcccatgacgtgaggacagccttgtaaacagggtggcctggctggaaagccttgtccaaaaggcacaacagtgactacactgaacccatcccatgcatccttttgagagttagaaggaggcaattgcaagccggctgcaaaagamaaaagacaccagagacttagaaaccagtgaagccacgctgaagatgcagacagagagctagagacaaggtcaggggcctctgttgcactccagacccggtccggaggcttttccatgcttaggggcaaggattgtcagggttctgctgtccctttctttaacctcctttatgattccccaagagcatcctgagtgcacctccactccctgccaccaggggtcagatgagccggcctggcaggcttgtttccctccaccagacaacagcaaggaccaagaytggcaaagtgacacatcctctccaaaagaagaacatgcagaacaaatcaaagaacacaaaccacgactgacaaacacagccacactcgattttaaagtactgagctgtttgaagaaaggaagcatggcaaggccccttcctactaataacagtaacaacaataatactaaatattttataataattttaaattcttaattatttatgatatttccctccattaacatcacgaacatcattacgtgtgtgtgtgtatttttctcattttaaaaccagcagatgagagtaaaggatttctttttcctytcccccacctctttacaggacctactgttaagttttcaagaccacccagaaagaaatttgaagttgggtttatatccttaatccctcagttagaaaaaaaagaaaagtgaagaaactgcatctccaagatcctgctatatcaacttcagttttttgaagttaaatttgatttttaaatcccttggctgatgagacctgtgtgggttttttttttgttgtttttttgttttgttttgttttgttttatcattgtacctctattttaaaaatagagacttgtggttctttttccaaaagcagtccaacagaaagtgaatggtggtcaatgcataataaaatgagagttaccttttgacttggaagaattattagcattttgatttgatgggttcttagctcttcaaattcaaaaataccttattcaagtctaggagttttgcaaatacttcggttctaaagattaccctttttcgatgctttgaaaactaaaagggcatatcagaatagaaatctggctgttgaataacttgtaagctctgcagagacgtacaaaaacatggccactttagccagcagtgtggcgaaagtctggggcccacactacacacacacatatgaacttctcatgaccctcaagtatattcacatgatatatcacaaataccataaagcagcattgtaataacagggaggaattgattttaaaaggcctacatcaaaatgaatagtcataaaagtataataacctagactggaaaatttagggattagagcattttgaacattatacctcaaatttataaaggctgtatattarcattcacaaaggtttttaaagatggaatagctatgtacacagtgaatttattctaaaatccagactcaaaaaaaaaaawgaatatgaactcctccccaccgtgttctggactaaaatcaataagttccctttaggtaattaaaatgctggtcccacgacctgccatcctattcccaggcttagaatgttaggaacactgtttctgctttgagaatggaagagagcaggttaccctgatgcctctggggccaaacacaggggatacattttcccagtagaagaaatcagccctgatcctcaagaagaagaacatattggcatattttagtgagackgaggcatactgcatcttggggtaaaaactgaatcatcaggccaggcacggtggctcacgcctgtaatcctagcactttgggaggccaagacaggcggatcaccaggtcaggagatctagaccatcctggctaacacggtgaaaccccatcyctactaaaactacaaaaaaattagmcaggtgtagtggcaggcgcctgtagtcccagctactcgggaggctgaggcagaagaatggcatgaacccgggaggcggagcttgcaatgagccgagatcgcgatagtgcactccagcctgggcaaaagagcaagaatccatctcaaaaaaaaaaaaaaaaaatttaatcatcaaaggaaaatgtttcaaattctagggtaagctgacatggtacacatatacagcgaaatacacccagggaggctgaaagtccaataggccaccacagcacgttaaaaatgtcctgttttacctatagtcaacaataataataaattatatatttaaaaatttgttaaaagggtaggtctcatgttaagtgtttttaccacaataaaatatttgtttaatgtcctctacrtggctattatgattggaaaaggcataccttgaacagagatgaataaatctgcatatctgtgaaatgtcagttcagcatgttgatcgtcagtaatcttttcagaacatttcagatatatgaaaatagcaccaatgtctgagtttgaacctgaactggtttcagctaaagtgatcatcttcagccaaaataatgggtatttctttcttggccttccttctacagacttctaaaagacagtggaagcactgaatatccttttagaaacaaacaattacaaattagctgggcatggtggcgcacgcctgtagtcycagcaacttgggaggctgaggcaggagaattgcttgaacccrggaggcagagattgcagttagccgaaatagcaccactgcactccagcccggtgacagagcgagactccatcttaaaaaaaaagaaaagaaaagaaaagaaagaaaaagaaaaacagctacagatattcattcctktttaatttcttgataaataatagaccagtaagaatcacataagaagcagtctacatttttcaaagagtttttacagatcccatttgatcttcaaaagggcctccattaggaaaaactaaattcaagtttaaaactatccattttatttctcccataaaaatatattcagcccctggagataatctccaaattcctcagattttaaaagttaatttttcttatcttgacccaaaatctgtagaaacaaggatttttcaccaacagtgagctcccttttcataaaatccttatctaccaagatttacctctgcaaacctctacagtccctggttgtgagcccctgatggaagaagctagcataaagaagttcacaactastggggagggaacgacctgacaagttgcaagcaagaaaggagtgaaaaactgagttaattgtacaagaatttgtgtatttataaatgcaggataaataagatcacgtagaaactctctttagacttccatccttactgctgtaattgaacgaacagacgaatgtgtttgaccgcaattgccctaatactatttttcccataaatacctgaaattcttcaattgtaagttttcctactctggcaattttaaggaaagtgattcttgaggctgtgggtgaaataccacattcattttttttaaaaaaataaggtatacttacttgtactttctaccattttatatatattctctgtttaaattgtgtagcccctaatagactgcaaagacaatgataaaaaggaacttgccttattcacaggtacatccttggaacttagtaaagggcttaacctccatagcaggcagtcaagacttactgaatgattaaataaaaacactgaattccatattgtgcaggaaaaaaaaatcaagattagacctcagaaaaaattgacatgtctagtagaacttactatctgggcaaacttgaagagaagtgcaatgggaaggcctcctcaaaaaagacattgaaatcaagatgggacccgttcctaccctggatttctctgaatcagctactccttaagttcgtattttgttccactcagccaatggcaattccaggagagaggcaattgayaayaattatgttttctgccttctcttgggttatgaatttatcatgatgcaaaagtcgagctactccgatgccacgttaacaatgawaaacaccataaagacaaaaagaaactgaatttaagcatttggattctgcagaggagtttattgaacagattaaytaaggaaaggcaaagctacacaattatggaaaacaggtagcaacactcaggctgactattttcgatggccacctgagagcggatttccaatgccctcatttctgtaggtacattatcctgtgttttattgttagtcacagctgcaagttgattaatttgcattcagaaattctaagtggcaaatgtgcaatgcatagtaatatacatttttttatggacactgtgaaaatgccgaagccacatctcataagtaactcttgctcaaccagtgagtaaaatccataaaagagtttgcaaaaggctttgaaagagtttggtttgaaaggaaaactgcaagagcaaatccctctcctccaccccagcccttaaaaaacaaaactaaactaagtctgaagcaaaaccaaacaaagagaacagttgggtgatgtcaagctgccagaatcataaatgttgtcagttcacgtcccagtcttcctgctctcttggcattgccaataaaatccagaaacaccagggatgactcagtaccacagtcagtgcgtaaataagggataaagataccygttaaatccattgcctcaaagcaatcatgggagtttcttaagaatactgaacctcctctccgttttctgcactaaagagataaggagtggcatggagaatctaaatgtgtggaaaatatatatcattggtgtgagaacacatattgtgataggtgttcccctccatcagccccctagtctatactcctagctgctttatcttccagatcatgcctcccctgctcaaagtgaatttgccttccctttcacactgaccttagaagtggatctgagaccatgcttcctagcaggagaaaacaacttttccatttgaaaacctttgcgaattacccacaactctgacaacaggtgctcagcagttgatagtattctttttggaaagttttatcaaccacttaagttaacttgaagacgcctaacagcaggatatggtcaagcaaacatgttcatcaattaattcaaatgcaattttagtttacttttatatgatttcccatgcttaaaactactaattgctttcccaggctggctgcatgaacatggcccaatcaaaggatgcaacagtcaaatgcttgtgtacatcatgttacctgtccatttccatcagagacatcatggacacagctgaaatactaggcctggccttttgtaagttcattagagcatcacaaacataactgcagmtattctcactgtttgtgactctgtgattcaaatgttttcacaaaccttccctggcactgcgtattagatggattgaaagatgctgaaacgtaasgccgggcayggtagctcacgcctgtaatcccaacactttgggaggccgaggtgggaggattgctagagcccaggagatcgagaccagcctaggcaacatggtaaaaccccatctcyacaaaaaatataaaaattagctgggtgtggtggcatgcacctrtagtcccagctactagggaggctgttgcagaaggatcgcttgagccccagaggtcgaggctgcagtgagccatggtcatgccactgcactccagcctgggtgacagagtgagatcctgtttagaaaaaaaaagaaagaaagatgttgaactatacacaagaaatgaaaagaaatagctgagatatggctcttggggagaaagaacaaagcatcaactaatagaattcagaaagaaaaggaggtactcatcaaggcactctgctaaggtttgactaatgggattccacatggtctgcatgtttatggcttaaatgagstaccaacactgaaactgtccacttaattagcccccaaaacaagaagtacagactgtgagtctgagacctacagagactccaaaaacagaaactaccatcgcctcaagctaatcactctaagtcctagaaatacatctgaggttgcaaacagtccatttcattcattattatatatatatatatatatctctatayagatatagataaatatatatayagatatacatatagagagagagagataaaacagaaaaaatctaaatgtctaaaggaccagatataagttaatcataaaacgatgacaacaaaaacaaaggcttcttgagttaaaaagaatggaaaatatttaactagagttaaaaagaaaagcaatttgatcaagagtcaggaattgtaggttctagtcctggctctttttattctttttatttattcctgttttttttttcatttcttgtatatacttcaaaaaggcaaaatatttataaagtccttctgagtatgaacactatgattygtaacctcatctttgcaatggaaaattcactagtatattaaattcaaccaatgggagaggttaggtagatgtatgatcacatgctggaagaagctacagagagggttatacaaacgggacatgctggtattatgaggtcaaataacaagtatcttagcacaaaccagccctggcataattcaggataacaaacaacacaaggtgcaaaaatagaagtaagtacacatcaagtggacatggagcttcctgttagatttgaccttccgcataatcaccacaaaggatttaaaacaattaagttgaagtttacggacacttggcacaaaaagccacgagagcctcacccaggtagagtatttccacacctccaggaaggagagagtggtaaatgaagggtcttcyagcagactctgaaatgaagaaggatgaaacttcaatgayayatctgtcaactaatgatgttcaccagaaagtttcaattttaaaagttctacaaggtgaatttttaagtcatctgaaatgtttcagtgaagagaatatgattcctaggccagatacagtggctcacacctgtaatcccagcactttgggaggccaaggtgggaggatcgcttgagcccgggagtttgagacctgcctgggcaatgtggtgaaaccctgtctctacaaaaaatacaaaagttagttgggcatrgtggcaagcacctgtggtcccagctgctcaggaggctgaggtgggaggatctcttgaacccaggaggtcaaggctgcagtgagctgagatcacaccactgcattccagcctgggtaacagagtgagaccatctccaaaaaaaaaaaaaaaaaaagagagaatatgattcctattgactcatgtaaatgtctactgaggagaaaaattgtttatgcagctgatgccatctccccctgggtgcctgccttcccatccagtgaagaaacgatttcaggggtaagagaacaccctggactctgggaaaatcttcttgtgtcctgttgcctgccttctctctctatgcaaaggctggaagagatgggccccaggggaggaaagagacatcaaggcatttgtgacaaagccaaccagcttcctctccccatagccctgggcaggtgctgtttgatgaccataactctatttgccagagagagggtccatagaccatgttggtgtggtgccctggtgacatcttgtggtgaaatggaatataaataagcctaaaattctacccatggctgcactggggttcaatagaaccagatctcccggtatgtttctttttgtttgttttttgagacagagtttcgctctgtcacccaggctggagtgcaytgacacgactcgactcactgcaacctccgcctcccgagttcaagcgattctcctgcctcagcctcccaagtagctgggattacaggtttgcgccaccgcacctggctaatttttgtatttttagtagagacagggtttcaccatgttrgccaggctggtctcaaactccaggcctcaagtgatccacccgcctaggcctcccaaagtgctgggattacaggtgtgagccaccrcatccggcccttgtatgtttctacctgaacaacttctcctgcggtccttcaaagggtggatactgaagtccagtggacacatacatttaaccacaaatcgaaacaaatgcttcccagtatacagtatgcaagaaaagagcagcattgattggaagaatgagagrtattttcagagatgaaaacattctttattccctcggtccccatgtgttccaatggaaaggaactacatcctatgggcggagagtctcaggtaacacatgattacctcccaagactccttaaataaagccttggctcagaagataaaactccattaaatttatgtgaaaagtcattcttattcaactacgaattccttaaccttaaagcgtacaattcgcaagaggtaaacttagggtgtttgtctacctggggataaaaaagagtaatgaacaggaaagagattccaacagataaaatgatttcgtggtaatattgcgagcccgcgtggctgtgattgcaagcacagatgaagagattagagcagtgaggatcagaacgggaagctgaaccactggcattgtgaactaaagaagtaaaagagaagcacatgccaatggtaacagaaatccctcttgtttttttgcttattttttcacatgcctgctgtgtcaaaagaaacacctctttgtgtccaaagtaatttctttttcaactttgaaaggcaaggggtgcatttactggaagcgctatgaatctatctggatgaaatccttasgctgggagcagccctcagcaggtagggaaggctgggggaaaygtacttcctgcgtacgacacacttatcatgcacctgtaatagtgtgcccatcagcaggaaccacagcatagccatgccggcgtctattacctatccagtgtgacaataaatgaggccaggtgcacacctctgttacctattattctccacaagaatggcagcaaagcagtgagacctgagctatacaagaaaataatacaggaagaaagaaataaaggaagaaaggaagaagaaggaaaggaaaagaaaagaaaaggagaggaggaggaggagaaggagagaaggaaggaaggaagggagggagggagggagggagggaagacaggacaggacaggacaggacaggacaagaaaggaaaggaaagaagggtcttctttctaatattttctaggcagcatcagaaaaaaaaaatcattaaagtttttctgccagagtatacatccctgaaaatgctgagatttaatacacaggatctgagctgtaagattaatggagattcaaaatgttaggtacccttttccttgatggctgggaggcatcaggcttggtgcaatctgcaagctgaatttaacctaaactcaaactggagagggcagaattagagcaagttaccccaaagggctcagctttgagggcttaaggctattcatctctagcggttcattccactcatttctcgaggatactcagatgttgctgaagaataaacaactgaacagtatatgctttcattcaccaagtgagccaacatgccaagttttcgttgttttgttttgtttttttaagatgcagaagtaccagtaaaaggaatagcagtattagaataaaaatacaattagtactagaactatttttaaagtcctgagtgaaaacagacaatgcactatttagatgtagaatagaagggagtcaaattataaaaacasagaacagaatataattcaaagagaggtgctgcttggaaataaggaaaaaatactaaaacatgggatgccatgttttttccatgttaacctaatatttcatgcattaaggtggaataattacattgaagcacagttttcttaattagcccaggtatatttcctggggaaggaataacttattgcaataactggtgttgggacaatgaactactcatctggagaaaatcagctggatccttacccaattcctcatggcaaaacaaatcctcaatgaatttaatgatttcaaagtcaaacataggcacgttcaaccagtaagacatatgagtcaatataatgttaccatggagaaggatttttaaagsgtaacaattaaaagcagagatcatagaagacaggctgatagatttggttgcaatagaattaaaattaaaagacaaaagtaaaacaaaaattaaaaacttaaagacaaaaaaagcagaggtcatgagaaaacatagtcatacacctcataccaacatttcagtcaataacgaactatgtacacaatgccgatcccatcagattataataccatattttcactgtaccttttctatgtttaggtgtgtttagatgcacaaatatgtcccattgtattacaactgcttacactattcattacagtaatatactatacaggttcatagccctggaggaagaggctataccatatagcctggatgtgtagtaggctatccatctaggctcgtgtaaatacactctatgatcttcatgcaatgacagaattccgacaatacatttttcagaatgtatctcccttgttaagcgatgtgactgtacctgtgatatacataaccacaggttaatgtcttgaacatttaaatagttcctgaacacataaaaattcttaccattcacaaacgtaaagacaccaagatagaaatcagtcacagaacatkaatagatcatttgcaaaagaaagaaattgttaacacatcaataaaaaataatgtttagcttcactaataatcaagaaaatgcacagtaaaattagattctacctttctcttactactcagctttagaaaaacgttacttattcctagtgaagatactggaaaatagtagcctcaatatttcaagaaagcaatttggcaattaatctcaaagccttatcttattcttggaaccagcacttccaagcgcaccaaggaatcactcactggtgtgtactacaaaaacattcattgcaattccacttacaatagagaaaagctgtgaataacctgtatgtccaacaacaggggattggttaagtaaatcatgactcacccatccattaggacattgggcagctattaaaaataatgctgttgaaggatttagtgacacagaaatactattacatgaaaaaaggcagtttcttgaacacttccattttctttttttggctggcttttttttttttaatttttaaagagataatatatacgtgtgttatcaggaattacatattggaaatgaccaccaaaaaaatgacttgttccacttaacaaagaaggaaaaacaggccggacgtggtggctcacacctgtaatcccagcactttgggaggccgaggcaggcggatcacgaggtcaggagatagagaccatcctggctaacatggtgaaaccccatctctactaaaattacaaaaaattagctgggcttggtggcgggtgcctgtagtcccagctacttgggaggctgaggcaggagaatggtgtgaacccaggagacggagcttgcaatgagctgagatcaccccactgcattcctgcctgggcaacagagcaagactccagtctcaaaaaaaagaaggaaagataaagttgatgccacctttggtctcttcctttctactgacaaatcatgtgtacttcagcagtcacttactccatctgggcctctgtttcctyatctataaaacaggaataatgacaacttccccaccttagacatatggattctatgaatatagtcttgacatgtaaatggctattttgttgtgctgctgttttggaaactccgccattacgccagccatgtgaaaatcatttctcagctccatttgacaaaggtggccactcagctgggctccaacactcttccccactctctctgccactgaactcaaacaccctctcctttgggaaacccaggctggaaactgaaaggatggctccatcctcttgcttcccaagactctgcaccgcccagggacgctgagcactttgcatgtttcctgccacatcattcagcagcccctgccttccaccgtccaatgtgcctatgcatccttctctttgcctacaccaccttccacttggtaggagctcaagcatcccccatcaacctcttgcagacccatcaacacatccctggcattcttctctgacctattagtgcttcaaggttgaaaagcataaaagggcatggtccacacaagtgcagggtttctcagcctcagcactattgacttttggggccagacaattctctgttgtaggatgcgcctgtgcattgtaggaagttctacagcatcccttgctcttacccactagatgctaatagcagcctattctcctccaagatatgacaacccaaatatctccagacaagtgtcccttgatgggcagagtcacccttggtacagcaccactgtacacagtgagaaaggcaatatatttatttctgctactgacagtcacagcctacaagcagcaggtacccaaatcacataaatgatcaccgcaaggacacttcttgggcaggaaagtccatgccagagcttcaaccagaatctcctgagactgaaaggggaatgacagggagtgcgtccctccctgcattcctctggctcccctctgagccttgagcaaaaggaaggggacagccccctgaaccctgagcctatttgcatctcctctgagagcatgttctggaggcgctccacagcgagcgggaagatcttttgtgagattacttatctggagcgcgtgtcacttcttcagcaccataaaactgaaatacttgaaatagatgtyactacatttgtcatgaactgacatggccaattaatattacaaattcaccatggagaaacgcttccagctcccaaggtataaactgctgaacatcacaatttcctcttgtaacaatgggccagcctcgccagggctataaatacgaagaagtacaggctgattaaatggtaaaaagtgctgttcacagggagtctctttccagggctgacactagcgctgtgcctaaagttaacaggtaccccgatgtctcggctgcaaaatatgtatttttttctctctttcttcaggaaaaagttgactgttgcatactgtcatttttttctcctcccagtgagcaaatggcacactcattacaggacatgaaaggctgtgggcacaggttgtcccaagttctgttgccactcagctagttggacttctcctttttttttttttttttctattaagtcgtgtcacagccaaactctcacccctaatgaggcacagctgggcccttggccctgaagaaatacgcrttggaaatgaactggaaaacacttggcctccctcaaacttcccaggagacagcttagcccctcgtgccccctgggagttggcttcttttccagcggccatcttcacaatcaagcaggaaaatgccattgttccaaagtacacaataggttctggtggttttcaaacatcctccatataccagtgcaaatggaggggcatctgaggcgaattccacaggatgttttaggagcccacaggccttgactttcttttctcggcagaagttttaagttccagtccccaggcttcattctttatattcttggtttggaagacagaggcagcagtaagaaaatagattatgtataaggaagacaaatagggcccaatgaattacccaaaccaaacaaacaaagtctgctttggaaataaggttttggagggaggtgagacctgtatgcatgagtgtataaaatcagagagaaatgtgtcaaaaacaaattacaaaccttccaaatacgggattacacatgaatggatggtaataatcacacatcactccaaggcaatctgtgtattacatcttgcatttcatcaaacaaggcttagctcttgggtcattaattagcaacctcggttccagataccaaaatatgaggaaggctatagtactcgggtcctgcttcaatattgtgattygtttttcttatctacktctctttttcttcccttattttgctcacaatgccttctgaggaaagacaagacctttcttataaaaggaaaaatatccatgtctctacccacagagtccaccattaatggaaataggagattgctttcttcaaagtacacaattaaagtaacgtactaactcctttacacataacacaagaaagctagaggaagttttatgtatttatattacactttttccttcttcctcttttctcaatataggaatctttctgttttatgaaagctaagccactccatacaacgaacagtttactccaatacaaatagaaattatagaaaatataaaaatcctactaaaccttttaatctctaactttccaagcaggtgaattaatacagaggacattagagatttattttctttaagctccaacagtaaagagtgtttcaaagtcattctcaaagctgtagagatttttaaaatccagatgaaccgagcttaactctgtgatgtgatatataataaaatctactccaagattcacctacttaaagatatatgatacatttggataagagaaaatgaaattttaaaatctaaatacatatgaatcaaatggttaaaaaattaaatagaagtttcttgcttagagtaataaatgcaagcttctcagtggatatccttaatcctgattttagaatgagtccaaaaagaaattgccagagtgaataccaggtaacagaagaaatgatgrgcatgtttctctgtagaacaacctcccttccctagccgctaactatggtggtacttactcatcacattctagctcagaactgccattctggtcctttcattcttgttagtcataccagcatttgtaaactgctttccacattaaaagaaaagtaaatggttcacttgtccctaaactttttgtcttacacaagacaacattaagcatatttcaaataaaaatgttcaattttcgctagctatgttaaaggttaatacccaagctaaaaccactgggttttaaaagatggttaaactgaacagaaagctttgattttcaagttatgatcagaaaataaccatgggagactgtcgagaaattaaaaatatagtcagaaagcctttaagtattacttagcaaaacagctatgacccaaaatagcatctgttatatgtttgttattcacttcagtaatgactgaaagtgaataaataaaacttgctyggaaaaataaggttttgaaggaagataaaaactgtacatttaagtgtatgaaatcagaaagacataaggtaatagaagtatccatcacataactggcctttaaaccatgtaaaactcattgatacccacatgggaggccaaagaaacgcaatttccaactcaagaaactatcamacaaaatcccaacatgttctagacaccactggataagaaatttgagggagtaccccgaataaacaaacattcacaatcattcacaatcattcagcattacctcccattctacagggggataatccattttaaattaattctgaattcatcaaaatacagttcacagaataattatactggtaatgattcaggagacactttaaaagagtattatagctttattgtgatatatatagttcaaatacattttgcccatttaaaacgtacaatgtttggtaagtttcagtacaatcgcagatatatgcaaaccgtcaccacagtcgagagaagtcaagataaaacaagagaacaggaagagaaagaaaaacaaagagaaggagagaaggaaaagagaagagatttggaggtacatattccagggtgagttcttggggtctttattgttttaggacttctcagtattcgtcgtggtaacagagctttatctgcctggttgccaaataatgtcttcccaaataatatgagagagaaagcaaaagagaactgttcattcgcaaaactgagactcaccgagttaaaaaattaagttgtacagatcagaaatgtaatcataggagacaagctctgagagtttttcaatcactgtggggttgcatcaatttaaagtcatgttacattaaagagaaaaatgtctgggagagtctcttcctgtcactttagattagatttgttgttgttatcyggctgtgcattttgtcggcttcattttacattttaaagatattgcttaatgtccataaataaaaaactcataacctacgactttttctccattgtccagagattagtagatggcgcaaattaacaagaagagyaaaacactcaatgttcatctagattcatattaacatattaactaacttccttggagtaatctaacataggccaacttcaaatccagtgattttttttttttaactctgctccacttaatttaagagttacacaaaatcaatttgtggtctatctcccttcacctagtctctatcatgtaggagggaaytggaaaattccatctggtgtgtttcaatgtttcctcaagcgcaacttcctttatctcaccaagatcttgttaaattgcacatgactttagtcctggacgccaaggacttctaaacatcaagttgcataaaagtgacatttcaccaatttaagtgataagttttcaaattgtgaagcatctaattgcaacgataaatccaccttgctttcctctatggccagacatctgtatctttaacaaacaaaagtggcagtttaaaaacaattagactcaaaaactctaatgaataaaaatcactgtccctacagatagcacgtaaacttacaygcgcaccgaagcgtgcttccacactgcacggcgcacactggccagggacattctgaaccagaaagggccctggccccaaagtcgtgctttccctactttgctttctagaatggagaccacgctacacatcataaatctagagaacacgttaaaaccttgatgtgcctgtcattaatgtagctgctttatcgtgacattttttttttccttagaagaaggagaatagttttcctgtgggttggcggtaaattttaaaaagcattttctgtgacctcatatagtcaaatcatgactcctgtcaaccaacagcctcctggcatcctcacacacccttagtcctatagagttacatcatacacacatttacatgaattgtcaaagacattaagaaaggcaagcaaaggccaggcatggtggctcaggcttgtaatcccagcactttgggaggctggaggaggactgcttaaacccaggagtttgagcccagcctgggaaacatggcaaaatcccatttctacaaatatatatatataaacacacatgcacatacataaatrtaagtataaatcagccaggtatggtgacacacatctgcagtacaagctactcgggaggctgaggcaggaggatcgcttcagtctgggagttacaggctgcagtgagctgtgattgcaccactgcattctagcctgggtgacaagagtgagagcctgtcttaaaaagaaaaaagaaaagaaaagaaaggcaagcacagggagggagagggaaagtaaaaaaattgagggggtgagatacgttggcctctgctttttgtggaaaaggaggctgctgcataaatacaaggaagaaaccagcatatgagtgtccaaactgagttgccaagggcatgaagtctggaaggatctttgagggtcatttgacttcactccacttccagcttatatgctgacttcagaacttgacctgtgcagaagatgagtctccacggcctgcacagcacacagaattatttatccctatacccccatatattacacccccttccccggtaagtgaagaaactgtctgctgaaagaatgcatgaatcttgcctttaacgtctcaggcatgtgttaaacactttccgagacacctggcacctagtaactttcaatagatttctcttctgagccctctgttaagtttctcggtctctattaaggtcggaagcccagcatctgggagaagagagtggttcagctctcatctcatcggcaggatcacatgtctcaacacagccaggatttaggaacagcaatattccatcttaggcagttcaccacttcatacgattatttggcaccctcgatttttgttctgctgctcacatcacacaaaggctatttctactttatatctttagcattttccccacaccagagttgtacctatatacatgctgtttccaccagcaggaaagtaggagtgcaatcagctatcctcgctttggccagtggtgctaggaactgataactccacatatcctgcaaggcaggcaggagaagttaggaagaatcagggaggaagggaacagacttttatgactgtggatgcagggcaatgggctctcacgttgtggtagacaaaatgatgcccatttcccaaccaaagatgtccaggtcctaatccctgaaacccgtgaatatggtagactgcgtggcaaaggagaattcaggttaccggtgaaattaaggttgttaattacctcgcattaaaatagggagaggggctgggtgtggtggctcacacctgtaatcccggcagtttaggaggccaaggcaggcagatcacttgaggtcaggagtttgagaccagcctggccaacatggtgaaaccccatctctactaaaaattagctggcatggtggcatgtgcctgtggtcccaggtactcaggaggctgaggcaggagaatcgcttgaaccctggaggcggaagttgcagtgagccaagatcaagccactgcactccagtctgggcaacaaagcaaagctctgtctcacaaataaaataaaaataaatagggagaggaccctggttatctaggtgggccaaatgaaatcacaaagatccctaaaggtagaaaaaaaaaagcaggagaagagtcctggtaaaatgtgaccacaaaagaaagacagagagatgcaatcttgctggctttgaaaaatgaagaggccatagmagaggaatgtgtcagcctctacgtcatgggaaaaggccaaggaacgaccttcccccagagcctccagaaagaaatgccaacaactacattttagcccaaggagaaccctgtaggacttctatcttacagaactgaaagacaatacatttgtgttgtttaggtgctacactggtgataatgtgttacagcggccagcagaaactaatacacttggaaacaatggctgtaacgcatccatcagtccactggttttctaacctgcaagtgttcaaagtgttgatttactttaaaataattaagccaggctctggggattataaagaccaaaaaattgtatctattatcattattactccccccattgtttttatgtatatatttattattttacttttcagctgttcttatttaattgacaagaatcagaaacaaattgagatggaatggtccacacagggcccatgctgagacaggcagtgtggctgacggatgagaccattggttagcsatgtgtttgtgtctctgttgtgccccttattcactgtcctgccaggagccagttagtggctcatctgtgaaatgggaataagaacagtcccaatatctcacagatcattgtattaatctgttttctttctctttttttttttttgagatggaatcacccaggctagagtgcagtggcatgatctcggctcactgaaacctccaccttccaggttcaagcgattctcctgcctcagggtcccaaatagctgggattacaggcacacaccaccatacccggctgttttgtatttttagtagaggcagggtttcaccatgttggccaggatggtctcaaactcttgacctcaagtgatccatctgcctcggcctcctaaagtgctgggattacaggcatgagccaccgtgcccaacctgtattagtccgtttttgcactgctatgaagatactacccgagactgggtaatgtataaaggaaagaggtttattgactcacagttccgcatggctagggaggcctcaggaaacttacaatcayggcagaaggcaaagcagaagcaagcaccttcttcgcaaagcagcaggaaagagaatgaaggccaggggaaacttccatttataaaactatcagatctcacgagaactcacgtgctatcacgagaacagcatgagggaaactgccaccacgggccaatcacctcctaccaggtccctacctggcacgtagggattatggagattacagttcaaaatgagatttgggtggggacacagccaaaccataccaatcatcatgaggattaacaaagaggaaacactgtgcataaaacaccacgtgagcacaacacctgatacatagcaggtgcttgatatggggaagaaaatgacccatgggacttaagtgattttacaaacagcacacagtcaaagagcaaagccagaaatatcatgcaatcttccatcctctaacactctttccccagcaatatcctacatctactaccaaaccccgccatgtctcaaaccactgaactttggcccatattggctaaacagcaaagacaatcctcttaatttaacccattctcatggtagtctctgtaaagctgcttgaatatgattaagtatcaaatactgtcatatcagtagaactaaaatataccaagtagtatccctagtttccagcccagctccaaatttttaaacgacaaacctttttttttttttggtaatatttattcattgactattgatatttaactgttttcacaatgataaagtagctcattaagaaacaaataaagacataaaatcaaagtatgaagccaactgagggtcaaactgaatggagcgttgctgggcattaaggttacaaagaaagaaaggccttgccttgcttttagcaggcttagcaactttttcagggacctgggacacgaatattcaaaaaagaaagtgctaggcagtgtggctaaatggcatgattagaagggacagcatattcagagggaggtgcaatccctgagggctgaggtccaggaagagacttcgggaggagatcagacttggaggatgacaggggtgggagtgcagacagcgaccacagagctgacagcagcagacwtcgattgtgcacagaatgccagccactgttgcttggtggtttatcatctaaactctcacaaaagccctaagrggtaggaacaattacaaaccaaccaccttttacagatgagataattgaagttcagagaggttcagtacttggctagtgatcgcacaggtaggaattagcttgaactaggacccctcggtctgatcttgaaagcactcaagaggagctgcggtgactttgggtgacaaagcactgacagggagatagggatcctgagacgtgagggtccagggggtcagtctgcaatgtggagctgatgtggacccagtcatgagcccagccctaggcagcagggcatgggcagcaggggaggcaaggtaagtctgatgggccaggtgcccctgccccagtggctgggaggcgcagactctggaacacaggttacacctctcatttcagtgcttagaagagcagaggcagctgtacaggggaggcgcgggycacagcgtgacatgctcacaccccggacaggtctggagacagcctcctgaaaccgccctgggggccccagaagccctcaggtctccagggcttgtcactcaggcaccgaatacacttagcctaattggatattattccttcttcatgaagccaagcaggttgtcacctagttccctgggtaagacatttgcagcttcattttgcaattacatctccctggtatttgtcatggcacagaagtgaaatttctgtctctggtccccaatgtcatcttttccttctgtttaaaatctaggtgctatgccagttctttttttaatctgtaagttcttttccaccctctcccccacaaaaatcctgcaatatctgaccaattattttctcagtcacattaaaaatagatgccattcgcattgccactatggcagttgtgagcgctgctcataagtatcctgatcttcaattctttagggcacacagtaggactgcacttatctttcgaattggggcatgaccattgccttgctttcaccaatggattgtggggagaagcaagatttctgagtggaagtgcttaagccagacactaatcccccatgctcccttatattagggaaagaacagaggcacatgtaagagatggtgctgaggtcagcctggatccctgaaagattttttttttttttttttttttgagatacagtctcgctctgtcacccaggctagagtacagtggcatgatctcagctctctgcagcctctgcctccacggttcaagcaatccttgtgcctcagtctcccgagtagctgggattacaggtgcacgtcaccatacctgactaatctgtgttattagtagacatggagtttcaccatattggccaggctggtctcgaacttctgacctaaagtgatccgcccacctcccaagttgctgggattacaggtgtgaggcatcgggcccagccagatccatgaatgactttaaagcacagccccttacctcccatctgtggtcagatatcacgaatgggaaatgaattcaccatgctaagccactgagatccgggcgtgtttgttacagcagcacactccagtgcagctggcctgagaaaagccattttaagcagttcaagttccatcctgtgttccatgtctttctcaagaggttggcttttactttgccttccagcattaccagactgttcatgagttatcaagggcagaccaggcaggcctcccaaggggcaatatctatcctaaatcttgcgtcctttttggttcctctctatgctgcataccctctttcgtggacctaattcagatttgtagaacaagaaaatgtttctcaccaccttgtcatgaaggggacctaggtgaactcacccacatttcagctacaaaattcaaatgcagacacagcccatctatcagtcctcatgggactttgcagaatccaatataaactacagaggtagtcaaagaaggggttgttcctccatttccccctggcaaatcaccaccattcctggggcctggatgctttagggatcacagtaggattacacttccctgtccttttgaatttggggatggccattgacttgctttcgccaatgcaaattgtttcctctgaggttacatctattcctaccagcctagattgatcagcctctgccctcagagaagaaatcaatccccccttttccatggagtgagctttccttctgtgacagcactagactgccaaagaagcagagagctgaaatgctcccagcagctctacagctgaggccaggtgctagcctctggaatgaggctggactgggcagggcagttcccggccctgcattccaaacaggatgctcacctgcttgctgctcccacatgcctttcccaaatacaccaaataataacaaaagaagatgttcaaataaatagagctcccatgattatgtaccatggtagcaaataaatagagctaccaggatgttaacatgcattatctccagtgtccaaaacaaactcagctcagagagggtaggggcagttaatgacagagcctggatttgaacctcgttctttccacaccatattctggtccctcccactggtgcaaccttcctcccttcatgcatgttctttgagttcttctccctgctgggaagatcttctccaatcctagctgtgctgcaaagccaggttcccactgcaaagccactccgttattcattctcaccctgaactcttccttctggaaccacttctctacggtgttggtaacagagttagcacactgattctaagcacacagtccagcagcctcttttttctatatttccaagacatcaatgtagtcttgacaatgcagcagcagcagcagcagcaggagcaacagcaactgccaaggtctgcaagtggcttcaagatgccggggactttattaagcagttcccaggtgtgatcgctctctcttgcactcatacactcagctcaaaggtcacctcagcaatgaagtcttccccaagaacctgacaagatcagtgctcagcacacagtaggcccacagcatgtatttgatgtacaagtgaacaaaaggaagaatgaatgaaaagagctcttcaaagccatgcctctggactccttgtgacgtgtgagtcccctgccacagccataagaagtctccagcggttctaccatcgccttcttgagaagtaacacccaccctagactcgtgggaaattggcagcgtgggaattaaactcacaatgtctgttctcttccactgagctgcactagggccagaacccaaaataaattcctttcagccctctagcctctcagtaggaatatctgaagtatctttaatcaaactttagaggctgaaattgcccacaattctaaaaatgcctccagttactatggatttatcagtgaagagaatgaaataaagaaaatttgtttcatagttaaagccaaggccactttatcccagatgtacttaaatcacttagctcttaacagaatctttaactataaatatactaaatttggtagtaggatagattaactacaaaaggaaattaacactgccttagagaatgtagataacatattaaaccacagataggctactttggagaattataactgggtagacctaacatttttaaatggatattagagatgatgaaatgccacttggccaccctctgaaatgcaattgaatttacattgattaaggaaaaacaggggaaatctaatattatataatgccttacattaaaaactttaaacaagccccaaagtggctccttaggaaacaggttttgggtgactaagcagtgtgtcattagccctctggtgagaaaacgcaggatttagttccttatgagagacagagaaagagagagagacagagaaagagagagagagtgtgtgtctgtgtgtgtgcacgcgcgtgtgtgtgtcaggtttcaactgtgggtaaattagcacttgccttccaaagagaccagcagcaactacaaaagtttgcagggctttgtcattagcctgtttgcattctccaaagcaaactgacagtctcatgatgcagggcattaaaaatcctcagtggtatcgactgcctgaagccgatgcttccctgttaaatacagcatggctcaattaagagctcttcaatatacaatttaatttttctttcatcttgatccacagcctggctcaaaatgaggaatgctagaatagatgtactttgaatattgaagcaagtctttataaataaacctatcacccttgtaatgatttctgtcataacatgacaaaatagatgaagctcggcgtctggaacttcagctcacacgtcatttttccaacatcaccaggacccacaatttttttttttctttttggcttttctcgtacttttttccagttatctctgaataacattctgctgtttaagaaaagtttatcctttcttcttttcattccctgtgtggcaattcttcagaaagaacgaagaaaattactattctgctacttacatgtaagagaaagaaggtaacttataaatgaattatgaaggtcttacccttggaaagacatacatatttcatcataaatgtgatccattacacttattctacatacagtatttatatttgtacatgattattcaaggtttcttttttttttttttaatctccgcaagcccatactttcaaaagcaaatccaacattctcctttaacctgtaaggctcagactagaggatacaaaaggtactcccaattgactccacatgtatactctctctctggatggaaggtattagatttacaaagaatagcaagaatcatgggatttctcaaaggtgcacatattatacagaacaatgttcaaatacctgcatgagcttgctatgagtcaaggaggaagacgtttcactttgggcctaagacaatttcttatattgaaacatattcataaaaaacagacttgacaacagttaatgccttggatagaattgtgtagctctgacatgcatttctgacagttggcttgagctagatgaagaaggaacagggctctctctcccgaagtggataaagtatcagtggagcagcctaatacccattccctttctgatcaaatcattccagttggtcttttcgggctgcagagctccttgctgagatctcaggtaacgtcacagtcacatcacgacaacaaatgtaaacttatttaaaatttactggttttacccattgtatttgattttcatgttataatttataacctattttaaaaattcaaacagcatttcttatttttcaacttgatcactccctatttagcatgaaatagacattacacataaatatgcatatgtatatacattcaaatacaagcattcccaataggaattgacaaaaccacccacattttaaacacactccttccattcccattcttctttccccagatgctgcacttaatataatttggaaagaactaaaaaaaataaataaataaataaaaagctgtaagacaatttttaattgtcagagatggagcacttagaatttatagtaattaactagtcattatttcaaataagaacattaattggtatgttcagaaaatctgcagcactgcaaaatttaaaataaacattacaaagatatcatttacaactaatctatatttaccattgaagtgagcttcaaactatatttctttctattatgcttttattggctacagcacacagtaaatggagtgtgttatgcacagcttcctaaacagctaaatttataaaacccaattacataaattaattaggaatgaacgcatgcatttatgcctttgtttgcaactgcaacatattaaacatgacaaaattaataaagacaccctaaaagaaaaaatagtgccacgtattcatattccataacaggtttttatgagatttaatttgatttgtctagtcctaagggtcgtgactcttaataaatacgcagtttctcaccgtttcatatacatatgtaacggtatgtttttatgactcctaaaggaccaagaacatataaattcaagagtatttatttcaagattcagagacagaatggcaaagaattactcaaatgttatttctgccttcgttatctcctacattgttatcaaagacagctttttggtaattagaatgattcgccatcccctagctttattatagaaaacgtccagtaaaacaagcttactctgagctccacgaaggaataaaacattggcatatgatcaagctagccagaagagcactgctgaggccagatggagaggctcatgcctgtaataccagcattttgggaagccaaggcgggcggatgacctgaggtcaggagtccgagaccagcctggccaacatggcgaaaccctgtctctactaaaaatacaaaaattagctgggcgtggtggcaaatacctgcaatcccaggtactcaggaggctgagctaggaggattgcttgagcccaggaggttgatgctgcagtgaaccaagatcacgccactgtactccagcctgagcaaaagagactctaactcagaaacaggaaaataaaataaaataaaataaaaaagcatggttgataacagaccctttttttttttttt

SEQ ID NO: 96670 - DNA, 32363 bp, Homo sapiens
atttaccattgaatgcctatggaaaatcactaagagaaacatacctgccaattctctgataacttcttctctattcacatgactgttatttcgagatttgtacacaatctgaaatgtccctttgtttggagctttaaaccagggttccaaaaatgtttctgcatattttttcatatcttctaaaaaagccttgcatgtgcctgagatgggtaacattcgcaaaataactcgagtcttctttttcttggttttgtacatatcctggagaatatgatgcaccaatttctcaggctcttaagaaaaaaaaaaagttaagaagataatttctcagacatcttaaagatcgaactctaaaatgaattttcactggcaatgacataagttgacagaagaaattctcataatgaattttaaatgaatctacctagtcattctttccaaacagtatttcttcagtgcctaatacgtactataatgtatctaatatattttaacttttcatcattattactgcttgcactagaaatgactgtttaggtagacaccgttgttaacatttttgtgatgtcctgagttatccaaccgtaacaccatgctgttgttttcctgtaacaacagagtacattaaacagtacacacttttttacaaaaaaaaaaaaaaaaaattctgtgagtcactttaaaagatgtaattaatccattagctaagttagcacacaagtctaaatctcagacccaagaggaatcccagaaccatgctgggcacaacatcatgaaagggaggtcctcaggctgcaacttgcctacatacaagtatatttggggctgctccgaaaatttgtaaattagttgaccacactgaaaaacaaaaaaactccagatttcaaacttcttttgagaaattcaaatacctggccctgcattcccaaagagcaacaactggctggagctgagtagcagctgccccttatttacacagaactggcactctagttctgccttaagttatatacgaaggaagcagcaaagccaggtttccactcataagccaatgctacgtccaccaccccattctacctctccacaggccaactgctaatacagtgtacagaagctgccatcaaatgattaactgagtcatgcccaagaagccattttgtaagcagtattccctgagacaggaagatacccagatgttatgagatcgataatcttagcaagtatttgtcacacctatcccaagtgtcctgatgaagacaacgttatttgctccactttccactgactggaatcttcttaacctcatctctgtagatgccttaatgtcaccaacttctttcttcaaggcagcctccgcatcatcatcctctccctcacttccagagggctgctgatccttgtctgtaaactgtttgcataaaactaatgagcagaaatgacacaacagctcacatttaaacactataagtaattatttatgtgaagtccctggcggcaggtggctcagtattgattttttttttttttctaaagatggagtctcgctttgcctcccaggctggagtgcagtggtgcgatcttgacttgctgcaacctccgcctcctgggttcaaccaattttcctgcctcagcctcccgagtagctgtgattacaggcgcatgccactacacacagctaatttttgtatttttagtagagatggggtttcgccatgttggtcaggctggtcttaaactcctcaggtgatccactcgcctcagcctcccaaagtgctgggattacaggtgtgagctaccatgcccagctgactcagtattgataataaagctttttttacgaagctgggacaccacacccttcaaaacgtggagcaaggccggaagtggtggctcatgcccataatcccagcactctgggaggcagaggcaagcagatcacctgaggtcagaagttcgagaccagcctagccaacatggtgaaaccttgtctctactaaaaatacaaaaattagcccgatgtggtggcagacgcctgtaatcccagctactcaggaggctgaggcaggagaatcgcttgaacccagaaggcagatattgcagtgagctgagattgcaccactgcactccagcctgggtgacagagcaagactctgtctcaaaaaaattaaaaaaaaaaaaaaaatgtggaggaagagggaattcccgcagactatagaatgtaaaatttgaaaatgttttcaaaagcatcctgacagtttgaggcagagagaaacgtgctgaccagatcaatcattttagggtggaccttaacacgttgaccaggtatctgtgtgcctcacacgacactgtccttttggtgagattagaccaaatacctgtggaattaaaaacccttactcttgttctattaaggaacaaggcacagaaatacattgttcaataattttggccaagcatggtggctcatgcctgtaatcccagtactttagggggcagaggtgggcggatcccttgagcctaggaatttgacaccagcctggacaacatagcctgagaacccgtctctacaaaaaatacaaaaaattagtcgggcatggtggcacatgcctgcagtccctgctactcggggactgaggcaggaggactgcttcagccccggaggtggaagttgcagtgagcaagagcatgccactgtactccaacctccaccttgggtgacagagcaagaccgcttccaaaaaaagaatttgcttaaagtacaggagtagacaggatatgtgcttgttgcccagctctctgccccctagtgcccaacgaaattgccagtcaggcacaataataattgtatacatttacagaaactttattacataccagtatgtattttatgtacataagcaactcactagccagtcttaaagtattctcttttttatctagctcagcagcatcaaataatgtgcccatgtccgagtccccaagctagtagaggatgagccgtgaatttaaattccctctgtattacccttcttcatttaatccctcagtgtgcgtgtgtgtattggtccagattctaagccagtaatatgatttccaaacactaagactttaggtgatattggtaaaagtttttacgttctaaaatgtattttaagtgcagtaactagcattagtagtaaacctattatttcagaaatattattgcttcaggtaaacacattattactccaacttcacgaggctgtcatgaaaaatgtgtttctgaaagagcttcagcacaccgcctggccctcaatgagcaatccttaagtgggaggtaggccgggctcagtggctcgcgcctgtaatctcagcaccttgagaggcagagacgggaggatcgcttgagtgtagggtttaggactaccctgggccaaacagtgagaccccttatctacaatttacaaaacttagccgagagtggtggcgcgcactcatagtcccagctactctggaggctgaggcaggagaagtcgaggcttccctgagctatcatcacgccactgcactccagcctcggcaacagagcgagaccctgtctcacaaaaataaaaataaaagtaatgggagctaccgtggttactgatggcaagaaaaggtgcaagcacttcaagcacaaaaccgatagcaccgaagtctgcgagcgtctcaggactagggacggaaacgccggcgaggccacgcccctacagccgtcacgccgacgacccgaggcgcgcatgcccataccagcagccatccctccacccttccctcctcccgcaaggcctggcagccggcccgcccgcccaccccgggaccggtaccttttctggcccatacatgtcgtcgccgtattcgttgaggaggctgtaggcctcctccacgcacttgcgctcgttcatattgcaggtgatgaggatgccctgtagcccgggctctagctgacggggcccgccagcgtcgcagcgccgagcgcgcttggccagcacatactgagccttgcctttgcgcttcccgccgccaggctgagtagtctgctgggcaggggccgccatggtgtgcgcaaactgagaggaaagagaaacgtttctccgctgctgttggcgtcctcgtctaccgccggcgcgaactggtgacgtcggatatgagcgacggcctcccctagccggcctcgaagcctcattccgtgctgcgccaggtcctaaggccggtctgcaatcgtgaaaggggtggagtgatacccgcccaagccccgcctcctgccccgcctcccgactgcaacctgaatccagtagaggcagcatagcagccattctggaagtggtgtcggtggctcctcaagcccttgaagctggctccagccatatagcttcttccacccaaccttggtacctgttcctccagccttccctataattctgccagctactgtggaggaaaagttaaatattaaatttgaactcaattgaacgtggacacaatggtcaagtcccgtaacaggttgcatgagccccttgaggcattcattcatccagcactgttacagataactctgtacctgtacttgagttattgaaaaacagacaatcacagaaacaagttgacctttatgtgttccttgagcccagtcgagaagggccctcgtgactgggcctcatgccaatcaacgcattacaaaaagagccagggtcggccgggcacggtggctcacgcctgtaatcccagcactttgggaggccaaggcaggcagatcacgaggtcaggagatggagaccatcctgaccaacatctctactaaaatgcaaaaaattagccaggcgtggtggcgcgcacctgtagtcccaactactcgggaggctgaggcaggggaatcactcgaactcgggaagcggcggttgcagtaagccgagatcgtgccattgcactccagcctggcaacaaagcgaggctctgtctcaaaaaaaaaaaaaaaatgagccagggtcccaggccacacggaagcttcttgagacccctcctcctctgtgcacggacaagtggctgactctggagcccaggctgttgcttcccggtctggtgatgaatccaacatagtctggtgcgtgtaaatatatatatatatatatatatattttttttttcccttctccccttcccattgcaatttgcttactatatcatttgcttattatatctgcattgccatttacgtgggataaaggttgtttacccccaaaggtattgtatgtttgtctattttttttttttttttttgagatggagtctcgctctgtcgcccaggctggagtgcagtggtgcgatctgggctcactgcaagctccgcctcccaggttcaccccattctcctgcctccctcccgagtagctgggactacaggcgcccgccaccacgcccggctaatattttttatttttagtagagacggggttttaccgtgtcagtcaggatggtctcaatctcctgacctcgtgatccacccgcctcggcctcccaaagtgctgagattacaggcgtgagccaccgcgcctggccgtattttgtcttgttttttcccctcgcgcatttcccacatagaacagttactcaaaaggcttccagtaaattccatttcagcctcaattttccaggctatgtttctatttcacttaaaaccaaggatgttggctggtgttgtttcatgctgctttcgttgcggccttttatccatagtcttggcaacttatcatgttactgtctttttaaaaatcattgaagatgccacttttgaagaatgtgtttaaaaaacaagtgcttctcatactactcttcaggtacaaacctcttagcagatttgagttcctacaaagccctaaaagatgtaatctgatattttgaaagggacaccgaattcacagtcaataaaccctaggttctaaccccagatctaccactatgtccaaaaattttatcatcttattgtttgcttttacctgtgtattcaatacagcatttaattttcagaatttctttggtggacactgcacagcagagatttctagaagtcctcagttgtttgtgaagagcagtgtcatgacactggcattggccttcccccaaatctctctctcttctgctggctgggtttcagttgcccacactctgccacctgtccttasgatatcaaatattagcatacagataacaagttaaaatatatatatttcaagtcccaagcatatttgagtactatatggaggcaaacttgaaaaacmaaaactcagttttkttaaaatatgtgaggaggcagctttaggctaaatttaagtttggcctaaatcaagcttgtccaacctgttggcccacagtcracatgtggcccaggacagctttgaaattcaaccggcccaacacaaattaataaactttcttaaaacactctgaggtttttctgcaattaaaaaaaattcatctgctattgttagcattagtatattttatgggtggcccaagaggattcttcttccaaggaagccaaaagattggacatccctggcctacaggtttctccatacatagtgaactataacctaattggatgtgtaaacagactgtaatggctgttgtaacaagtagccaaatctcarccaagcacagaagccatgctcaaccactcacaggtggctgattgttcaaaccatgttttttatttttatgttttttgagacggagtcttgctgtcgcacaggatggagtgcactggtgcagtctcggctcactgcaacgtccacttactgggttcaagcgattctcctgcctcagcctcccaagtagctgggattacctgtgcatgccaccacggccaactaatttttgtatttttagtagatatggggtttcaccatgttggccaggctgatcttgaactcctgacctcaagagatctgcccacttcgcctcccaaagtgctgggattacaggcatgagccactgcgcccagccaaaccacgtttaaataaggcaaatactgagttgtaacctattgggctgtttctgtaccttacttccatttcctgcacctcacttttctttttatgtccataaatcatctctgaccatgtggcagcaccaggatgtctctaaacctattccggttagtgggtcaggggcctgcctgatttgagaatccttccttgtgcaatttaattctgttaaatttaatttgtctaaagttttttaacagtttattgtatttcatggttgctgactgtgcagagaatatccaatgaagtgagaaaaatatgcaaccctgtagctctcagtctagacgttagttatctaaatcacacactcatcctgtggcagctgccggggctgcgtccacttacttcctcttctgaaacaggccctcgtccagctctaaataactcakccttcatttattccttattattcttctttgttcttttttgcttattctttagactacatctattatttcatggctgtgtgaactttcacctccttaggttacctcccagacatggacaatggcccagtgtctatccttagacaccagggactctgtcgcttgaaaacctctcttagaagggaccacttggggccaggcacggtggctcacgcttgtaatcccagcactttgggaggccaaggagggtagatcacttgaggccagttcaagaccagactgggtaacatggcaaaaccccatctctactaaaaataaaaaaattagttgggcatggtggtgcatgcctgtaatcccagctatttgggaggctagacacgagagttgcttgaacctgggaggcagaggttgcagtgagctgaaatcgtgccactgcactccagcctgggcaaaatagactctgtctcaaaataaataartaaataaataaataaatagagaccacttggcaccttgtggcaccatctagagtagattaaggtgatctgaggatgttaccttttgttttaattaacctatttgcttcagatattcagaaggcctcacagccaagcaaggggggaatggtgtgacacattctagattccctttctgtttctcttcctaaccttcaaagttactgtccctgaagttctacttgtatgttcagtacagaacccaggtaggagatgctcttagacactcctcgtgttctgaccttgctccccatccacacttcctgccttagtctcttgttacccagcatcttcagggaatggatatcctggctgtgaatcccagtctccttctgacttgattcccaatatctgctgccttcagagtaggtatcaagtacgattaaaagcccaggttctaaagccaaaccaagttcaaattctgctttggccatgacctggctgtgaaactctgagtaagttacccaagccaaggtttagattccctgttagatttaaaaataataataatggaaatartaatactcacatcatgggttattaggaaaatccagtaagatcagtcatgacaagtgcttagctctcagccactgttcagtcaacatgtgcttaaaaacagctgctttcagactcagtcgygaatcatggaagcctgtttttttctttttgatgtaagtatccatccctcagtctgatcacctaacctcattatttgtctattattctctaatttaatggttcttttatatttttggtttactaaaagctgttgaatccttttacttaggagactaaaaggggttttattttattgttctatagacctcctctgtggaaaaggggaatttaaaagtatatatagcgtaaagtaaaataacataaaatgcgtaagactggcatgccttacctctgccagctggtttctgcctcacatttgattgaatgacatcccacctttcactagctttgtagcctcactggcagcacttgtcacatttgtgctttcattacacccagacgctgtgtgagaaactcacccaacagcctgatcrcccaggctggaacccaattttaaaccaatgtgaacttgagtctgcccctagaggagtcaaatttggcctggcctttgtacctactcagccctgctgagtgtcctatactgatccccatcacctctaattmatttcattccaccagtgcctgggtcccagttttgacagatatgtttctctatggcaaacttggcactttgagggcctatgttcttaagggcaaaagtcattaaatctctttccctccaattttatctttcaattttatactctaaacatacaagtctttcttcttaaacttttcctggtgttttgtgggtacttccttcccactcctttgagatttggttgaataatctatgttccaaagtaattgttttgaagcaggagatataaaaaaaaaaacaagttttcttggaggctgactcamtgcaaggcccagcgatagacagggctctggaagggctttgataacactatctgcagagccagggccctcaagggatgggttccagagcctctccctgccatcccagagcagggatgagaaaaacaagtttttcttctctttcagcttccgccttcccccttatcattctcataattattttgcaaagttttataagttcctgtttttcccttctgtacagcatggcaaggtcacaagatatgcttcagttgcaaaacctgtcactgtttaacaaactgcctttgttctgcttctgtaagctgcttacccaccctacaggtttcacaccatcaaactggccaaccccctttcaaattcatgtataaaagtcaagccctgtctttgttcagggctcagcctttgggtgttaatccgctgggctggtgctcacctaataaaatcctcctgtcccacccattggtctctcctgtcccttaattcctgcaacagttttattatttagttttacttctttgagcacttctagatcatccgcctgcttcttactttcacttcagtcaatgctccaaagaatgaatcaccaatggtggcatctcagtttaataagttacagaaagataattccatttaccactcaaatcatgctatggactgcatattccaccaatgcagaacactagtcttgagtaaaacactgatataagaaatataaatttcagggtaggtatagtgtacatgtaagagtctagctgggcatgatggctcacgcctgtaatcctagcattttgggcagccaaggcaggtggatcgcttgagctcaggagttccagaccaacctgggcaacatggtgaagccccatctttacaaaaactacaaaacttaggtgtggtggtgcacacctgtggtcccagctacttggggggctgaggtgggaggatcgtttgagcccaggaggtcaaggctgcagtgagccatgatctgaccactgtactccagcctggggggacaaaatgagaccatgtctcaaaaaataaataaataaatagatagataaataaataaataaacaaagagtctagggtaactggagtttagaggttctttcagtayaaataaggcctaaataagaattatctacatgaatactcaggttgaataatttatatttaaatgaaaaattgaagggaagccacatcctcagtaagagtacagcattcaatgtatagatgaacaaagacaaattgattaagaatatattttaggggtcacaccatcctgagtttaaatactgagtccaccacattgctagttctgtgaccttggggaagttaattgttctaatcctcatgttcctcatcagtaaaatgagaatagccacagcatctatcttaaargtcattgtgagtattgaataaaatattcatgtcagttgcacatacaaatattcaataagtgttcactgctgctgttttgttgtagctgttgctaactggaaggtttggtagagataatttttaccaaaaaagttgaggttgagactcaggctttttgtgttggtcagtttgctttgatgtgtttccagccacttcttgctggttctcagtaccccagagataacctattatatctaaacatgttaatatgaaaagctctggctggaggcagtggctcacacttgtaatcccagcactttgggaggccgaggcagacagatcacttgaggtcaggagttcgagactagcctggccaacatggtgaaaccccatctctactaaaaatacaaaaatcagccatgtgtggttgtgggcacttgtaaccccagctactcgggaggctgaagtagaagaatcatttgaacccaggaaatggaggttcaatgagccataatcgcactctatgagccattgcactctagcctgggtgacaagagcgaaactccgtctccacaaaaaaagaaaaaagaaaagattttcaaagtgagataygtgtaatatgaactaacttatgttttaaaggggaatatctatatatctatgtgcacatagatatacacatatgtatatatatgtgtgttatattttaatcctatatatatatgaaaatgatggttaataagacctactgtttttccacatttcccaactaaagcccaaagataagaatgaagagacactaaacctctgatttttgcattctaaagagaattgtcaacaaggactaagtgaagcatctctctccaggtttgtgaaaaggtaactctactggctctgctacctctgaccaatttcccagcctcaccatcctgcttctcagcttatgttagaagcctgggaaaggggagaagagtattttcaccccctttgctgtcagggttaccaagggaatcccctgtgaaggtgagaggtggttctaagaagagactggcatcacattccttggttgatattcccctctgcctggctgagtgagaaactgagccagaaagagaagtagagacagatggcaaggcagagacagtagagcaggggtggaggacagcagaggagaagcctgaagcataagatagggtgttgcaagtatatgtgcatatctggtacatcaaatggatcttcagaagktgcctgggcttgaccaggtagacccaacagacagaggatgaaagtcacacccagcatagtaagccctctaactccaatcttgtttcctcgccctcaacaatggaggctccagagtgtaaaagaaggagaagggaaaggtgtcagtgacaaataaggccatgtgtctctattccaggtgtcagagccagaggagaagagtggacaacccaactgcccaccacaggtccctagaagtacaggtcaagcctatgctggggagaggcaaacaggtacaacatacactgggtttgagatttaaatttctgagtggaccaacttttaaaaactgaaagtgattgtgaaattgtggaatcattccaaaaggtcattacattaagggataataaagggggaaaacaaaaattgggggaaaaagtgttaagacttgattggaaaactagttacatatatctatcccacttactcccttgagactactctttattttatatcaatctgtatcttttattataaccatatgcgtgtattatttttatatgttaaaatagtgttatttcttgatgtagatgcttaccaaagtatttctcttttcttctgggtcctcagattggctaatttctcaggtccctggaagtgagggtgaggctattgaaatgtgggcagaagtgatacatgctacttctaggcctaaattcatgagatccttcataaatgcatttctcttcccctaaacacccccctctctctygtttcttgtcagctatctgatttcagaggatccaaccaggactcaggcttaggggagagcggggcctctgaatataaggatyctgagtctactacttaaagtgacagccacctaggaaaatccattaagcaaaaaattctgcatcagacttaagcctctgagctttagatttgtttatttctgcagcctagcctagcacaccttgactaatacactgggaatccagagtttgttcagaatgtcttcactattcttgttacaactttattgtccatagagattataaacactgtgcttcagacaaattaagagagcaagaggcctcataatgtagtagagagaatataagttttggagtcaggtttttttttttttttttttttttttgaaacggagtcttactctgttgcccagactggagtgcagtggtgcaatcttggctcactgcaacctctgcctcacaggttcaagcaattctcctacattagccacccaagtagctgggattacaggctcacaccaccatgactggctaatttttgtatttttagaatcagggtttcactatggtggccaggttggtctcaaaatccgtctgcctcagtctcccaaagtgctgggattacaggcgtgagccactgtgcccagttggtgtcagattttggtagaaagcctagatctgttattttcttggtagaatcagtggaaaatcctgaaccagtggccagccttctgtatttctgctagaacaccatgaaaaacctcttcccccttccttacaaaatgtacatgaaacagaattcaaggtcttctatctgtatgtaacttacaaaatagttgacagttctataaagctttgtcctttttcctgtttcttgtttccctgtagaactatttataaaaatgtttttctttttaaaggattttttattgttgtttaaagtatttgaaaaaaaattcataacttcaagctattttacatttaagaaaagatgtagtcaaacttggctgatgagagatagwaacccaggagaaactgggaaaatattccaggtgccttttttccccattttgactgacttatgccaattctataaaacactgctcatcatccccctgccaagtgatagtagagctcagtggggctcggagaagccctgccattcttcctctgcttagctgtaccagagctggtctatgtgggagccagggtctcttgggaagaaaaggaatggaaagatggggtttcattacacatcggttatgtcaccttggcttctccattcttcttcccttgggggttttatgagaaggcaaaaatcacatttaagggatatattgacatgttcattgtcaaaatctttgctccagccaaactgattctaggtatagtcaaacaacttggcattaaaacaaaaggacattaaccttctgtcagaatcactttcaagctgtgacttatttcaaggttgttttctctctactagacttcgtttcctcacattaaaaaaaatggatatatagtactacttagcttacagagctgctatgagaaataaatgatatgagctatctaaaacacttggcatacagaaaacattcaacaagtgaggctgaggcaggagaatggtgtgaacccgggaggcagagcttgcagttagccgagactgcaccactactctccagcctgggcgacagagcgagactctgtctcacaaaaaaaaaaagtggtcattctcttctactcagccaggcatggtagctcacacctgtaatctcagcattctgggaggccaaggccagaggatcacttgagcccagggttttaagaccaacctgggcaacatagtgagactctgtctctcaaaaaaaaaaattcacttctgctccgtataaggaatggtcccaaccctagttgctgttccttgccattgtttttcttgtggttgtctcatgataaaagaaaacagttgatggaaaatgatatgttagaagactctctcaaaagcctggtcttggctgggaactacatttatttattagagtttttcttaagacagttgaatataagaattattccaatcacttatgtcggaatccttcttagataaagcctcagtggcactaggttactccctaggattaaaactgggtaggggtcgagggagattagatttcagttgagtgctagagaagaaaacctgatctatttttagagaaaatggagatccctatgaaataatagatatagataacaattatcaatagctgcattaggtgaaaagctgctggaaacataatgaatggatcaggtgatgccttaacatcacaaaaggagagccaacacaacattatgattctccagatgtgatgcaatagaattctgcaaagatatttatgcaatctttttgctataaatggatctatcctctagatttaactattagtttatagaaactacacgggacagaaaaatatgttaaactcaaccacattgaattagcaaaatcaacactgaatttgggaaactttagaggacaatgccgtatgttctacaatgaattacaaagaaaaagaagagagagatggaatttatagattaaaaacttaagatatatatcaataaaatgcaatgtgttgcccttgtttggacactgagttgaaaaaaaaaaacaaatgtaaaacaaaattgaatctggaaaaggctggctgggtggggtggctcatacctgtaatcccagcactttgggagccgaggtgggcagatcacctgagatcaggagtttgagaccagcccggccaacatggtgaaaccccgtctctactaaaaatacaaaaattagccaggcatggtggcacatgcctgtaatcccagctacttgggaggctaaggcacagaaattgcttgaacctgggaggcagaggttgcaatgagctgagattgcaccactgcactccagcctgggtgacagaacgagactgtctccaaaaaaaaaaaaaaaaaagagtgaatctggaaacatgaaatttgaaaaattatattaatagaggattattatggctttttcaggtattaaatggtattgtgattaggttttaaaagagtccytatcttttagagatacataaggattttccacaataaggaagaaaaagagagaccaagagaagaggtacagatatacagacagagaataaagaagtaaaagctgcagatacagacaactatttttgagaaattttgctgtaaaaaggagacaagtaatgaagaggtggagggagacaaatggcccaagaaattttattttcacatgggaaatattaccatgtatttgtgcctgactttgtttccctattacaactcttaagaaagaaatgaaaagaagaaagagaaagaaaagagagagagagaaagaaagaaagaaaagaatgaaagaaagaaaaaaaagacagagaaagaaagaaattgatgatgcaagagagaggaagaataactgagggagtaatatccyggagtaagggagagggaatggtgtcaagtccacagtggaaaaggtgacccacgctaggaccttggacaatttttccatggtcattggaaggaatgcagaaagtatgggcagagttgtaagagtactggttggttaactggttagggggaataaggacattctcttctggcttttctcacttataaatctcagtgaaataagaggggagaaggagaggtactagtttagagaaacaggggaaggagtgaaacagttatctccaagtgtagaaatgtagtggggttgtcagagagtgagaacggcccacatgaatattttgcagtcaggaagttaaagtgtgctaacataattaaataggaggccattagactgaggtggctctaacactcagggttcccacataagcaaactgaagcctaactcagaatttaaaataaaatgaaatataagctcagccagtcacaggcagccaactgggctttagtatattgtcttgaacttcccaccagaacagtgcaaataaggcaattgttcaaacytttaccaatcaagtaatttctttgctcagcttccacattcaccctataaacaccctccctttgtgccctgcaatagagccctgaattacttcccmtttggagctgcctgattcatggatcagtttgctcacatgtatgctttaaaattttaatgtgccttagtctatcttgtaacaagtgtaaccattgagtttaggaccaccaacaaataccatgtgcaattctccagagccatattaagcttctcaagtgtcacaaataagtagaattatctggagttttgcatagagctgggttttcccacatgagtatggtggagggagagcagtacaaagaatctgaatggcacagagaatccaagctgggcagaagataagtgaaggcatgaaggaggtgtgcttaagtcaatggacttaagattttagaggggcagaggaattattgtgacgaaggctggggatggtgtgagagaaggccaagcagggaacaggccagtgtccatagagaccatgtcgggagctggaactctagtccccacccaacaataagaagaagctccttgcaactcaggtgtcatccaaagctgggtaaagaacctagatgtctatattcacctggcaataatgaggtggtgccccttccctgtcccctacctgggcagtgtcaaagccagctaaaatataaagtttaaataaggtgcagagtcttattacaagaatgtctgtgtttgaattgaaaatcactcctcataccaaaaccaggaagagttcaaatgaatgaagaaagatgatggatagatgctaacactgagatgacagaaatgttagaatcatctgacaaagattttaaagtagccttgataaaaatgcttcagtgaacaattaggtatgcttgaaataaatgaaaaaaatatatatcagcaaaaaatagaagatatcaagaacaactaaatgaaaataaatattagaactaaaaaattcaatgagaaatcaaaagcttggtggatggtatgatactataaaatatatatttcatcttcattccagtttcctggtacatagccgctaaaacccytggaatttctgaagtggtaagtgctttttattattattaktattattattatactttaagttttagggtacatgtgcacaatgtgcaggttagttacatatgtatacatgtgccatgctggtgtgttgcacccattaactcatcatttagcattaggtatatctcctaatgctatccctcccccccccccaccccacagcagtccccagagtgtgatgttccccttcctgtgtccatgtgttctcattgttcaattccyacctatgagtgagaacatgcggtgtttggttttttgtccttgcgatagtttactgagaatgatgacttccaatttcatccgtgtccctacaaaggacatgaactcatcattttttatggctgcatagtattccatggtatatatgtaccacattttcttaatccagtctgtcattgttggacatttggattggttccaagtctttgctattgtgaatagtgccgcagtaaacatacgtgtgcatgtgtctttatagcagcatgatttatggtcctttgggtatatacccagtaatgggatggctgggtcaaatggtatttctagttctagatccctgaggaatcgccacactgacttccacaatggttgaactagtttacagtcccaccaacagtgtaaaagtgttcctatttctccacatcctctccagcacctgttatttcctgactttttaatgattgccattctaactggtgtgagatggtatctcattgtggttttgatttgcatttctctgatggccagtgatgatgagcattttttcatgtgtcttttggctrcataaatgtcttcttttgagaagtgtctgttcatatcctttgcccactttttgatggggttgtttgtttttttcttgtaaatctgtttgagttcattgtagattctggatattagccctttgtcagatgagtaggttgcgaaaattttctcccattttgtaagttgccttttcactctgatggtagtttcttttgctgtgcagaagctctttagtttaattagatcccatttgtcaatgttggcttttgttgccattgcttttggtgttttagacatgaaatccttgcccatgcctatgtcctgaatggtaatgcctaggttttcttctagggtttttatgggtttaggtctaacgtttaagtctttaatccaacttgaattaatttttgtataatgtgtaaggaagggatccagtttcagctttctacatatggctagccagttttcccagcaccatttattaaatagggaatcctttccccattgcttgtttttctcaggtttgtcaaagatcagatagttgtacatatgcggcgttatttctgagggctctgttctgttccattgatctatatctctgttttggtaccagtaccatgctgttttggttactgtagccttgtagtatagtttgaagtcaggtagcgtgatgcctccagctttgttcttttggcttaggattgacttggtgatgcgggctcttttttggttccatatgaactttaaagtagttttttccaattctgtgcagaaagtcactggtagcttgatggggatggcattgaatctatacattaccttgggcagtatggccattttcacaatattgattcttcctacccatgagcatggaatgttcttccatttgtttgtatcctcttttatttccttgagcagtggtttgtagttctccttgaagaggtccttcacgtcccttgtaagttggattcctaagtattttattctctttgaagcaattgtgaatgggagttcactcatgatttggctctctgtttgtctattattggtgtataagaatgcttgtgatttttgcacattgattttgtatcctgagactttgctgaagttgcttatcagcttaaggagattttgggctgagacagtggggttttctagatatacaatcatgtcgtctgcaaacagggacaatttgacttcctcttttcctaattgaataccctttatttccttctcctgcctaattgccctggccagaacttccaacactatgttgaataggagtggtgagagagggcatccctgtcttgtgccagttttcaaagggaatgcttccagtttttgcccattcagtatgatactggctgtgggtttgtcatagatagctcttattattttgagatacgtcccatcaatacctaatttattgagagtttttagcatgaaggttgttgaattttgtcaaaggccttttctgcatctattgagataatcatgtggtttttgtctttggttctgtttatatgctggattatatttattgatttgcatatactgaaccatccttgcatcccagggatgaagcccacttgatcatggtggataagctttttgatgtgctgctggattcggtttgccagtattttattgaggatttttgcatcaatgttcatcaaggatattggtctaaaattctcttttttggttgtgtctctgcccggctttggtatcaggatgatgttggcctcataaaatgagttagggaggattccctctttttctattgttggaatagtttcagaaggaatggtaccagttcctccttgtacctctggtagaattcggctgtgaatccatctggtcctggattctttttggttggtaagctattgattattgccacaatttcagatcctgttattggtctattcagagattcaacttcttcctggtttagccttcggagagtgtatgtgtcgaggaatttctccatttcttctagattttctagtttatttgcgtagaggtgtttgtagtattctctgatggtagtttgtatttctgtgggatcggtggtgatatcccctttatcattttttattgtgtctatttgattcttctctctttttttattagtcttgctagcggtctatcaattttgttgatcctttcaaaaaaccagctcctggattcattaattttttgaagggtcttttgtgtctctatttccttcagttctgctcgattttagttatttcttgccttctgctagcttttgaatgtgtttgctcttgcttttctagttcttttaattgtgatgttagggtgtcaattttggatctttcctgctttctcttgtgggcatttagtgctataaatttccctctacacactgctttgaatgtgtcccagagattctggtatgttgtgtttttgttctcgttggtttcaaagaacatctttatttctgccttcatttcattatgtacccagtagtcattcaggagcaggttgttcagtttccatgtagttgagcggttttgagtgagtttcttaatcctgagttctagtttgattgcactgtggtctgagagacagtttgttataatttctgttcttttacatttgctgaagagagcttttttgtatgctagtgagatgactaggggttaggggttcaggatgagggctggttgccaggagaaccaaccttgtgattagagggttagaactttctctcccaccccaccaccacgccacttcccatccccctacctcttgggaggaaagaagggctgaaggttgagttaattaccaatgaccaatgatttaatcagtcaggcctgtgtaatgaagcctctaagaaacccaaaaggggctgggtgtggtggctcacgcctgtaatcccagcactttggraggctgaggtgggcggatcatgaggtcaggagatcgagaccatcttggctaacrcacggtgaaaccccgtctctactaaaaatacaaaaaaattagccaagtgtggtggtgggcacctgtagtcccagctactcaggaggctgaggcaggagaatggtgtaaacctgggaggtggagcttgcagtgagccgagatcacgccactgcactccagcctgggtgacacagcaagactccatctcaaaaaaaaaaaaaaaaaaagggctgggttcagggagcttctgggtagatgagcatgaggaagttctaggagggtagaacatctggtgaggacatggaagctctgtaccccttctcccacacctcgccctatgcatctctttaatctggctgttcatctgtatcctttgtaatatcctttataataaatgggttgatgtaagtgttgccctttgttctatgaatagttctagcaaattaattgaactcaaggagaggggttagaagtacagattacaaccttgaatcttatgacacttgaagtggggggcagtcttgtgggacttgtaaatcaaaaataaaattctaagcccccaaactgactgaattgaccctccttttgaccaagaggacccaaggaaatctgaaaaattaggccatgatggaaagccagtaggggcagctacagggggtggcggggacagacatgcctcattatactcttcccttttggagttcaagcacaactgaccaacattaacattgaaacagtgatcttaaaactgacaaaacagactctttgtagcaataagatccaaattctaaaatgactctagtacagcatcayataacagatagcaggccctgaagaaaatcaaagtcttttacccsaaaatatatttctttgacacattttgaaatggccctgcaaagctgtctcttgtggggaaaagctgcattctgtaggaaaatctccttcctttgttgcgggacaatcaaagactggagagactgaaaaaggttcaggagagtttattaaggtgatcacaggctcagccagacatacatccagaaagtctgagccccaaactaaaggctttcctacttttaaacatcttaaggcrggaaccatgtgaggcaggaagtaagttacggaagagagaaacaaaggcagttaatcaagcattacaacatttcttacatcttgagaaaaacatgtcttccaacctaaacttatcggtcttgtgaccctgaagccatgctagggaggtaagcaggaactcactgagcctgtaataaactttgatgaatgtggagttggggaatatagataaggtccactgaccacagagagaagacaggctgttaatattctcttttaacttaagtataactcaagttaaagttgcagcaactttaagaggatttaaaaatttctgttaccactactattaggttatagytgatttcattaattccttcttcatctttactatgtatttccagagagtgtgataccttttaacgtctaataagagacattcacaagtgttctctttgaggcctgctacctggaggcttcatctacttgaaaagaaccttggcttccgcaaccccccaccctttaccttaactcaagctgatttcaattcttcagccagagtttagccctttcaaccaattgccaatcaggagatctttaaatccacctattacctgaaagcccagcctcttcctcctttgagatgtcccaactttccaggctgaacyaatgtatacacatttttttttttttgagacggagtctcactctgtcgcccaggctggagtgcccaggctggagtgcagtggcatgatctcagctcactgcaacctccacctcccaggtttgagcaatttttctgcctcagcctcctcagcatgtattgatttatgtctttgcctataacttctttgtccctaaaatgtatcaaatcaaactgtaacccaatcaccttgggcacatgttctcaggacctcctaaagctgtgtcatgggtcatgatccttaaccatggcaaaataaacctctaaattaattgagacctgtctcagatactttttagtttacagattgagaccttaacctgtaggatctgacactatttccaggtagacagtgttgaactaagtaggacatgacacccaagctggtgtccactggagaattgcttggtatagtgaaaaccccccacacgtctagtgtcagaagtgttattgttagagtaggtagtcaggcagatatgggcaaggcaggaaaggcaggaatgtcaggcgacaatcaggtgatggtcaggcggttattaaactgtcactctaaaataattggttgcagtaggtgccagggaaaggcagtctcctaagagatagaaaacacctaaagctggtgatcagcagctttccaataagatctcaggaactgggcaagtgkgctcaagcatgcgtactaagaggcaaaatggcagattttaactggtatacaaccttcctctaggaacacttgactggtaagggaaaaacgcctcaaatgagaatgtgcacaacttcagtaaagacattgcacatgtggcccctcccaagtgctgacaggccactgcacgtgcagacagcccatgccaaggaaaaaatcaaaggagatacaaaacctcggaagcatgccaatgtataaaacgcaaagtcaaaagtcaaacagggcacctggatctctcaagttgcctgcttgcccctcttcctttggttcctgctctaaaactttctaataaactctcactcctgctcaaaaacttgcctcagtctctcactctgccttatgcctcttggatgaattctttcctttgaagaggcaagaatcaagttattgtagatccgtatggattcaccactgctaacattatgctgaatggtatgtgagagtagaaaaaaaaacactgttttttccctgtctctaataatgagcttaacatcagaatagaaataatagaagaaaaaaatcaaagaactggaagccagaatttactcaacctgaacaaaagaaagaaactagaatgggaaaaaaaagaaaaaaaagaacagagcctcagggacctrtgaaactatcataaaagatctaacatgggggctaaaaatttactccaagaaataatagctgaaaagttctcaaatttgtcaagagacataactatagaattcagcaatacagaaaaagaaatatacaacaggaccaagcaaggtttattccagggaggcaaggctggttcaatattagaagatcagtgtaatctatcttattaacaggctaaagaagaaaaacaccacatgcttatagtaactgatgcagaaaaaacacttgccaaaattcaacacctattcatgataaaaacactcagaaaaaaatagaaatagaggagaatttcctcaacttgataaagggcatctacacaaaacctactactaatattgtacctaaccatgaaagactgaatgttttccctctaagatcaaaagcaaggcaaggatgtctgctctcatcactcttattcaacgtagagctagacactctagcctgcgcaataaggcaagaaaaggaaataaaacgcatatagatctgaaagaaagaagtaagatctgtttacttatttacaggtaatgtgattacacagaaaatcccaaggaatcaacaacaaaagactcctagaactcaaaagtgaccaacaaattcctctttaagtaaagttgggtctctcacatgtaattgaaagagtcctttatttattcacatatccatcaactatttattgaatgcctaaaatttgccagtagctattccaggcaatagatacaccatcaaacaaaaagagttcttaccctcaagggtgatagtaagagatgtaaaaagttaaaaaatggtaaaagagaaaaaatgaagagtgctactttagaaaatgaggtaagggaagagttatttaataagacacctcagaaaatgaggaatttggccagggggatatctgaggaaagagttccagtcagtggaaactgtgaattcagaaagcctgaggctgaaacaggcaagtgtgtttgagaaaaagcaaggaggccggtggctgtgcagagtgaggcagaggaaggagaatgggctgtggatcagaggaccctgtgccagatcatacaactccttgcagttcatgtaaggactcggattttacctggagtggaaaaagaagcactgaaagatttgagcaggggagtaacctgatagcgtttatgtttagtcctgccacttcgacagataaacgcaccaatgggcttgatgagatttaggccaacccataaccgcccctcaacttctttcctttcaatttcaaaactcctctatggcttcctccatctgttcttccttctgagaagtgctctctctgcccctttacagaactaaccacttcggcaactccttggacactttccttcttgttaataatttgctttctccgcccctcaaaagcttgctgtttctgtaaatcattacctgtaagagkaaccgctgggagtcctgtaaactttagcccagagcttggctcctcctccagaatgtctccaccaatcaaggaaagtgttttgggccagtcytgctcctccggattgtcagactgctcctccctcttctttagactgccacgaggaaaaagcagatgtgagaactcaaggttcagggctgctcttctaagaaacaagtctgccataatctccatctgtgttggaatctgttaactagtgagtacctcatctcccctcctgtgtaagatttcctgaactggcacatctgttttttgagcaaagataacaaacagatgaacaaaaccaacaatcaaaaatgctgtcattaaagtcttgggcagccaaagtttctctcagaatttctcagttgtgtgatactatctattaagtgatgaggagtatgcacacacaaaaggctataaatgtagcagctgagttttcatgttgagccttttggtgctatttgattttttgaaaaactatgtacatgtattaagttgataaattttttttttaattttaattgaaccagatgcggtggctcaagcctgtaatcccaccactttaggaggctatggtgggcagatgcagatcacttgaggccaggagttcgagaccagcttggccaacatggtgaaaccctatctctactgaaaataaaaaattagccaggtgtggtggcaggtgcctgtaaccccagctacttgggagcctgaggcagtagagtcacttgaacctgggaggtggagtttgcagtaagctgagattgcatcactgcactccagcctgggtgacagaacaagactccatctcaaaaaaaagaccaggtagtggctgagattttcattgtactgtctgcttagctccccaccttgctcagtgacagatgggaatccatcttctgcatcatccagaaagtatgtaaattacttccaggaaactttgggaaacacagatgcaaacctaagagcagccagttttctcctttaggtggtcaagggcagctgcaaaagttctgtataggaggggcttcaggcagggtctggttgggtttggagacaacagcagtgaatttaccttgcgttgaggctgtatatgttaaactactgttattacttggatacttagagggagggatgtttagggagctgtggggaggctaaagcccccttggctgtagggacaaagagcttgcatttcagatgagaccttaaatactttcagaagcccatctgaccaggggtggtactgtctttcttagaagagttttccttaccaatgtttctgtggctcagtataaaaatctggagtcaccctgggaaagttatctcagcaattttacctacaaataattttataaacctgggaaatagaagttgtaaaatgctaagatcgatgaaaagggaggaaaagaactttgttgaggagaaggtaatcttatggttttgatgaagaggatgtcgatatttgctttttggtagaacagaatggttaggttcattttaagctccaaatgactgatcaattttcttttcaacatacgtttgaaggattctgaatgtggtgtagagtattgtatgggagctagggaacaaatcatactaaactctgattctattcagaatcagcaagctaagtatgatatatttatctccaatcatattaatatttacataattatttaatgtcttccttaatagtctataagcttcatgggagcaagaccagccgtgtcttgttcacagctatattttcagcatttagtacaggtctggcatataccaagtgttcaataaatacacgggtaatgaataaatgcgttgtccaatttaaatatgtgtgtctgtttgtgtatacttccttgtctgtaaaatgaaaatactaataaataactgcaaaatgcttaacagtacaaccacttgccagatctcagcaaaaatgttacgtccctagagagacctcctaaaaggtcccttttctcccattactctctttgttttcttgcgtaacatcacatttatttattcccttgtttactatatgtgtctttctatgagagcaaggaggaccttgtctcttgcattccctcctgtatcctctatgtctgaaataattcatggcaagtgattaataattgttgaataaataaatgaatcatgccaacctaccaagaatgaagctcaagaccttaagatatttgtccaaattcctgccttttatttaatagaatcagaaattgtttctaatacttcacaaccacttaaaaatactattcatttttacatccaagtaatgaaagaatcaggacgttccttttggaagacatagtttcaacattttatctaaattgcaaaattatacaaaaactcaagtgaccattgataggggaccggtttaagaaatgacagtgcagttcttcactagaatgtcatacaactgttaaaagaaaaaaatcagaacagggctgagtgtggtggctcccacctgtaatcctagtgctttgggaggccgtgtgcgtgtttgtgtatatttccttgtctgtaaaatggaaataataataaataactgcaaagtgcttagcacaggaggattgcttgaggtcaggagtttgagaccagcctgggcaacatagtgagacccccatctctaaaaaattttttaaaacacttagctgggtgtggtggcacacacctgtaattctaggtactctggaggctgaggcaggaggatcgcttcatcccagaagttcaagctgcagtgaggggtggtcgtgccactacactccagtctgggtgacagagtgagatccatcctgtctttaggcagggaaaaaaaggaaagaataaatgaataaatacttcatttaaaaaaatagaatgaagatctctgcgcactggtatggaaagcccttaaaaggtacattgttaaaaatgtttttagtgggcagaatagtgtgtattctgtgctacctgttgtgtaaaattggtggagaaataagaatctatactcataatttgcttgaatgcacataaagaaaccctgaaaagataagtagaaataataatagtggtttcctgggagtgagagcaaagtgggcagctttgagactagaggtgggaggcagatatttttttttccctctgtaccttttacagtttttttgagccatttgaagatattatgcgaaaaaaaattaaaaacagagagagacaagtagtgttgattacttaacttctttcagttgaaggaaacctgatgctaattctgttaagaggagagcagccaaaagcataggttgtgacttgccagcaaaaaacagggaccggtagttccctctgtacccaatccccaatgccaaacagaatgacattgttagacttaaggtcttaacctgcagggcaactgggattcagagtgattttagttctgttcttaagagcagccttttctcctaaagcctgccaagaaatttttgttaattcttcccaggaacataacagacaaggcccctgctctggtagaacttacatcacagtgcaaagatcagcaaactgtagcccatgggtcaaatccagccctctgcctgtttttgtatagcctttgaaccaagaatggtttttaaattttttaatggttgaaaaaataactaaaagaggaacactaattcatgacacatgaaaattaaatgaaattctagtgtcagtaccataaataaggttttattagaacacagccatgccaaaatttatttatgtattgtcaatggctgctctctcaatggcagagttaaatacctgcagcagagaccatatggcccacaaagcctcaaatatttagtgtctggcccttcacagaaaaagtttgctgacccctattctagtagagagtaatatgcttggcaccatgataagcattttgcatacagtatcccattcagtcttcaggacaaatctctgatggaggttctattagtcgctccattggtaaaatgtgaaactgaggttcagagtgattaataattcaaataaggtcatgcagttcataagaggcaaaactgggagaccatatcacatgaccatatgactcagtagccagtgtatttaaccatcatgccatagactggtgcttttcacacttgaatgtacataccagtcacctgggatcttgttaaaatgtcaacatctaccaattcagtagatctagagtggggcctgagaatgtgcatttctaacaagcttctaggtgataaagatgatgatggtggttcacaaatcacagcctctaaatcagtgattctcaaccatggctgctgcacattaaaatctgaggacattttaaaaaatataaatgggcccagagcccactctgaaatattctgatttaattgatccaagacctaggcatcagagtatttttttttaatgctttcttggtgattcaaatgtacagctggactgcaaaccactgctctattgaaatcctgtcgaatgacagtaaaaacatttaatccaaagaccagagttctagttctaactctggtatgacagaatgaagcaggctgtttcccctctctgggtctccagttttctttgcaggtgaaaaaggaaaaagctgaaaccagatggtgtcagagggctcaagatcactgacttgtcaggtcttcacacacataaatgggaaggacagaagtacccaggtttcctgatgcatcggttatatcaacatgatgcccaaacaccaggtctgcttagggtaaaactgcaataactgtagatgtcagctaaactgtccatttagctgacatctgcaattatgtattgttttggcaatgtatcaatacagaaatgcttccacatagccagactgccttacatggcacacagctagaattgtagttagaatgatgatttaatgattatgagagtaatatatattgcattgtaggaaatttggaaaattacaggaagtataatgaggagaatctcaaacactcataatccctagaactgtatttttaacagcctcaaccaagtaaatgacattgtgatcaaatgatttcccacagaagcaggcgatggcccagaggggcctccccgacaaaagtcctaaatgttaaagccccattattacatctctattaaatgcagctccaagcctggacttaaaagtagtatgggcccctattgagagcatgggaactgcaacctatcaactagacagttcataaactgtgacagtgctttcatgtctaattgttattgggctactctcgatttcttcatctacagattatccactgtgaaaaatgctccttaacatttctaccctactttgaaatctgcaggtgaaagatattagacaagaagccttagccctttgctttcagtgagattaagtgggtgacccagatctttacttctttagaaatgcatatgggtgtcaatagtgcacagtattctggagaatgggctaggacctgatagttctgggttcaaatccagccaatgcctcttactagtcattttctcaatctgtaaacagagatgataatagtacccacttcacagggtttctctgaggatttaataagaaagtgtctataaaacactgagcactgtgtttggaacacagagtgtacgcagcaaatggtactatcatgatgattatcaatactaataacaaaacttagccactttggggtatggctaccttcaggacagaaacaaatatatgtcctttttgcttgtcttttagatgaactggtctctgtgcaaatcctgagtgctaaagcttccaacaagactgatgctagctcgtgtcaccaggaagatgctacgtcatgccaagtgttttcagcgcctagcaatttttggttctgtgagggcactgcataaagataatagaacagcaacccctcagaatttctccaactatgaatccatgaaacaggacttcaaactggggattccagagtatttcaactttgctaaagatgtcctggaccaatggactgataaggaaaaggtatggggggagggccagtcagaccacaatttctcaactgggagtgattttacccctaggtaacatctctaatgtctagaaatatttttgttgc

SEQ ID NO: 96671 - DNA, 31165 bp, Homo sapiens
cgctgggatgactcctgaaacaccagcgttggcactgacatttacatgagaatgggcgtccgcaggccgtgctgcctgcccgaggacaggtgttccaggatgcggtccctccgcacgcgcacgggcagctcgcaggccctgcagtaaagggtctccaccacagacgtgtccccagagtcactgtgctcaatcaggtgcttcaccaccaggtcggtgaactccgccgcgtagtcgtgtaaagccttctttttcccgcccattgtcgggtccgggatggaaacggaagcagcctcgacccccgaccgagggacccgtgggatctgcgctcaccgccctgcgagcagaggcgttcgtgtcggagcccccacacctggggagcggggagctgcggtccctggttgtcccacaggagaagggggagggaacggggcaggcggggaggatgagcgcttccgcgtgcagcgggggctggagtgggtccgtccgagctggagtggtctccgaggggcggcggatgctcggagggggcggatcccttagggctgggggccaggacgatcccacccggagaagcctcgcgggcgagaagagggtcccttcctgcgggggcagatggaggcgcgggagccttccccgggaggtgaccgaggccagtcagcggccccggggacccaaggccggggactctcggcggccggtggacgggcagggccggcccgcctgggcaggcggcggggtgaaggtgtccagggcctgaggcggcaaagtgccgccgccgtcagccccgactgccacccaccaggcacccggcccatccccggctcccatctagggatccacacccgggcgccgcggcgccgcggtttaaagcctgtgagatcccgcaacaacccggatccggaagcgcggggtcgcggctgggcgagggcaggggtggggccttcggtgcagacccagggccaagtcgagggaggctccgggcgcggggcggggtcttgggcgtgggggcggagcctgcgcggggcgtagagatctgacgggtcccagatgcacctgcacccaggtgctgactgccccaccttaggcggtttctctgggcccgttatctccaagtggagccgctctccccacaggatttccctgattggcaagagggttttattttcttattaagaaaataaaattgactttgcaatttacaattttttttttacagtaaccaaaaatcttaggcttgttagtgtttgactttccactcagtttttgttgttttgtttttggtttttggtttttggtttttttttgagaccgagtctccctctgtcacccaggttggagtgcagtggcgtgatctcggctcactgcaacctccgcctcccagattcaagcaattctcctgcctcagccccccaagtagctgggactacaggcgcgagttttatcaataaaggccctgaaggcccaggttgcttttccgtgagtacaagaacacaacacctgtgggaggtgtgggcccaggggagggatgccgagctcacacgacccctaggtagcaaatagacgcacgtgtgcctttcacactccaccctcacttcacactggcccacccactccttgttctgggaaatgaggacgcagcaggagatacctgtagctaacacacacacaccttgccccccgcgatggccagacttccagggctgcctcgcttcccagatacattttctggtgccacttgtagggtccagccctatggggcttagcgggtgttctccccgtgtgcagagatgagagattgtaataaataaaggcacaagacaaagagatagaaagcagctggccccagggacaactaccatcaagacgtggagactggtagtggccccaaacggctgggctcgctgatatttattgcatacaagacaagggggcagggtaaggagggtgaatcttctaagtgattgacaaggtgaagcaagtcatgtgattacaggatacattttaggtaggcaaggcagagagagaaggcagcatacgtcagcgttttcttctctgcacttataagaaagatcaaagactttaagactttcactattccttctaccgctatctactacgaacttcaaagaggaaccaggagtacgggaggggcatgaaagtggacaaggagcatgagcattgaagcaccacagggaggggttaggcctccggatgactgtgggcaggcctggatgatatccagccttccataagaagctggtggagcagagtgttccctgactcctccaaggaaaggagattccctttcatggtctgctaagtaacgggtgccttcccagacgctggcgttaccgcttgaccaaggaaccctaaagcggcccttatgcgggtgtgacagaaggctcacctcttgccttctattcacttctcacaatgtcccttcagcacctgaccctgcacccgctggttattactagattatgttagtaatgcaacaaagagtaatattaaaagctaatgattaataatgattgataattgttcatcatctctatatctaatttgtatcatgactatccttattctaactattttctttattatgctgaaacagtttgtgccttcagtctcttgcctcggcacctgggtaaccctccgcccacagccactggtctgcatttaagccaactccaaacataccttctagatctgggggaaatctagccattttcatatgaagtgacaagacgagaagctttgatttgtttgtatagattgaatgtcggtcccaagataagctttctatttaatattggcttcgctatcgatcaaattgtcaccatgagtttctgttaactgaaccagaaatttacttgagtgttttaatagacgaggagtctgttgaacagcgtttcagagaccaatgtaaaaacaaagcataatacatgtgattttcaaacatgctggacctcaggccaatgtgacaacatttcctgtggtccaagtccccaaaacaattagagattcatatggaagactacaaaataatcaacaaaagagaaattggcaaggcaagaattctttctcagtatttgaggctggtaaaagtgctttatttcttattaaaatacagtatgtgtcacttaataacagggatatgttctgagaagtgcatcattaggcaatttcaccatcctgcagacgtcataccgtgtgctcacacaaacctacgtggtttacagcccagtctatgcctaggctatatgctatacctgttgctgaggctgcaaacccgtgcagcatgttcctgagtactgcaggcagttggaacacaacgtatgtgtgtatctacacatgtctaagcacagaaaagctacagtgaaaatacactattagatttttttttttttttttttttttgagatggagtctcgctctgtcgcccaggctggagtgcagcggcgcaatctggtctcactgcaagctccgcctctcgggatcacgccattctcctgccccagcctcccgagtagctgggactacaggtgcccaccaccacgcccagctaatttttgtatttttagtagagatggggtttcaccatattagccaggatggtctcaatctcctgaccttgggatccacccacctcagcctcccaaagtgctgggattataggcatgagccaccacacccggccaaaatacagtattagattcttaagagactaccattgtattggtctgtcatttggtctatgattgaccaaaatttcattatttggtatatgactgtaggtcaaaaattcaaatatatactaggcttgttttgtactttagatgcaaaaaactgaagagatttttggatgataaatattttttataaagtcatattggaaaggatggggtcatgaatttctgtggggaaaagaaagagagatcagattgtaactgtgtctatgtagaaaaggaagacataagaaactccatttcgatctgtatgaagaaaaattgttctgctttgagatgctgttaatctgtaactttagccgaaaccctgtgtcacagaagcatgtgctgtattgaatcaaggtttaatggatttagggctgtgcagggtatgccttgttaaccatccgtttgcaggcagcatgcctggtaaaagtcaccgccatcctccattctctattaaccagggacacaatacactgaggaaagctgcagggacctctgcccaagaaagcctgtccaaggtttccccccactgagacagcctgagatgtggccttgtgggaaaggaaagaccttacatcccccagcctgatacccatgaagggtctgtgctgaggaggagtagttaaagagggaggcctctttgcagcagttgagataagaggaagatttctatctcctgctcatccttcggaacagaatgtcttggtgtaaagccgaccattcgttctactcttagataggagaaaaccagcctgtggctggaggcgagatatgctggcagcaatactgctctgttcctctttgctacactgagatgtttgtgtaaagtgaaacataaatctagcctacgtgcacatccaggcacagtacttttccttaaacttattcatgatacagattcctttgctcacgtttcccttctgaccttctccccaccatcaccctgttgccctgccacactcccctcaccaaggtagtaaaaacagtgatccataaatactgagggaactcagagaccagcgccgatgcaggtccttgcatgctgagtgtgccggtcccctgggctgactgttctttctctatactttgtctctgcgtcttgtttcttttctcagtctctcatctccacctgaagagaaatacccacaggtgtggatggggcaggcccccttcaaatttccttcagtcagcaagcagagaagcctttcttcccattcagaccctaatcaaggcttctgaaggtaggggttttgtctttctctccttaaaagatgtcttgaggtaggcatttgaagcctggaaaatcattcccagggagtcaggctactcttatctactcttctaggtatttcttggccaaatgtttctaatcccagagcccaccccctaaaccttttttttttgagatggagtctcactctgttgcccaggctggagtgctctggtgcgatctctgctcactgcaagctccgcctcctgggttcacgccattctcctgcctcagcctcccaagtagctgggactacaggcgcccgccaccacgcccggctcattttttgtacttttagtagagacgggatttcactgtgttagccaggatggtctcgatctcctgacctcgtgatccgcccacctcggcctcccaaagtgctgggattacaggcatgagccaccgcacccagcctaaccttttctaatacaattactgtcttcaagccagcacatggagacatttgagctggactcctgtgtccttgggagctgacttttctttttttcttttctttctttttttttttctttttttcttttttcttttggagatagggtctcactctgtagtccaggctggagtgcagtgacgtgaacacagctcactgcaacctcgacctccccaggctcaggtgatcctctcatctcagcctcctgaggagctgggactacaggtgcacgccaccatgcctggctaattaaaatgtttaactcctgggctcaagcatgcctcccacctgggcatcccaaagtgctgggattacaggtgtgagccaccacacccagcccagaaggcaaccttcaatattgagctttgctcttctcaaaaacctggtgtcacagcactggcctccagcgcatccagccgcgggccccttttgctcaataacggtttctatggagacatctgtgatgccaccactgctcccaggagcccacaggacctggagctctggaagctgatctcctcccactgcaccagccagcaggttcatgttcgaggccatcttcccctccacaccccaagccaggctgaagagagatccacgggaaaagccgggcctgtcctcattcaggtccacattcaggcaacaaagctcacttggtctttgcatcccacgcctcatgttacctaaggaggccagcccrtctsagaggcacagttcgatgtccagctcgatggccagggccctggtgctcctccagagcatggccagccgggacgcccggtgcccagaatggaaaccgcaccaaaagccacgcacgctcagcaagtcggtccagaccatcagccgctactacaggaagacggtatggggtcccgggaggagggctgccacgagccttgaggtgacctgtttcttctcctccccaaaggcccatagagctgtcagcccacaaagcattccacaggccttctggtgatgggttaccaaagggggattccaggcaggcaacgaattgagcgctaggggtggaaagagccctgcggtcctctccctttctgaagggcctggtgccttagtccccacatgccaccggcttcttctgggttagctgctttgggttggtcctcccctcttgcagaccttggctcccggtgtctctggttggccaaggggagaagatgtacagtttgccccaagactcccaaggtgcatcttgaaaaggagagtgaaggggagaaaatgtgaaaggggacctcagccagtcaggtacgctgtgccaccgtgtactgggggagcccgagatggtcaccccggctcctggcagcttcctgggtgaatgcattgcctggacctagtggactatggtttctttttttctttttcttttttttttttttttttttgagacggagtttcactcttgtcacccgggctggagtgcaatggcgcgatcttggctcaccgcaacctccacctcctgggttcaagtgattctccagcctcagcctccagagtagctgggattacaatgtgccaccttgcccggctaattttatttgtttgtttgtttgtatttttaatagagatggggtttctccatgttggtcaggctggtctcaaactcccaacctcatgtgatctgcccgccttggcctcccaaagtgctgggattacaggcatgagccaccatgcccggctggactatggtttccaaagtgggtctgcgtggctcttgctgagcatccagtgtgctggagaggggacagaggggacacactgctgcagcctgcacacacgcaggccctttcaaccccagtgggagagtggcttagtgcctgtgaccagcagcatgtgtgggtggggtcggggggcctgtctgtgaatctcagccgacagtcaggcagaagcagggcccccgtctgtctaggcttcaggatgcctaagaagctctcggtgggcagccagtgctccagaaccagggggttgttgtgggcaggtctctggggaggcctgaggggccacacggtgtcctgggtgtggggtctgcatctacatacgactcataggcacctgccattggggcgatttgtgatggtttagggaaacagggtctgcccttggatgggctggcctacagtcaggggccttccttgtctgtcttactttccccgctctgccagagtgaacccaaggatgccgccagcctcaccggcttcatgtccaaaatggaacttcgaagggtcttccccacgcatcctgactgcccccagttcagcaccagggccacatccatgtyccactgtggtaagagccccccaccaggaccgcctgtgaaactgcctgtcagagtcgaggggccgggggaggccttcctgcacccttcagcctgcgagcagccgccagagttggcctccacagtggccccagctgctgcttttgaaatccgctctgtgctcagggagccagggcagcaatgaagctgggggtggaggggggcccacttctcctggccactatgattatgayttgtctccccagccttcttgcttttctattgtttcacccactaaaaattcagtagggtcaggggctaggggagtggaaatggttgaagattctggaagcttcaggaaagaaccccataaagccagatagctcattagggacagtgcccctggggagccctagcagctatccggtccaaacccttcactgctctgatgagaacaggaggcttggagcaggcagctgccgagctccatgggcatctgggggatgctgcccagagccaaggcttcatcccagcatctgctcctggacctggactggttccatgtccccacacaagacaccattcttagggatggcgagcttgagctaaattcctataaccagtagcaagggtggggtgggggggttggggagggggtcccgtgctgtccaccaatctcagccagcatcaggtagaagcagggccctcacctttctaggcttcaggcccccactgcctcagcaagagggtctccacggtggccagggctccaggaccaggcatttttgtgggcaggtctctggggaggctgaggggccacacggtgtcctgggcgtggggtctgcgtctacatactgctcataggcacctgccattggggcaatttgtgatggtttaggggaaacagggtctgccttggatgggctggtctggaggcaggggagcttccgttcgacttttaggaggcacatttttaccgaaggaaagtagggtctgcccctccgggggaaagggggcrtcagctagagaaattcagccacacttgggtctgctgaggtggagacaccagggcaggcaggaggatgaagcccaccctttggttcagcccttgctcagtcccatgcatccattaaaaaaagccacctgtgtccctacctggtgtttaaggataaataagagtctgccctggagatcttggggagacaagaccgcagcagtcaccagatggcatctttaacactctacaggttcacccactgaggccgatttgtccggagagattgacaacagctcggagacctggagaggcacccaggacctgttcttggccaggcggggctcagacacgaacgtggacggtgagggagcccctagggcctctgmctgcacctgctgggcccctgagctcgaggcctgcttcttgcagggtcgctgcttgtgccctgcggaattccctcccgggactgtctgcctcctgaggactcacacagaaaggcctccgggcctcccttgtgcagaactagccctgccttccctgacagcataggctgcagtccccccaggaccgtggccccttgtctttagtaaaaatcgtagttgaaagttttgtccccttggcctttacccagtggctgatgggtgcatccctcactgtgggtagagaccccccgggacactgctcccgcagacaggtgtgcctgtttccatttaccaagaggaaattcccagcaccatgtctcctttcttgccttaactggaggaaacctagagtctgtagtgaccagctcccctcaacctcaggaaggtggagaatctcctccctcctctcagtttaaagatggagaaactgggccgggcgcagtggctcacgcctgtaatcacagcactttgggaggccaaggcgggtggatcacgaggttcaggagttcaagaccagcctggccaagatggtgaaaccccgtctctactaaaaacacaaaaaaattagccgggcatgtggtgggcacctgtaatcccagctacttgggaggctgaggcagagaattgcttgaatttggtaggcagaggttacagtgagctgaaatcgtgccactgcactccagcttgggagatagagcaagactccatctcaaaaagaaaaaaaaaaaaagagagatgggaaaactgaggctccaggaggggacaagcaaccaggtgtgcagagacagcatcaggatgaccccctcgtcccgactcccagctccggctcgtttgtcctgggtgtctcggccagagcttccgcaccttcctgcactccctcagcacgcgctgtgctgggtgtgggcgccccatcgtgttcacagcagcaccacactgtgtcctcaaaatgagggtgacaagagttaggagacagattggagtctgtctgggcagataggggtttccgagggaagtctcggaagggtggatgtcgtcatcraagacgccagaggagctcggcagggaagggtctcatttctcacttggcctccgctgtcgccacagggtacctccttcccttcagtaagagcatctgcgagttcgattacttgcggaagaggagaaaatcccagactttgagtccggtcaccagcagctcagtcgcatctcagagctgcctgagaaagaggatgccctggtacctctcagtcatccacgagaaggtactggcggagggggtgcaaatcccggccccccacccctckctctgcgtccggctgggaggacagccctgctccctgacaggctctggttctagtatctggttagctgcatcaagcaggtccccatggcctaaaatgacctccagaccccctgctttgacaaagctcctcacccctgtccatcctcaccccagtgggtggcagttacgccggcatggaactcagactcaccggcacgcatgacttccaaccgtccacacatctttgcacccacagtatctgcttcagagaatgtattctaaataataaaaatcataacaggaataaccagcttgatttatgcacaagttgattcattgtagtgttattcttttttaaatctatatttataagaaagactaacctatattttcactgtcttataattccgtcatcaaattttagtatcaaagttactctggcctcattaaaatgaaagaaagaaaaggctggaaaacagttccttttttctttttatttattttctttttttattttattattattaktagtagtagtagtattttttgagacagggtctcactctgtcacccaggctggagtgtggtggtgtgatcccagctcactgaagccttgagctccctgagctcaagcaatcctcccacttcagcctcccaagcagctgggactacaggtgcgtaccaccacacctggctactttttgtatttttgtagaaatggggtttccccggccaggcgaggtggctcacgcctgtaatctcagcactttgggaggcagaggtagacagatccacgaggtcaggagatcgagaccatcctggctaacacgcgaaaccccgtctctactaaaaatacaacaaattagccaggcgtggtggtgggtgcctgtagtcccagctacttgggaggctgaggcaggagaatggtgtgaaccagggaggcggagcttgcagtgtgctgagatcgcgccactgcactccagcctgggtgacagagtgagactccatctcaaaaaaaaaaaaaaaaagaaatggggtttccccatgttgcccaggcaggtctcgaactcctgggctcaagtgatccactcgccttggcctcccaaagtgctgtgattaggggtgtgagccactgcacccagcaccttttttctttttctattctctggaagagtttgtataagactgatgtgatttcttccttgaattctgaagaatttgccattgaaggcttctgtgtctggggattcctcacaggagcactcttattttattaattwatttatttatttatttttgagacagagtctctctctgttgccaggctggagtgcagtggcgccattcagctcgctgccacctctgcctcccgggttcaagcaattctcctgcctcagcctcccaagtagctgggattacaggcacgcaccaccacacccagctaatttttgtatttttagtagagacgggtttcaccatgtcagacaggatggtcttgatctcttgacttcgtgatctacccacctcggcctcccaaagtgctgggactacaggcgtgagccactgcgctcagcctttattttttagagaaagggtctcattctgttgcccaggctggagtgcaatggcacgatcagagctcacggcagcctccatctaaaggggcacttttattttttaatttgtttatttaatttattatgagacaaggtctcattttgtcacccaggttggagcgcagtggagtgatcccagctccctgcagccttgacctcccagggttcaagcaatcttcccacctcagcctctcgaatagctgggaccacaggcacacgccaccatgcccattaatttttttcgtttttttgtggagacgaggtttctccatgttgctcaggtttgcctcgaactcttgagctcaagtgatcctcttgcctcagcctcccaaagtgctgggatagcaggtgtgaaccactgtactgggcccctacaggagcagttttaaaaatcacaaattaggccaggcacagtggctcacctctgcaatcccagcactttgggaggctgaggtgggtggatcatgaggtcaggagttcaagaccagcctggccaacatagtgaaacctcatctctactaaaaatacaaaaaaaaaaaaaatagctggacgtggtggcaggtgccagtaatcccagctacttgggaggctgaggcaggagaatcacttgaatccaggaggcggaggtttcagtgagctgagatcgagccactgcacgccagcccaggcgacagtgcaagactttgtctcaaaaaaaaaaaaatcacaaattcaattatttaaaaatatatccagattttctttttcctctagtttcagttttggtgttctgtgtttttctaggaatgcatctatttcacataagattttttatgtatcagcctaaggctgtaagtggtacaaggataattactagctttgatgcagcttgggcagggtggggacggcctctgtctcattcccgacgtggctgccttgtgcctcctttctttttccccattggtctcattggagttttatcaattttaataaccttctcttagaatcagctttagattttgttgatttttctctagtgtctgcttccttctttctctgcattcttttgaaactggtaaagttttgatgaaaattatggacatgagtcacaaaatgttggtgatttggtgcagggcacagaggtgttggggggtcatatgactgaatggagacacaagggggcttgccagtcccagctcctgggggtccatgatattcattttgtttactcctgcaactctacctgtacattattatagatttcactgcttcaagagtgttcctaccctttaaccaagtaatttcatttctgagaaataggctgagcatatcattagccaagagtcaggcagatatgctgttgttattcatgcaggcagcagggaggggatttaccaggtcatgcgtatgaaccatccaagggaagggctgcaggcttggctgcctccaggagctccaaggggctcatcaggcttttctttatctcctctctgccttygtctgggctgtcatagataaactcttctcayttggtggcaagagagccacctgcagcaacaagtttgcagctggcattgtgtgaactcggcagctctaacaggaaatcggatctcccttccagcagtccttgcactattttgagacgtgcaagtgtctcgggaccatggcttgggtgatgaaatgtgatttctgcactttttttyccctttaactttgtatttcaggcataaagtggtaagaatccatactacaaagattcccatgtacttttccattccccaaatgttaaatgtggccacgtttgctttatccttctctcctctctctcccccttgctcctctctccctctctcccttcctatatcataaattttcacacctatctttattccttttcttctactttctgcgggattaattttagttctttttctgaactcttgagatagatacttgggtcatgattttccatttccctcctggtatatgcattttaaggctataaatttgccattaatcacaactttaactgcgtcccacgagctttgatgtgtccggatgttcattatcagtttaaaatgtttctagctttccttgtgatttcttttttgacccattggctacacagaagcctatcacttactttccaaacatttaggggactttctagttatctttccttccagaatattctgttgggatcattttccttccacctgaagaactccctttagtatttctctaagttcagatctgctggtcacagattctttcaatttctgtttgcctgaaaacatctttatttttgtctttaattttgaagaattgagggagttgagattctgagaacaaaagtttgaggagctccccgacaggcccytagggaagcttggagggtgttgccggttaagtgtcggggctgcaaagaagactggtgtcctgtggtatagtggggtgcagggacacaccacgggccaggtccgaaagggaagctgccttgcaactcctcggacgaggatttaggatctgttcttaggatgggtgcagaggcgctggaggtgccaggcatggctgcagtaaagagctggcacatcttgatctccagatgtgtagtgctagctctttaccgcagtacctatcttgaaatccctgggaccctggggttttggggtaccacgacagcagatctgctcctcctgggtgggctggaggcaggtcaggggaagagtgtgtggctgcatggcccacgggggctgcccttggttttctgcccaggatcactgcctgtctgagctggagatacaggttcagaagaaagacgaggagatcctgctgctccaggaggagagggaggccctgaagaygcagctgaaatgccttctgaaaggcaaaggccaagagacatccatgtccccaggcaggagggtgagccagccccagcggggcacagcgcagagctctaagacggttgttttcaaagcgtccaaagctgctagtgacacacaggcccctggcaaacccccaggccccctggatcctatcaggtcctcactggaacgtggaccggttctcagggttctgatcaacaggcaggggagaggcgaacagaggcacgaaatgacaaatgagagccatgagctgatgcaacaggsgggggagagatgaatggaggcgcaaaatgacaaatgagagccgtgagccgatgtctaggcacctgcacctggcttctgacttgctttctgaatggggcaaggcacaacgctgtcggggctcagggtccttatccataaaatgagggctgagctcacctgtgaaatcctggggcatggaggccaccctgcaggcggattccccgggcctggctctgtgcatcatctgcagtggtagcttgtattaccctgccctggccaggaatcccttctccccactctctggctgtgaagccccctgcgaggttgggcatggggttggggtgggggtggggtagaggtggggatgcaggtggggatgctaccccacctctaggtgtgggcagaggactggacgaggcaggtctgtgttgtgcccaggggcggtcacctgatcttcctaagatttctttcacacctgaggagacagcctgagtttatgctgggggccagagatgaagcaggaaccagggggaaggcccctgaccatgccaactgccctaaatgcctcaagggaaggctgcctagacacacagggcgggggcagggaaaggtggccagccggcggcttccactctctgtcctccccaggctgctgggtgggtgtctgagggtgggccacccaggcaatgacatgcacrgtgggygtgtgtaaggctggctggccttgtcctttactgcaaggccacttgctgggggctgctctgggggtgcctagagccccactgccccccagaactgcccatccgcaggttcctgtgccctccactgccacagcacccacatcccccagccccttggcaggaggatgcaggtcccctccccagacatgagaggccgctgtcccttctaggacaggcagtggtctgtccctggggtgcygcaggargggctggaaagctgagggtcccacgggcgtcttgcaggagcagctctcagacgcttcgctgaagctgggcaggctgagcctcctgaaggccttctccagacatgaggaggagctgcagcactggtggcaggtgcgggccgcctggagagcaggcacgcagygggggacccgggcccaggagccacctaggctgcttaactaagaggcccaggccccaagtgtccctgctgcagccctgacctggggtgccccactccaggggagcaggtgaggtgggtgggtcgttagcccccttgaaggcacaggtcaggtgcwgtctactgacagaggkaggacccgtgacagaggccacagtgcctgggccactsttggtgaccttgccaggcagatgctctcccactccctggaccctgcagcagcctggaaggaggcgccctccccggtgcccccgccatgagcattagagccctctgccctgggggtgccccgcagccctgcccagcccctgccctacccatcttacagatgcakgaggagtctgcggcaccggagaggggcaaggagcccgacctgggaggtggcgaggaggacgagggcctggaaggggagcccgatggggtggaggacaygggtgcctggggaggtgtgagccagatgggatccgtgcatgaggagggaagcgaggaggaggaagaggaggaaggggacagggatgaggactcagaggaaagggagctgcyggaggaagaggagatccccaggagaagggcctcctccctggccgagtcgtttgaggaggagctgctggcccagctggaggagtacgagcaggtcatcctggacttccagttcaacctggaggccaccaggaccagatactcccttgcaacaggtagggcctcggcggggggcactgggctttggccactcagtggttcccggcccaggagctgggacgcccagacgctgcctgctctggtcagtgagctggagcaggggcaggtgtcggcagcctcacccaggctggcagagccctcccagctgccgcagtggcccggccctctccttctgtccctcactgcccctgcttgctcctgctcaccgcctctgcctctgtgcccaggagtgattgcgtctttacaacaacaagtggatttccaagaaacccagctgcgaaagatcaatacggaaaatgagacgctgcagaaggagctccgagagcggaggcagcagctacaagccatgaccgacaaggtggccgtgcgctcagtaccggcctccgctccatgagcatgggccccaggcttcattaacccccggcagctcggggcaggcgctgcccgtcccatctactgatggagactttgagcctggggtgtccaggcagctggcccagggttgtgcggctgatagcggccccgctaggattccccaaggtgtgtgggaggctggagcccatgtgcccagccacagctctgccctgtccctgggctggargcaagtgtccctgtctcctgagccgctgtgctcttggccactcctcaagcatctcctggcccctgagtcctgggggtaagaacgcyctatccgtgcttagagagactgctactccactgagcccactcttgtcgtttttgttaagcgttttaggtttttactcttatcaaagttattcatgcacatcgcttaaagaatcaaatagttccacgaggcctgtcatgaaaaccaggagcctctgacctcctccctctcattcgccctctcctaaggcatcattttaaattcttccagcacgttctttatgaatctatctccaaatctctaaatagcatgctcatagtggccattctagattgttctccatcttaacattatttaatgcttccttttttttcctcccttgccaccgccccccarcacacacaagggcagcctttccatccaccctcctcctcgtatcattctatcacaatcaatgttgcactgacatcattaggacagttatttgtctcacacacatacataaataaaataagttttacagaacagtactaagattcataaaccacaactttaaaactgctgcatcccacaccttttgctttcttgccctcttcacttatttttggtggagcacatcctccagtagttttatcaaaaaggataaatgaggctgagcacgatggctcacacctgtaatcccagcactttgggaggctgaggcaggtggatcacctcaggtcaggagttcaagacccgcctgaccaatatggtgaaaccccagctctactaaaaatacaaaaattaaccggtgtgatggtggatgcctgtaatcccagctactcaggaggccaaggcaggagaatcgcttgaacccaggagaaggaggttgcagtgagccaagattgcaccattgcactccagtctgggcgacaagagcaaaactccatctcaaaaaaaaaaaaaaaacgatgaacaggggtaaagttttggggacaggatatgttggcaaatgtccttactctataccctcrtaacatctgggttggatatagcattcctgtttgaaaaccattttccttcagcatcacagaggccttcctctgttgtcttccaggttggccgatgataagtccaaagtcgttcatggttccttctgggttggttgttcctctctggaaagytgtaagatcctatctttgtcccaggtgatctgaaacctcccagagttgtgctttattgagggtgtgttttcatctgttgtattgggcactcagtggccatctggaaactcatgtcctttagttctggaattttctttggttttattgtttttttatggccttctctcacactattggacctcctgtcccgctcttgttttatctgttatctcaacctttttgtctctttgtctcttacmgatactttctagaagatttccttaactttatcaacagctcttttcattttgttataatattttactctgatgttctctgagtgttccatttttctttttttgaagcgcactcttgtttggcttcacaattgcagtattttcccttgatgacagcgttcatcatactgttagttttctaacttcttgcaccacttctatttcctacaagtttgcttttggtgtctgtcattcatctgagagctttgctccaatgttcgagttgactggactctgagcacacaggtgaccactctgtgctccctggcagagcagtgtgctttgctttggcattttaatggagagtttcttttcttttcttttctccttttttttttttctgagatgggttctcactctgtcacccaggctggagttcagtggtgtgatcacagctcactgcagcctcagcctctccagagtcgggtgatcctctcgcctcagcctcctgaggagctgggaccacaggtgcacaccaccacacccaaccaatgttcttattttttgtagagataggatctatgttacccacgcttctctcaaattcccgacctcaagtgatccacccacctcagccttctaaagtgctgggattacaggtgtgagccactgcacgtggcctagggctcttcatttctgaaataacattccaccaatcatcctcattttagcctccatgtttagaagaacccagaccaacaatgtctgagacttttaggaactcaagtgtgaattgggcttattttctgcttttcctactgccggctatttggctttcttggatctgggatgtcagataccactcagccaccttcaaactctccaaaatatttttagtcctttttcttcttctcttctccctgccttcaatagaaatcccgctgctattattttagggagctttggggaaggaaaaaagttagatgccggaattcagtctgttatctaaacctgggagtcccccaagccaacccttctgtctccttccagttctccaacctccgagaagataagaaacaccaagagatgatggggctcattgaaaaggacaaccagctcctccgacaggtgacagcctgggtgtcgttaaatgatcagccaggccactgttcttactgtaagtcccaacacagcaaagggcaagacggggctggagcgtcttcacagctgagccaggaccccttcggtagcatgccactcgacagatctctgcaccccacgtccacacagaaggctcctcgcaattgctgggtccagactggactggagggacccagcaagcgttcccagtccttttttttttttttttttttttgagacagagtcctgctccgtcaccaggctggagtgcagtggtgtgatctcagctcactgcaacctccgcctcctgggttcaagtgattctcctgcctcagtctcccgagtagctgggactaccagcacttgccatcatgcccagctaatttttgtatttttagtagagacagggtttcaccatgttggtcaggctggtctcaatctcttaacctcgtgatccgcccaccgcagcttcccaaagtgctgggattacaggcgtgagccmctgcacctggccgccggccatcttttaggaaaaagtggatgggtgccacacatactcaggttgggcgaaatgaccccacctcttttttctccccggctgtccccagcaagtgtcggaactggagagaaagctcaccaagcgggactgtgtcatctcagagttggacaccaaggtcagccagctgcaggagcaggtggaactggaccagaaccacctgcagaggwggaagcagctgcaggaggatttgcagagcaagaaggagatgattcagcaggcagagcagcacacccgcgtggccctggagagctcccagtccagggtatgcccagcccttcctcctgagggtctgtcccagcagctggcggccgagcacccaggcctctgcccaccgcccaccraggtagaaccggggtctgwgtacgctggggctcgggctggttctgccgtgtacaccagcatccacacagagttgacactcaagaaatgtgggtagaggacggagtgagagtgcaacagagtagcccggaaatgttcgtcaatggcagtggtgggcggagccccatgggcagggctgcgggtcttgggttgcattgtgaaggggttggatcactggctggaaaggaggagggcrcctggatagggaggcatggtgttgcccccctcatctctgagtcatagcgtgcttgctggaccaggcaccattctaagtaccttcttggtatcaaagtcatgtagctcctttaaccagactgcgaagtagttatcatgatcctcacttagtagacaaataggaaaggatgaacagtccccctggacagcagacctgctttgcggtggtgctgggatttggcagtctcaactgcagggctccactggggtgtcatatgaaacgtgagcaaggccagagtgtgccctgcttgtgagggccccatgccaaaaaggaaatcaataaagagctgaccttttttttttttttttttttttctgagacagggtctttctctgtcatccagtctggagtgcagtggggtgataacagctcactgcagccttggcctcccaggctcaagctgtcgtcatcccacctcagcctcctgagtagctgggaccacaggcatgtgccaccatacctggccaattttaaaagctttttgtagagacggtctcactatgctgtccaggctggtcttgaactcctgggctccagcaatctgcctgccttggcctcccgaagtgttgggaatacagrtgtgagctaccgtgmctggccctgaccttgatttagaatccaaaattaagcaaaggtcaaggtcatgtatggaggcttttgaagtcaggttcccaccagaaatgccaactgcaactcaactgcgtcctctttcctgcttgagtccacctccttccggctgggtcagactgaggcacccacccctggtatcccttgataaaacagtttgggatccagccgtagtcctggtgaaagcgttagaccagaggcggtctaggtgtgtccatttgtgcgccagcctgcactgacctggtggagcctggaaagctgagctgagaaatattgtgaagctaagtccgggtgagcaggaactagcgccaagcctgatggtgaggccccacgggtgtggggaagtgaggctggacaccccgggtagctgccaacctctaccctggggagggacccccagtacagaggcccagccccttgtgacctcacgacctccagcacctggcacggtgtttgtacaaagttgggcgctcaataaatactggaaagaaggaaaggattccactcctcacacaggccaggggcccatgacattcctgctgtcacttaaacctgtccgagcggcagtgtggacatgcttccactcggaggcaaggctgagcctctcgggcccagctcctgtggggcacctctgcgtcgtcagggtttctggacgaggaactcgtgctgagcgtgccgcataactcaaggggttcctgtctgaggctcctggggtgcagattggaggggtttcctctgcagcttcctgggaggcacgattagctacctctggggaggcggctgcgggtgtacaggcagacaaggatcttcatggcagcagaagacgagaacgccttctgggtctgtgcgcgggggccaggttcaacgctgctgtccatggcacagacacctcctagtcagcatggaaaggaggaagcaccagcagcgcactgttaaatgcctaaagtgagagtgtccccaagggccaggaagtccgctcactgcagctcccctgggcagtggaggatggtccaggggttacgtgcggcttctgtactattttggtttgttggtttaaaaatatatatatatgtgtgtgtaggttttactttccaattagaaaagcccacctggtgtaggagagtctttgggctttggggctgggccgcacagggtcaggggttggatccggcacctcctagctctcagacaatccacattgacttctctgacacctgtttccagtttctaaagccatgaaaagtgagggtgagctgttccttcctggtacataaaaaataaggtggtggggggtgcagcccactggccaggtgccttcttgggtaaaggcraatgatagtgttgtccctttgctcacagctcgagaggttaaggaataagatcatccaggccacctttagcatctccgggaccaagtccttggccaacgagatctctgacaatgacatcctggaagccctgcaggtatacccctaagctcagctgcctctatccgggccccagacccccaggccagagctgtggtagggggttgtggggggcctagattccagggactctgttctcatcctacctgtgtcacctattcacttggaccccaggaccctcctttctctcagctcaggcagaggggatcaaatcatcctaaggcaggtgggggcatggcacgggagtcttagctactctcagcaaaacgggggacgggcatcagagaccagcagtaactgccacaacccatcctgagcgctgtggagaggggacaagccgctcagggcacgaagattctcccacagcaggagcccagccccggctttgtccagcttggtcccctccgctggtatcaccacccactgatccagggccctggtgcagacccctcccaccccggccacagcctcctgggctccttcctgaccaggggtccccaagcaagggcctcggagaagtagaggggtgtaggagaattcaggccttggggtcactgggcatgagggggtcaccacccaccagctgggggccacacactcacttttctgagccatagatgcctccctctgtgatggacagcgcatgctcacctgcaaggtgtcgtaagactcagagctctgggagccgggcaccggctatggctctgtgtggggctgtgtactacgaaggggtcacctctcaccaggagctgcttttgttcccaagacccacacttcaccctctggggctgcccttgaaccccagtgtgtgcccctgaccttccagcacccacgttcctggggcctggttcccttcctctgcagagtggggggccctggacagtgcctctcctgcagagctgtaatgtggagagaggtctctgcggccttggtactgttgtctgggggaggggaggaggaaggggagagaaagaggaagagaagagggaagacagaggatggagggagttattcccaccgcacagtagccagggaagagcacctttgcttgcttgccatagcctgacatgaaccagcaacggcccagagaggagaatggaagagaggtggggacaacattccctctgtacaggacagaagggacttgagggacagatgtgacgacctcaaagatctctaggagtctggggctcctcacaactctaagagggctgaagagggggcttagtgcaggcttctgcgggctggtggtgtgcacctgcccccggctccgcattctgtgacttcacttccgtggctgaaaatcagccactgtgggaatattmccaccacagaaactggcaacgccacaaagccgagggttgtttgttttttctccccctggagagccggttgtaagtattcaccagcacacccctgctrcagcaagcctctctggaggaggaggagagggtggcgtcccgggcagctggcacggactgtgcagaccggcctcaaggccaaggtgaggaactgggaaggccacctcgacggctgtgtttcttgtgtagagaattatctcagagagaagcgactactataatcagctgaagcagaaaggcgtcaaagtgcccccsctgcaacagtcasaggccttcctgaccagcaaatccaagaaggggacctccaagtaggcccagccaggcccccaaatacggtcagcccagcagaggccggggcccagctccagaaccacccgcccccaccatgcgtcctgctctcagactcagaattaaaccccggtgttggcactgtcccacctttttcttctctgggatccacgcgggggcctactctcctctgcgaccttgagctacaaggacactccccattccaaagctcactcacagggagtcagcacaccagcctgtgcccctagctcctaacaggtccccttgcggcaccaggctgccagaggcctgagccggggtgtccgcccagcactcagcacagacctcacgcctgagcagaaggggtctgtgaccttctgccctgggggctctcctggctggggcactctcttgctggaggacccctctggaagatggtgagggtggggggctctgttcccatccccccgctcctggaaggaaagctttacgcacgggaacggtgtctgtggtccccgacgcttccccggcgcctctgaggctctgggcgcctgaacaccttcggaagggactctccccatcacccttctctgctccccacccacacctgcttcccttcccgccgcgagcaccgagcgtgggccacgtgcgggcgccacgcccctcaagccccggaggaggacggtccccgcggccgggtccccgaacccagcattcaggcccagacgcgcccagagcctcccgcagtctcgtcggcgctgcagccgggtccccgcggggctgggaggctcgtggcgtcggaggggctccagcaggggtgaaggaggtcggggaccctggaggccccaagggcgagccgtctgggggcagaaagtgcagccctctgcagaccctgcccggcccccctgcacctcctggccccggggctgggcggcctagagccccggccccttccggacgaggcgtctcccggccccactcgccccgcccccagccccttctggaccaggcgcctccccgctgcggccctagcccttccccgcatggccccgccccctctcgccccgccccctctcgccccgcccccggccccttctggaccaggcgcctccccgctactggccccagaccttccccgcatggccccgcccaccactctagccccgccaccttccggaccagacacctccccgctgctggctccagcccttccccgcgtggccccgcccccgccctcgccccctgcccaggcccggcccctgcggagcccagagacgcggggacacaggtgaggcgcgcggggtccgggctgcggcttcccggtgcggccgcagtgggcaggtgcgactgtgcgcggcctcgctggctgagaactggcgggggtgggggcgtgccctggactgacccccaccggcctaacccgcggtgcggggccagggccggaactgcccgcccggctccttgcccggctccttgtggctgctggggacccccgacaccagccactttcccttcccggcccttagcaagatcggcttctccggtcacctttatttttttaggctcgaggcgtctgccgcacctcagcccacgacctgccccgctgggaggtgcgggccgctggccaggccctgaccgcaacctggcccagaggccccagccctcaggcaaggttctccgggtaagtgtggggccctgaggcgctgtggggtgaagaggtctatggaggggcgcctgtgtacctagggccttcctgcactcacaagcccccaggaggtgccaggatccgggagcctcccagggcctggaggggagtccctgatgggttcctgccgccacacctgtgaccatcacatgagtgtggagagacgtttactgagcaagtgagggaggccagcctcaagggccggctctggtggctgtgcaccggggtgacttgggaacaacgtgttctacgtcagcaagacaggaacccatgatcccagagttgaacacactgggcttgacccctcccaccgggaggcccatggtgggctgctgctgtggacttggagcctcagcactcccgagactaatgctgcgtggatgtcgggttgcaaggcggctgctgcagctccagcagctccagccatcacgtcgagtctggaagaaggaggtggctgctgctgctttcacagaagcaaactctcccatcccctgctgcaccctggctcctggaccccagctgggtgacttgggaaagcaggggtggtggtattaagcttgtcttacccgggtcatggctgttacctggggctggcacattgctgctgggaccagaatgggattctgcacaccaggcaagagggcgtgaacctcgggtaggcagctgaccgctccacatgctccgggaaaacagcacccatactccagtagaggctgggcctctccgggcctgagtgccaggctgcactgagccagggctcccaccgaaggcacactttatggctttgagacagctccttctgcctctctgggctttgggggaaggcagacatggaagtgccgggagtctcagaactgcctggggcctgagtttctgagctggcttcttgcaggggagtggctgctgtgcctttaggcctctgtgccgatgacctgggaggaaggtcagccttccccgctggagggggcccagcaaagcctcagctcctagaagtgaggggcctgccattgcctgcccgaggaccccactcctgggggccagatgctgagaggggacactgggggcccagcagaccagagagctgaccccagtcccacagcctgggtgggttgtcaacttctcgtgccccctccaactcctccacccccacacccccttaggtaaataggaggtcgaaacagaggccagagggtaaaggaggtgcttagagtccgggctggctcaggccggccgggcagctgtgctagtgcttggagttcctgctcagtccccgtggtctcctcgcccctctgggcacttgggctgccaggcaccgagctgagtgccgagatgcaaagatgagtcccaggtctgcaggagttggagcccagcagggagctggccttggggccgggcccctcctgctctgggcagccacccagccctacgaccctcctgtctctgtagggcctccccaaggccttgaatccaccccggccccgtgctcagtgcatcgtgccccccaagccccagccctcctagaggtgtgggtgggggaggggctgcaacccacacaggctgaggacacagctgctgccactgcctggggccagccacgcatcctccccagacagggaccggtctagctgtaccagccgctgccccggacctgctgccctgccccacgcaccccccctcccctggccagcctccccagaggccagcaggcgccttatcgggcagggttaaggagggggacagttatcaggggctgcagcctaggttgggccacaatgtcctcgtctcttgagggtggcaggctgtgcaggctccctgataaaagcaccggggaagggaggctcctggagtgtgctggaaggaaacactggcctcccacatgcctgaggtcagggcttggcctgagatggaattctcgcttggtcccatcctcccggcctgaccctgggcaaatgactctaccactttgtgtctaggtcacctgttaagtcaggcgacagacccggtgagggagtcagcccccgacccttagtgcccctctcctaacagcagcctcagagggggtcttgactgccgccctccatccgcttgttttacagtgaagccacagcctggccacctgtcttgatctccccaccgagaaggccccgcccctcccgctgcagccccacagcatgcagccccaggagagccacgtccactatagtaggtgggaggacggcagcagggacggagtcagcctaggggctgtgtccagcacagaagaggcctcacgctgccgcaggtgaggggcctgagggcagcctgccagccatagcaggctggtgtctccctccagagacgcctgccctaacccctgctaccggccccatcaccctccaccccatcctggctgggagcccacggtccagcagctcagcaaaccgcagcctttggccttccctctggttggctgtgggcggggagagcttcctctcgactccagcagagcgcccaggcccctccccctgacccagaccaacggccacagtccacttagggggcccctcatgcggccctggcctggggctcacctccagttggttctcaccccaggatctcccagaggctgtgcacgggcaagctgggcatcgccatgaaggtgctgggcggcgtggccctcttctggatcatcttcatcctgggctacctcacaggctactatgtgcacaagtgcaaataaatgctgccccgcatgcacgcggggggctggccgcacacgtgagagcacaggcctggagacacaccccttgtacacatggacccccccacagacacggaccctgcggcacacacagcgcacagggcacacgcgctggcagccaggcacacgaagacaccaggtgcacagctgtcatcggccccacacgggggcgcacaaacacctggcacacagcccttcaaaggacctacaaacagctgggcacacgtggctgggaggcctgggcccagcctcagcaggagctgcaggacacacccaggctgggccctgcggcctggagcccccagctacagcctcctctctcccagggcccagccccttcccttgtgaaggccaggatgaggggttccttcagcggacaaaccgagcccacctccctggcagccccccggggtgggatcctcccggctgctttcctccgtgggagcagtgtgcagagctgtgtggccctgggcaggcccctgtcctctctgggcctttctgactcctggttttgtaagggtggctgtgtgtcccccgcccttgtctcagatgcaccatatcttccttagtaagtgggcacagttcttcctaggcagcccaccacgcgcagaggctgggtgtgtccctcttggggccggcggctgccagggaggacccgggtctaccctccctccccagggatgggcctggtccctccaagtactccttgtgggccaagagcctgtgtacagaggcattaagtgtctgttgaatgaacggtggatgacagcccttgccatagttacctggccaggcgtgacatccaggaaggctgtgggaagggcttgtttccccggggcaggcccccctcccatgtggctctaggaatgcacccctaccaattgggccctctggcgaggacagccggcaggcctggggacccggatgtggctggacctcagctgtgtcccagggacttcggtcccattccccccaccccgatcctggcctccagtcccagcccccggtcccaacctccattctcttggtaggtgctttcctgggtcttgtgtttggccctcacctaccacaaaagatcccaaaaagccttgccagaaacatccccttagggaaggggtcctcaccccagggctgggggtgggagacacgggcagccactatcctcacgggcacagagaagggaggccacagggccagatgaggttattggagggctgaggctgcgcctgccccaggccaggtcccgccgaaagcatcaagtcaggtaaacaggaggggctgcgccagtcttggtagggaggcagactccacatcatccgcctttggggcgagcaggctcacttgagatctgcctgggccagccggtggcaggtggagctgcatggctgattgcacactgccccaaggctcctggctccaaacccaaggagggagcccaagggcctgtcctgggctgcggtctgaagcaatgatgctttcctgggagcctgttgttgggtgggctgctgcctgccccagccccatgacagcctggatcttcaaaaagagatccctacctctgacctgccactcccaaggagggaaaggagtagccagctggtaccctccctgaagcccagcttcacaggacagcactgccttggggctgctgtaaggaagtggcagaggccgctgggcccagcagtttggctgcatgggccccagaa

SEQ ID NO: 96672 - DNA, 21293 bp, Homo sapiens
ccactgcacccggccattctacctattttaattatgagcagagcaggctttatttcactttgcttcagttaacctgagcagtgaaaagctcacggaagcataacagagaggagggaacacagactttagagccagtcaaacctggatttgaagtctccatactaggatagtgtctagcttctaattataatagctaatatttattgagtaattactatgagaagtgttctgccattcacagtttgacttcgggcaaagtacctaccctccctgagtctgtttccttacctgtcaaatgaggttaataaagaaggcctgtttcaagactgaggattagaaatagatgtctgcaatgcctgccacacagtagctcaataattagtagctcgagagtatttacattcaacgtatgtcatatttccaaggtgcatttgatatgcatatgcatctttctcttatgctcactagtttggggtcagatgttatcattctcttttcttcatttagaaaacacttactgaggctgggcgctgtggctcacacctttaatcccagcactttgggaggccgaggcaggtggatcacctgaggtcaggagtttaagaccagactggccaacatggcgaaaccccgtctctactaaaaatacaaaaattagctgggtgtggtggcacgtacctgtagtccaagctactcaggaggctgaggcaggagaattgcttgaacctgggaggcggaggttgcagtgagccgagatcgcaccactgcactccagcctgggcaacagagtgagactccatctcaaaaacaaaaaaagaaaacatttactgagaagcaggctagcctaggggttaagactaggagctctggaaccctgctgccttggttcagatcttggccctgctatttctagttatgtaacctagactacattttttcacctctctttgtctgtttccccgtctgtaaaatgggaataacagaattgcctcacagggtttttgtgagagttaaattaattaatatgtataaaaacacagccgggctctgtggctcacgcctgtaatcccagcactttgggaggtcaaggcgggtggatcacctgaggtcaggagtttgtgaccagcctggccaacatagtgaaaccccatctctaccaaaaatacaaaagttagccaggtgtggtggcaggcacctgtaatcccagctacttgggaggctgaggcaggagaatcgcttgaaccctggaggcagaggttgcagtgagcggagaccaagccattgcactccagactccagcctgggcaagaagaacaaaacttcatctcaaaaaaaaaggccgggcgtggtcgctcatgcctgtaatcctagcactttgggaggccaaggtgggcagattgcctgagctcagggatttgagacctgcctggacaacatggcgaaaccccatctctactaaaaatacaaaaaattagctgggcgtggtggtgtgtgcctataatcctagctacttgggaggttgaggcacagcactgcttgaacccaggaggtggaggttgcagtgagccaagattgtgcggctgcactccagcctgggtgacacaacgagattctgtctcaaaaaaacaaaaaacagtaacacttcccatagtaattactcaataaatattagccagtataattataagctagacactgtgctactatggagaatacaaagataaacaagacacaatatcttttttttttttttttttttttgagacaaggttttgctctgttgcctaggctacagggcagtgatgcaatcatagctcactgcagcctcgacctcccaggttcaggtgaccctcccacctcagcctcacaagtagctgggactactggcgtgtgccaccacacccaactcatttttgtattttttgtagagatggagtattgccatgttgcccaggccagtcttgaactcccgggctcaagcagtccacctgccttggcctcgcagagtgctgggatgacaggcatgagccactgcgctggccacagtttctatcttctttgaacacaaacatgagaacactgaagcttagggtgaaatgacaaggctgggattgaaattgagacttttttccccacagaaatttagtagtctttatgatgccaaattaattagtatagactaataagcatatagcttaattagggactaatcgattaaaatttaaagtgagtgaaaaaaaggtttgacttaaacaaaagcaaaatactgtatatcagttaataccagtattattcattcattcaatgtacatttagtgaggacttgttatgcattattcatgatggtagacaccatagaagggatactaagataagtcaggtgtatattctacttcaagtagatctcccagtaaggaatataaaacatttgtatgtggaatgtagtaaagactccaggctaactactgtgaagtttgatactaacaattataacttggtaaatcagggaaagatttctggaggagatgccttttgaactatgcctgaaaggataggtcggatttggacaagtgctgatgggtggaaagggcatttcaggaagagaaattccctttctatgcaaaagcatagaaatggagaagcgggctgggtgcagtggctcatgcctgtaatcccagcactttgggagaccgaggagggcagagcacttgagcccaggagttcaagaccatcctgggcaacatggtgaaaccacatctctacaaaaaataaaaaaattagatgggtgtggtggtgcacgcctgtagtcccagttactggggaggctgaggtgggaagatcacttgagcccaggaggcagagattgcagtgagcagagatcatgcaactgcccttcagcctgggccacaaagcacgactctctcaaaaaaagaaagaaagaaagaaaaagaaatggagaatcagaacacgtgttaaaggaacagcaaatagttcagttttgatagtgtatagggtatgtgagtagcagtgacaaatataaacaaagactggctgagactcaacagtgttaaagtcatttcaaatatgtttttcaggattctgtccgcgtggtcttgggaaacttggacaatcttcagccctttgctacagaacacttcattgtatttccctgtatcctttttttttttttttttttgagatggagtcttgctctgtcacccaggctggagtgcaatggcatgatcttggctcactgcaacctcagcctcccaggttcaagcgattctcttgcctcagcctctccagtagctgggattacaggcacatgccaccacacccggctaattttggtatttttagtagaggcgctatttcaccatgttggccaggctggtcttgaactcctgacctcaggtgatccacccgcctcggcctcccaaagtgctgggattacagccatgagccactgcgcccagcctatcctttcttttctggctggaaatgagctacagctcacattttagactcaaatggacgtagcaaaaccataggcagtttggagggtaggtcaggggaaggagagagagtctcatccctaaaatagtacttaggaatgcatactggcatctttccttactccttagcaccattttccagataaaagcaaatgggagagagtttcccacctgaaattcaaacatggggaaattatcttgatcccctacccatttgtttttactctatatgtggagatgaaatggttccatgaaaacctgtcacctggtaagtggaatgatgtgaatgtggatggcagagaagaaaatggtttagctgtgccagctaggtatcgcgaaaggggctaccagattaggctccagccatacagtgcacaggtcaggatcatgtgctccaggccagactgaccggttcaaatactggtggtcctgccacttaatggctgtgtgaagttagataaattaatctttctatgcctcccttgtgaaatggtgaagaataatattactacctatatcattgagttgttaaaaggattaaatagtagtagatgaaaagtacaaagcctgacttaatcactgaatgaaagataactattatataaacccttccattagagagaattctatgattttcactttagagctatcttaaaggtatctcccaattttatttttatttagacagggtctcactctgtcacccaggctggagtacagtggtgtgatcatagttcactgtaacctctaactcctgggctcaagtgatcctcctgcctcagcttcccaagtagctaggactataggtgtgtgcgaccatccccggctaatttttttttttttttttttagtagagacaggggtctgactatattgcaccgttgggtctcaaactcctgggctcaagcgatcctcccacctcggcctcccaaaacactgggattacaggcatgagccactgtgcctagcccaaatttttattctctgaaggccatgggtgtttttgttgattgagggacaagtaaacacctacccttttgatttgaaaaggggtgcaggctgggcatggtggcttatgcctgtaatcccagtactttgggaggccgaggcaagaggatcacttgaggccaggagttcaagaccagcctgaccaacgtggtgaaaccccatttctactaaaaataaatttagccaggcgtggtggtgtgcgcctctaatcccagctactcaggaagctgaaacagaagaatcgcttgaacccgggaggcagagattgcagtgagctgagatcacgccactgcactccagcctgggcggcagagcaagatgccatctgaaaaaaaaaaaaaaaaaaaaaaaaaaaaaaaaaatatatatatatatatatatatatatatatatatatatgatgtagcccgacatggtggtggtgcatgcctgtagtcccagctactctggaggctgagggaggagaattgcttgaacctgggaggcagaggttctggtgagccaagatcacaccactgcacttctgcctgggcaacagagctagctctgtctcaaaaaagaaagaaaagaaaaggggtgcaaaggccttgcctcaaaatatctccccttttcatttgtcacaggtagctgaagttctaccttttttcttttttagtaaggatcgtcccctcccttttcaaccctttctagcttgtagattacaatcattctgaaacaggggaggaagagagtttgaagacactatttttagggaaaatagtaccaggtagaagggagaagggcacatgaggagtctttgtctggggtcagttccaagaaataaatagtagccagaagtccaggtaaaacagcatcgtggctaggcctggtggctcactttgggaggccaaggcaggtggatcacctgaggtcaggagtttgagaccaacctggccaacgtggtgaaacccctctctctactaaaaatacaaaaattagccaggtgtggtggcatgtgcctgtagtcccagctactcgggaggctgagggaggagaatcgcttgaactcaagaggcggaggttgcagtgagccgagatcgcaccactgcactccagtctgggtgacagagagagacttaatctccaaaaaaaaaaaaaaaaaagtcttaaatctattatgacactcaaatttcctattgtagggaaaccaataagtgacagtcctcttgggttggtaagtttgccttttctgtacaaaatgaaaattgcctttatcaccttcttttttccaaaaagtcctgctcttgcctcttccccttactttgccctcagttgctgcccaggtccagtcagaattgtaaacataagaccatattttcccccttggctagatttctgagaccatgtctctaacagaatgtctattcttacttgcaaagctggtgttaaaagttgcctttggcagtttaaggatggggagttttcttcactgtgccttcatgaactgtgagcaactctggaaaggaggagtcacaggcatctgcttcctcctgaaggtcccagttgagaagaaagcagtaggagctgtgatgaggaaacgaaaacacatggacgagcccagctcccccagcaggccagggctggacaggtcagtggtgtggggagagaggctcgctcctgcgtcctagttaggctttgccagctattactgttkgttgatcctgtccttgggcgagtcactttcttttgcaggacttcatcagtatctgcctattacagtgggtggactaaggaaagggagcaagttaayatttacaatataatttgaacacagtccctttttcagcaaagtacgatttttcttttcaagatgaaggctaagaagaaatacagtccgatctaaacaattgaattcagcacattcaataatacttactatgttaatatcaccagaaggcacaggacttatgaagtctcagaatatttacaaaaacatagggaaactcttgaaggagtaagaacaaataaaatataattctattttacccagtgagcagttagcttttggaaccttaagaggcagtccagactaaaatataaatgtttgcaagagggtatgtatcaatcattgggtggggtgctgtgatattagggggaatgttgagtacatccctaacatatttttattgtggaggctacttatgttcttctttcaattctctatcaggaacaaaatgagtcagtaagacaattcagtcattcttattagcaccctagaaagctaataagaatgctgctggaataatccaaggtgtggtttgttccctagcccaagatgcttccaccctaggcccacagagaacagctacccttttcctgggactctgtggacccctagacatacaggagaaataaggtagaccactaggaagctgaccccatgctctccagatgcacatgtaggtgaagaggtagggagctcctttccaagccaggtggaatgtgagggtacttggaggtatgaagctttgctttgttccattcgactgaattttccatgcaaatgaggtctcagatcttccctttctctgggttttgatgcacagtcaagtatttcaaaatctgatacctgctgtcaatcacattttcactttctcaaaccccagatccctaagtgtctcaaactgggattctgctgtgaagtaaagcagcacccaaagaaaatttggccacccaatttattctgccagccaggagtagtataacaatagccaacctgctgaaatattcatttgggccacatttgcttgaatgtagtgatattgcctctgccagtaacatttcctgcatattttccccccacctcagggccaagatagggacttccagccaaggccccagcaaaaagaagccccctgtggaaaccaggagagtaagtactaaaatggagccttagtactaaaatggagccttcaaggctattagctattcctgttctgttacaagtcmggattccggttaccagcacatcttggtttttcgtgcagattgaattgactgaactcattcttgggtttcactgtctgcagaataacattcaactattatgcccttgccacaacgcatcccaaagtggctgcataatacacgcatcgatgaatttttttgttaaaaagtcctctctttgcctggtacggtggctcatgcctgtaatcccagcattttgggaggctgaggcaggcggatcacctgaagtcaggagttcaagaccaggctggccaacctggtgagacccagtctctactaaaaatacaaaaaattagccaagtgtggtggtgggcacctgtaatcccagctactcgggaggctgaggcaggagaatcacttgaacccaggaggcggaggttgcagtgagctgagttcgtgccactgcactccagcctgggcaacagagtgagactccatcttaaaaaaaagaaatcctctcttctcagcttaaaaagctacctgtactctgtagttgaaataagaaaatatgtctgtatagaattgaggtgggatccagtatagaattttccctttaggaaactttttgccttcatctacactggggtctgagtctaggaacatctagtttttgtttttttgtttgtttgtttgttttgagacasagtctygctctgtygcccaggctggagtgcagtggtgcgatctcggctcactgcaagctctgsctcctgggttcacgccattctcctgcctcagcctcccgagtagctgggactacaggcgtgtgcyaccacgcctggctaattttttgtattttttagtagagacggggtttcaccgtgttagccaggatggtctcgatctcctgacctcgtgatccacccgcctcggcctcccaaagtgctgggattacaggcgtgagccaccgagcccagccggaacatctagttttaacaaatgagctaggcatgtatcagcactgataactggtaagagaaaacttctagagcagtgaagggctggcccctgatggaattagatttcatttatggggtatgtttcccatttagatattcatatatctgatacccctcctccatttcaggacttcttttctatatattctctaaaatagtgacctttttcttttcctcccctctttaaatagctgttagctggtatccatgccttaaagatccttcctttttttctctatgtctccaaagttgctgtgaccctaagtatccaaacacaaacaactcactttcttcaccttcccaggactcataacatgagcagttatmgagtaaacatttacatgtgcattcattcaacaaatttttttttcatttttgagacagggtcacactctgttgcccaggctggagtgcagtggtgcaatctcagctcactgcaacctccacctctcaagctcaagtgatcctctcatttcagcctctggagtagctaggactactggcgtgtgtcatcacacctggctaatttttgtattttttgtagagatggggttttgccatgttgcccagaatgcattcaacaaattttcattgagtgtctactatgtgccaagtaccagggatacaccaacagtgtacagttaggcagacaattactgatagatgtgccatgtgcaggggtagaaggaagcacaggatacaaagggagcataaagtggccaggagggaaggattctcagagtagcttaaagtccagtgctgagaaatgttactggagaagtccgaatggactgtatcatgaaaagccttgagactaccttcaagatcacaggaattctgtaaaacatttttaagtagaaaactgaagttattttcatttctaaaggattgttctgtctcctgctcacaaggcattgtgttgggtgctggggcacacacaaacatatgtaaaccctgatttcttttttctaggagcttgtaatttagttggggaaggagtgtatccttggggatttatacctctgcctctgtgtgcaggggcagagtccagggccccagttgtgctgtggccagctggcccactgagtgattttgggcagatagtcaaccccttctatgcctcccatcctttagggggtaagaaaaagaaatgagaaagtacatgaggagtacttgaagctctggagaacaaagacactttatacaaccaagataattactattaaaggaacattttcctcgctctctaccctttgtatcttcctattcttagtttgacacatcatctccctcaagaacagtacccacagcttcttactcaacataattaccttttcaacctgattctggctttagaaaaaactctagtaaaaggaacatgtttattgattttgactcaaggcctaaagacattcaccatcatggaccctgttcccaggaagatgatttctcctaaattaaggtgatcacagtgactctcagtgtaagtcacttgagctggaaaaattgaatttgctcctatggtccattgcttaatatgttctgccccctttgcagggagttagggtgtaggatcacagtcactgtgcatgtgcgtgtctgaacacattgggagcctgtgtggcgaaagcttagaagaatataacacgtacctctgtttcataagaagtgtttagggacaatgggaaggaagagaaaacccccttgcctttgttacttcaggtcccagatctagagatccagactttggaaggataaaaaatgggagggagcagatgaatggcccagaaatgaaacagagtaactgcacgtcgcattttgttgttgttgttgttttgctatatctgttcgaactgcacttgtaaacagatctggtcctgaacatacggaggacagtcttgcatcaggttttcagagtattatgttctgatggaggtcccagatgataccttcagtctgaattccagctataatgttttctctctcttatgactttttcttgagaagacatctctcaagattttgggagatcacaaaaaggctacagtgtcttgtgaggagacttttccctggttcagcggtaggctgtacctctgtcccagggcctttgccctcctgttcctcctcccacccttaatagatgctttcattagggctactgtatgcagcagaattaaagccccaaaccatagtttcattaaatttgtaagaatcattccctcaaaccagaaaccagagcttggccctctaaattccatctccactctctatagaaaaggtaagaatggtcttcttcctccccagagttccctgttgcttttataggaatatgacttcggtggctgcccatgtggtctgggatttgagcggtttgtgaggaggcttagttcagagatatctgccattctaacccgaagtttattcttaggatgggggctagtcctagcttttctagagacttgccatgcctctgcctcccagaacctacctttatagtctgcagccccttgctgtagaactcttcgccatgggagctaagctatgaggacgcaaaggcttaagaatgatacaatggactttggggacttgggggaaagggtgggaagggggtgagggataaaagactatacattgggtatagtgtacactacttggatgatgggtgcaccaaaatctcagaaatcactattaaaaaaactcattcatrtaaccagacaccactcactccccaaaaacctattgaaataaaaaataaattctaaaaaacgggaaaaaaattcacagaactgcacacccmaaagaaaaaaaaaagaactcttcaccagcaaaacagcttgaggagctccatcactgctgggtaaagcccctaggttctgactgggtgaagagagtagtagccagtggcagagattcccaaagaaaatataataaccatatttctgattatcagggtgtttactggaaaatgttgtgggcctggaatcaggttgtaaaatgtcctcttcagagtacaaagaaatttctataaagcagcagcacatggagaaataataagattgtgttatattgtgttgctaatgccacagtcatgtttctaccatgcctggctctagccatgctgatcctatttattctttaatggcactgtaccctcatacatcatgtccctgtctggaatgccctgctgtgactgaccatctcctcacccccgtcatgacaacatcccactcatccatcaaggctccattcaaatatcacttcccctgtgaagccttccttgactaacaccacctgctccattaacgtcctttcagcaaccacagcactctatatggattcgttgggtggtcttatcacactctttgtttttctttttctttttttcgagatggagtctcactctctcgccccaggctggaatgcaatggcgcgaccttggctcactctgcctcctgggttcaagcgattctcctgcctcagcctcctgagtagctgagattacaggtgcctgccaccacgcccggctgattttttgtatttttagtagagacagggtttgaccatgttggccaggctggtctcgaactgctgacctcggatgatccatctgccttggcctcccaaattgctgggattacaggcatgagtcaccatgcccggccatcacactgtcttgacttagtttatgtccattttgctccatagattatacatttctccaaggtaaatttaaggtcctcctgatttctgaaacctcagtgttctgtccttggtaatagtaggtactcagtaacatgggatgataagttaaacccagcttgatttattcttggctcttaaatcttatggttttagagggacagtagtttggatgttgaaatgaaaaaacgacagtcctggctgggcacggtggctcacgcctataattccagcattttgggaggccgaggcaggcagatcatgaggtcaggagatcgagaccatcctggctaacacggtgaaaccctgtctctactaaaaatacaaaaaattagccgggcatggtggcgggcgcctgtagtcccagctactcaggaggctgagggaggagaatggcgtgaaccggagaggcagagcttgcagtgagctgagatggcgccactgcactccagcctgggtgacagagcgagattcagtctcaaaaaaaaaaaaaaaaaaaaaagaaagaaaaaaagaaaagaaaaaaggacagtcctatggaaagaaatggaaagaaatatagaacctgtctaggcagtcagaagccaggccccagtgctgatatgaaatcagttcaccagcaaatagcattcagattgccatgcagtgtaggaggaaagtttaaggcttttcttggtcttctttttaacagaatagggaaagaaaaacccaacaaggattgcaggagactctggcctctgatatcactgatgtccagaaacaaggtaggtcctgggaaatttccatttattctcctttaataatcaccctttcccttgtagttctctgataygtagagcagcacagagctgagtctgggtgccctcagtgggtaatgtgccttgctcccgtggaggtgcttgttagccatcctctggtctgggggcctgtcctagagtaatagaagccccccagctcccagaaggagtgaagggaggtagggcatgcccttcctctgcttctgatagtgaagttatgctctcactatttcaaaacatttccgagtgaggtgataaactttatagaaatgttgagagggttgtgtttcccttttctgtactgttggagaatgatctcttccctttgaggcattagagttaatattgaagttgcaaatggatgctttgcaagggctgggaatgcatgtcaagctattgccctccctacttgctgatcttttacccagcatgaggattcagtgtggactgcagttatcacagaaacagggatgtaggccagtgagtccttcaacaacttgtcattttatgtgaagacataccagccagagtgcatggctggaacttgagctgtgtaaatatcccaggagcttgactgaaaatactctgaggtcagaatagcatcttactgagctgagatgaaattgggaaggtcagaacaaacaattcatctggctttaaagaactcttggcgtgagactgcctctggctcatactgggtgtttggccttctactcacatgaaaacggcctatggacaaacatcttgctcctgcctgattgttttccttacagattctgagtggggacacagcctgccagggcgaattgtcccacccctgcagcacaactcacctccacctaaggagcgagcagccaccggcttctttgggtttctaaggtaagacagcttctgtccggcatcagactcgagatccagctcagagcggctcattgagtctttcagggaaattagaatagaaaagaaagcagattacttacagaggcttctcacttatgtctaggatagatgatggaaatgagattaagaacaaaagccctaattgtgcatttaataaagactgtgttttacttatttttacacaacccacctccaccctgatgtgtccaggataaagccaagccccataaacattaacttgggccaggccgggtggctcatgcctatgatcccagcactttgggaggccaaggcgggtggatcacttgaggtcaggagttcaagaccagcctggccaacatggtgaagcccatctctactaaaaatacaaaattagccgggcatggtgctacatgcctgtgataccagctacttgggagggaggctgaggcaggagaatcgcttgaacctgggaggtggaggtgaggctgaggcaggagaatctcttgaacctgagaggtagaggttgcagtgagccgagattaaaaaaataaaataaaataaaattagccggatgtggtggmatgttctgtaatcccagctactgggggtgctgaggcaggagaatcactttaacctgggaggcagaggttgcagtgagctgagatcgtgccattgcactccagcctggrcaacagagcaagactctgtctcaaaaaaaccaaccaaacaaaaacattaacttgaacaaagtctattcttagtttacttgagccattcagatgatttggttaccaaacatttccattctcccctctgaatctaggttgtgtttgcaaaggacagttagcaaatgtctctctctgtctctctctctctctgccatcccattgcaattctgtttctttatttccccctcctgagtataatctaatttgggtaccttttcaaatgctattcagtcttgaatttccattcaatggttccccagagcaaaaatgccctagctagtgaagcactaatgggaaatggggagaagggaaggagacctcatagagtctcagcctactctgttctcattcttgcagctctctcttcccgtttcgatatttcttcagraagagcagccactcttgagccttccaaatgcagcgctggaaagaggatcatctcttgtagtgactcctcccgagccattcttcctccaactctatccttttcttatgacacttcagtcgtggggaatgaggtccccatgctgagtcctctgtggttttatcgtgtcctttgcccctttataatagattttttcccccaatttaaaacattaagaatggaactttctaaaatgttcatgtcctgagggccggtttaggccttttgtcttcggcacttaggatcctaatgacaataaattatttatgaagagttattgattgaatttagtggaatagagtaaaagagaacaaatgcttccctcaagatacagagaaaatgcatgaaacttccctaggtctacctggttactattcacaggatcactttgggtaggtgagtttgtgccagaggttagggaatggggtctttcaagactcactgtcctgagccctgctcacccaagagacctcttccccagttccagtttggccccaaatggttgcctctccatagacaaaatgtttcccacctctctatccctttaactgtttgacagtaatgcagattcgtttatcagattaactggaagtcaatccaggttggcacccctggagaaggcctggccacctgagctgccttcaactaaaggactgatctgtaatagacactttagcctcatgtggccgtggagaaccaaaatgatctatggaaatgtagggaaactcattttagctcacaacaaaggagtcactttttacctgttagagatgtccaatattagaatgggctacctcataaggtaatgagccttgtcacccaaatgctttaaacagaagccatcatctgtcacatgccagagggtgcccctcaagagtgggagagcaggggctgaactgctgagttcccgctgcgtcctgttgctatgctgcctgcacccttggtggggagaagagaagaggtggactgctgcggaggacctggcaaacaaggacccaggtcttgaggggatgggggctgatggggaaaccgtagggtgtgggaatttaaggattagtgacattagtaacatcacttcctctcaaattgcgtttacagcctttactcgactgtcccaaacatggcctgttttacaaagctgctaagaagcacagctccaaatctggagctgtgagtgcccgccctgactctgactagcttacagtgaagctttgggaagttgttttccgctgagctcttattttctcatccagaaaatgagggggtaggatttggtgagttataaagtgccttctagctctagcagtctgtgactggccctgctctttctgagcagatcagtgaggcaatgaccccaaagcggggctgcccagaatcaccacaggcttcctttggctctccaccttgccccaacccctctggccactgctgcctgggggtctttctccagcttgccacattcttgctcaagtgtagtttagcaccatggatggacagcagatttgaatttgaaatcagccctaacattaactagctgggtgacttttagtaactttctttctttgagccttagttgcctcatctataaaaccagagttggacaaatagatcagctttgctggggttgataacttcaggccctttcaggagtcaggtccctgttattccagggctaggggagcactccagctcagaacgttactctgtagcacaggatgcgaatcatccactgataccgtggccatgcaactctgaaacagacagcaacccccaaacccccggccctgccaccaagcacatctcaggagacctccactggtataatttcccttgtccctaagaatctccttccccaatccctttcctttgcagttagaaaaaggcaagcaggactgagtttagtggttttaaaattaggggtgtggccaggcacagtgtctcatgcctgtaattctagcactttgggaggcctaagcaggcggatcacttgagcttagcagttcaagaccaccatgggcaacatggcaaaatcctgtctctacaaaaaaatacaaaagttagctggtcatagtggtgtgcctgtggtcccagctactcaggaggctaagggggaggatggcttgagtctgggaggctgggaggtggaggttgcagtgagccgagataacaccaccacactccagcctaggtgacagagccagaccctctcaaaataatagtaataaataataataaagttaggggtgatcaggccctgaacagggaaatgttctgtccaaggtcacagagcaaagagaacccaggtgtccacaactcagccaagagtcttgacccctgtgtcgtcagctgcacacacgctgcacactccaccagctcctaggcttctctccacatctgacttatcgaggcctgggctgtgggtagctttttggacagaaagaagcagaaagcagcaggagctgctctccgaggaccgcacctcaaagagcaagatcccccaggtgggatcgctctgaggcttcaggcaggggaggctggtttgaaagccgatctccaagagggcgtggctccaaaatgctggcaaataaaagcctggagagccagcaccaagctggagaccagcaggaggcacaggaaaactgcaagccgctctgttcctgggcctcggaagtggtgagctcgctgaggcaggaggagctctggggagggtctgggaatgtggacgagggccctgcaggccaagatggggcagatggagggaggaagatgtttgcgctccagatggcgaagaaaattccagggaagggagaatcactgcacagagggctgacacacaggtcctttccagagacagctgctcacactcacacccatacacacacacacacacacacaaaggcagatacagggaaaaggcagcaccattcaggcacacctcacctgtcagaccagccagccctggctcactcacctggaatgcagtatttaaagaactcgccatcccacctgcacacccacgtagagacatctccccactgtgtttcagatgcctatggcgtcccctcaaaccctggtcctctatctgctggtcctggcagtcactgaagcctggggccaggaggcagtcatcccaggctgccacttgcaccgtgagtacctctgggaccggagggctaggagcagtggaggttctgggtgggagcaaagagctgagtggacggtggggcaggcagcaccctaaagggccccacactgaggcacaggcaacgggagctggggcgaggcaaaccttggcagaggcgccgtctactgcttgcctatctccttctagccttcaatgtgacagtgcgaagtgaccgccaaggcacctgccagggctcccacgtggcacaggcctgtgtgggccactgtgagtccagcgccttcccttctcggtactctgtgctggtggccagtggttaccgacacaacatcacctccgtctctcagtgctgcaccatcagtggcctgaagaaggtgaggagggcccgggcccggtggatggacgctggggtcgcgggaagaccagagagatggagatcctagacagccctgagaaaggggactgcagcacggactcccctctcccgcaggtcaaagtacagctgcagtgtgtggggagccggagggaggagctcgagatcttcacggccagggcctgccagtgtgacatgtgtcgcctctctcgctactagcccatcctctcccctccttcctcccctgggtcacagggcttgacgttctggtgggggaaacctgtgttcaagattcaaaaactggaaggagctccagccctgatggttacttgctatggaatttttttaaataaggggagggttgttccagctttgatcctttgtaagattttgtgactgtcacctgagaagaggggagtttctgcttcttccctgcctctgcctggcccttctaaaccaatctttcatcattttacttccctctttgcccttacccctaaataaagcaagcagttcttgaatttctctctttattaagtctacccccagccacggaaagaggagtagaccatgattactgtgaacccccccttaccccaggacactgtgaatctcttcttgcctgtgccctccccctccccctgcccaataaataaaaaggggacaaggaagtacacagcgagggaagggaggagtgtgcacccaggacagtgtctgtgtagagggtgagctgggcgagaataaatagaccatggaccccatggtggggataaggaaggacctcgcattggccaaggcaggggcaggcgaggcgctgagtgcccttgcccaaggccaggagcagagggtgggagcccgcctgcagctggagcctagctttgcggggcaggggaagatccctgatggcagcttcctggtcaagcttgcccttgtcaagtcctgccacgaggggctgagcattctgttgccaagaccaccattgcctctcctcgtctccccccagtgaaagctgggctgggcagggagtcctcagaagccactctggcaaggccaggggtaggtgtgtttctctctgggcccctggacaggagaagggatagagggactgacagctctgggtttagcttttccccttctgaggtgctgtctagctctgacccccactggcggccacctggggtgtaagccgctggaggggggcctccttggccccctgggtcccctgtagccggcgtagccgcagctcctccagaccttgccataactcctgacgctcctgggccttctgctgctccctggggagagagggtgaggcagctccctttcctggggccccccacagtccagactccctcacagtccagactccctcactaccaccccaccggcaaagggaaggcatggaaccatttttgttctgtgactccataaaaaccctctactgagggaagagagcagaggacagacagatcccagcctgcagtcacagagaagatgacgggtggggcctgagtggttctggcttctgtaggaagctacagggagtcagaacaagtctgagctactcgaagaatgacgggaggatacaggggcagacagtcaggcataggatggcaggagcatggacagtcttgcagcatctgatcagacagagtttggggtagtcctcgggttccctccagccatgggggtctgactcctccctgctcttctcccttcccccacgcccagcccccaacactcactgctgcttttccagcttgtaggaggctgtgagctcatcaaacagcttcccattcatctccatgaaggtcttgagcacattgtagatcagtgatacgatggttcttggcagtgtcaaggagggatgaggagatgaaacagctttggtttgcccacctctccctttccctgcccttcacatacagcattccacctgaacacaagcactgcccactttcctgtccttttcaccacccctgggccatcttttgatgctttctctgatattctccagctaggagtaaccctggggtcgggtctggactggctggccctggtcccagtttctgtgagttaggtcatggcctggcactcactggttccagtgctccttggagacttggtagagggtcccaaacacagcaggcagcacagtgtggcagttgtcctcaatgaggcttaggatatactcattgttccagaaatacagagcccgctctgcaacctggggcagacaagatggcagagtgattaactggcagtggcttctctctgtgtgcaaggtctggtgtccatcactacctcaacgcccaggccccctgaccttcacacaccccaccttcagggcttatctgagccctggaggaagcaacagtgttgaagggaaaagagttctagatacggaatccaatgctgcggggtgaatcctaaccactacagactctactatgccatgtgaccttgggagaggcatttaacctcccagcctcagttttctcatctgtaaaatgggctaataatacctatctcaacaggatgttataagaatcaaatgagatactagacttttaggtgtttaatgaaccgaagtgccagaatcactgtgaggaagacttgacttccactgggttatggcccataagaacgggaggaagtctgcacatgcttgcagcagaacatgagttagttagctgggttggtgcggggaagcctggctgcatcccaaagcgagtctaatgaaatctaaggccactagca

SEQ ID NO: 96673 - DNA, 12751 bp, Homo sapiens
agctaagaacccatgctactttgaatagcacagactcttgagataagacatttttgctacttgctagttgtgtaaacatttaggaattattcgatttctctaagcctaattacttagggaggctcagtttgctcacatatttttgtgatgattaaataatatatgttgctagaatagaaccaggcatttagtaggcagttaatcattcaatactagcttcccatattttcccttatacacttccagaaacccaaaaataactttaacgaacaaaaaatagcaagcactgtcctaatacttatgaaagcacaactagaatttgccagtcttacatataagaaaaaatagaccacttcactccaacacaagccatagaaaccacaaagaagcattattagtgtttaggtcgttttgaggactttgacagtaccatgatagacacctcagaaactagatgaatgacatatgctaatcaaagtggcttgatggctgaaatgtaacccagtcaatctcaaattatgtcctttaacaaactcagctggcactttcctttcaatacaaataagccaaacaatggaaaaacgaatgagcaggttttcccctatgttggtaggaaaggacaatggtggagtatggagttattataactgctgctagaccacatacacagaggaaattacaagtgaagcaataagttcaacagatgccctttccaaaaaatttttcatgaggaataattactctaaaggatgagaaatcccctacgttttcaaagcctcttccctcaaaaatgctcagtgttctccacacgctatttaaccatccatcgtgagacaatttgcagttacctccacacttcccatgtgaagcatgagatgtaggctgggtgcagtggctcacgcctataatcccagcactttgggaggctaaggcaggtggatcacctgaggtcaggagttcgagacaagtctggccaacatggtgaaaccccatctctactaaaaaaatgcaaaaaattaaccaggcatggtggcaaatgcctgtaatcccagctactctctggaggctgaggcaggagaatcacttgaacctgggaggcgaaggttgcagtgagctgagattgcgccattgcactccagcctaggcaataagagcaaaattccatctcaaaaaagaaagaaagaaaagtgagatgtggagagataaatgacttgctccaaatcttactgtgggtcagttatagaacagagaggaggagtcatgtcttcatacgtggaataaaactgtatttcctcaaaattttctgcctctatcccagcacacacacacatgcatgcatgtgtacactcactgcagttacaacatattcccagggaaatacattgcagtgcttcgagcaacagattcgtcaaaactcagaacgtagaaggatgtcaactcccttctagttcaaactactcacttgacagatgggcattagaatcctaggacctggttttcattcttctaggggaaaaaagctgcataaaatgaaaagttccaaggtaattcagaaacataagatactaaattttgtataatacactaaaaatgatctctaaattgctctttgttccaaggtaattcagaaatataagatactaaattttgtataatacactaaaaatgatctctaaattgctcttttagccccctggatgggaagaaaaccagggtatggtgctacagtagagttcatatatttgaatcaggacttctcagcccttgcttggccgctgattagtggtgttacttgggaaagttactgaacctctccaagcttcatttttctcctcaagattagataggagagctttatttttacagctcaaacccttctcaaattctgccaataaatataaaagtattaaaacggttaggaaggtaatcaatcatttttccttcagatccacctttgataataagcacacgtaaaatgatggtaaacgttgacttactctaaaagtttaagctgttataattaagatgaaagagcctcttgttgatttagaaagatgattctgaactctatctttgggagctctcaaccacagacaagggagagcagggattttctcagccacacactgccaagaaggtggagagaaacctagcccccatgtcactggggcctagagaaattcttggcctgcatgttgctacatcatggcaacatgatggaggcgaggtgagggggacgtgcagtcagctctggggaaagtgaaggtcacccttaccagcgaggactgaaaattctaggggttggggaggacttggcaagtagagccaggaagacaacccgcaggttctagagattgtcaaacacaaagcaattgataaaaaggcaaatattgataaaaaagatgaatatactgaagataatggataatgggagcaagatatctcactgacgggaagaaggggtataaatatggaaggggaaagtaagaataaaccatgcaatgctggagtgtaatagaggttatagtgtgaagttgtaagttctaagacagatttatagactgatatataaataaataaaaatgaatgtgtgtttctatgtgtgtgctgtgtatatgtgtacgttcatgtatttactagatctgtctgacaagagggcctagaaacaataacatcccaatagcagtgagttatacctagcacccagatcttggtttctaaatacagttaatcaataaaaggagcaagagctccttggagaaatgactgattccaaagctggagcagacaaagtcaaagatacgcctgaaacatctattacaagaaagcaaggaagctctcaaagaatgatgggaacataaaaaggatagaggagccagtgtgaagcaggtcccgaaactgcctttgcaaaattatgactgagacagtaaaagagatctaacttaactgactccaccttgtttctaacctttaagctgtccttgttccttcctgtgcacaggctgaactaattttgggaggaacttagtttatagttcatagtttaaaacatagataataacagccctttcccaaaacaaacctccttcttgcctggggactagactgcctttgtagaactaacaagttagctccaagattagaaattacggcttaagagtcatgcagctaggggctgcaagattctcaccctccctaaactgctcctaagatcaatgcttgagataatttgcagaccctgcacttgatggatcagctggcaccacccagatcgataaactggctcatccgatcttgtggcccccacccaaaaactaattcagcacaagaggacaggttcaaataattccctaggattccatctcctagccaaccactcagcactcctggctcactgacttcctccacccaccaagttgtccttaaaaactcggatgcccaaatgctcagggagactgacttgagtagtaataaaacaaaactctggtctgccacacagctggctctgtgtgaattactctttctctactgtaatttccgtcttgagaaactagctctgtgtaggcagcaggcaaggtgaacccactgagcggttacactcccaatggccaaatctgggactacttgagtatcaaaataaataatgatggtaaaggattataaccaattgagtaaaataagaatcaatgagttcttacaaacaggaaggaaggaagggagggaaggagagagagagggaaggacagaggaagggagcgagggaaggacctcaataccacatctggctttgtagggttccacatcatgcccagatttggtaatgccaactcttaagtatagaagaaatgacagaattagaaaatcagagtaatagctgaaaaaatcatcaatggatgctaaaagagtgaataaaagttagaagaggaaaaggatattaacatagtctcaaaatatctccattcataatctatattaattacttattaaaatgcaaaatacttattaattttacaatggagaaacttggcagaaaccatctttgccaagtaaaaaaaggaacatcatcaataatgggacaaattaacatcttgtgactcctgaaataatgcattgagaagaacggagcaaaagttctgtggtatacctgccaaaaatgtgcaacctgaatctaactgtgagaaaataccaaacaaacccaaactgaggtatattttacaaaataacaggcccgtaatcgtcaaagacaagggaagactgaggactgttcttagtattcttaggttaaagaatattaaagagatatgaaacaactgatactacacctaataaagaacactattgggacaatctgcaaaatctgaacaatctgtacatttaatggccgtatggtcatcaatgttaatttcctgattttgatgcagtactgtggcttggtacaagagtgtccctgtccttgtccttgttcttaggaaatacacactgaagtatttaagggtaacaggtgaacaggtctgcaacttattcccaaatggttcagaaaaatatgtatataatacataatttatatatgtatgtacacacttcacagaggaaataagtcaaaaaaaggaaatgggatagcactttataattggagaatctcagtgataaaactgtagttttgcataccaattttacaacttttctgtaagtttaaaattattcaaaaataaaagttaaaaaataatttgatatgtttgttgtaatttagcatccagatatttttcttacaggagggctttttagactatcaatcactctatggcttctataacttaaaaaaaagtgattacatatggtacatattattctgtaacatgcttttttccttcaatatatccttgatatatttctatattaataaatataggtctatggagcaattattaatggctgcacaatattccatcacatggacataaaaaatgtattcaatcattttcctgttattggatacttaaggttccagattttttgctattataagtaatacttcagtaaatgtccttatagttaaatatttgcaaacatcatgaccttattctccagagcccttactattttttctgcttacatattcacatgtaatatatgtctgttgttaaaaattcaaacattatgaaaactggaaattctctattataaaaaaagcaattcttgccatatattagaaaaataataatttggtaggctattatcaaagatgcctgacaaatgaaaatggaattccaataccacgactgcaaattagtcagaataatgcaaaatttaacaaaacacatacaccagagaagtggctggcatagtgatgtcacattaaaaacctattaataaatgttttgacttataatgaggttttcaggggtagtgaaagtgggtgtgctagaagcccaggatatattacattgcagatgcttaatcaatatagtggcacaactagcagaagagttgtctcccgtttgtctccccgcatccctcctactactgccacactgagaagaagtagaggtcataacctgacctctgcctgtcgttcccagctgaaaaacaagtgaggctgtgtcagtggagtgctcactgacaggaatcagagcactcggccacaatgagaaaggcctgtgtgcatcagagtgtggatccaaggagtggaaaggagggaaaggggtcagactgcatgtttgaaacagcatccaaatcaggttgacaactggccctaccttctgcaatgctgtccccgcacgccagcaggaacttgcatcgatagcattttagttttctttatttaagattaacttccaagtccagcactagatcgtggagtcccgcaccactcccactgatccctgaacgcagatcccttctcctgagagttgtgagcaactttcccctgtccccagtactgactgcagtggcttgggaccatggccacactccccacaccttggcttcacatcacatacatcrttccctctctgggtgcacgctggrggtccccgacttctgcactatgcgtgaaatgcccctgggacacatcatgaggcaggaattggagaaaatttccctagagtacatcatgcgctgtctgcgggaagtcagcttctgctacccgcaaaacttcctgggcaaggaggtggtggrcaactgcatccaggagcacattaaacagctgcattgcaagggggccctgcgrgacagccagctggctgggatgtgtgcagtgtctctaaagggtgaactgtggggtgatcagttcaccccacagttctgggagcaacaagaagggccgcgaggccattggcttcctcctgtccctcactgacaggctagtcctctagtgcaggagccactgggaaaatactatgtcaaggagaggtccaaggcaatggtggcttgctatcttaaaaatggaataggttacattcatcatgtggacacctcaacaacgatggctgctgcaccacctgcatctactatctgaacaagaaytgggataccaggctacacggtgggatcctatggctattttcagaggagaaatcattcgtggcagatgtggaggccaattgtgaaaaagtcctgctctcctggtcagatcgcaggaagctacasgargtgctgtcttcctatgagaccagatgtgctatactgtttggtactttgataatgaagaaaggacagaagccaaaaagaaattcaggaatttaattaggaaacatctgccctcactgaagattgactgtgctccaaaatctgctggccttgttcactttagcaatggttcctgaattatctttaagagttgagatccggctgggtacagtggctcacgcctgtaatcccagcactctgggaggccgaggcaggtgggtcacctgaggtcaggagttcgagaccagcctggccaacatggtgaaaccccatctctattaaaaatacaaaaaattagctgggcatggtggtggacaccagtaattccagctactcgggacgctgaggcaggagaatctcttgaacctgggaggcagagactgcagtgagccaagatcgcaccattgcactccagcctgggcaacaagaatgaaactccatctcaaaaaaaaaaaaaaaaaaaaaaaagagttgagatctaaagatggcctcttcagtgatgaaaaactccccatccctgtcttatgtgtgggacttagtgttttcttgccaagactgcatggaccttcagatgctctctttgccagatgaactcatttgctattccacctccagaaattccagcagacataccagttggccagcagtttacctgatagatttggtaacgctggctatcaagacaagagcctaggagcacatgtgaggaaaataatcttgtattttatgtatatttcctgatttgaaaggtttgaaaaagaaaaacaacggcagatgccacagaaaggcacaatggaagccttaaaacagaaaacagaaatttatgtcatctgaacaatttccagatgttattaatccggggctgttgaagtctctggagaattgtcacaacctaatgacaacattattacctctataaagggctgctgtcatagtgatcaatctgtacatgtcccatggtgtggacactcctttttccaaatcttacaacctggattttctgccttggccccattttgctaaaaataatgactttctgaataaagatggtaacaccatttattctctattttcacttcttacctgaagaatgtaatccccagaagctaaaactagacattaggttttttcatgttgctttggtggaatggaatctgaatttaaaccaaaggataaatatctacttggtagtttggtgtcaacctctgaaaacaacatggaaagaatcaggtctacagatataccaagtacatgtgtacatcttgaacagtctgaaaagagagatggagttggaaatgtgggtgtacctgttttttttcagttttcttttttaatgagctcattcttaacattattttcaaaaatagaatggtgtattttaaaaaaagaaatgaaaatttaaaaaccctcaaaaagctaaaaacacttataaataaataaataaaattaactttcttctctctaggatccacctgaaaggacggtatcttctcaattttgaagcggctggcaatctgctaagtattctggaaaagcactgctctagacatcaaaaactctgttaataaaacttatatgtataaaattatgatttaagtaagaatccaagcgtttaaagactgtttcctatctaaaagtcataaagtatatttccttctatatttcctgctattcaaaggcacttaaaaataattgttaacgaacatatctaagcaattattttttgagtatcagaaagatgttcaacactgcacaagaatggcctgaaaataactcttaagataattatatgtacagtaaaacacttaatataaaattgtacagcaaccttttaaactaaaaaagtcacaaaatgttcaagaacacagtttcatccaccaaagcaactaattaatcttgtaagactaaggcagagatgagctaacacaccagatattataataacctacaagagataagatgcacatttttatcaatagtatctgaagttttgaagaattgtagcataaaaatgaaaatcataaaagcatacagttgtcgtatttccagaatttctgttatatacaacttccaaaacagagaaatcacaaattatagattatgtaattcctccccaaaaagtagctatcgatttagagactgcttttctaataaaatatgattaacactctataaaagaaatataccaatttatttttgagatgttctttctaccatccttcttgtgtaaaaatcagcaaataagaaaaatagattattgccctgattcaaggtctttaggattctcttcatgtaagaaaatgaaaaataatgtgactttggtgctgatatttcattctcttatcctaaaatgtttgatagccatgatgtatgtacttcacaggccagatttaagagagcaattcaggggtaaacaattgaaggagatgaaaagtacatgaggctctggatacaggagacgaatggtacttccaattgcccattgaacataagatgctgcagaatgtcagacaatcctagccacctttggaactacgtctgctggtgctccagtgtggaatgagtctcccaaagctagtaaagccagctccaggtcctcagctcatggagctagattcctgaacaaggtgcaatctgatagcatttccctgtcactggtaaatatattaggtaaatagatgcaacagaaagaggtcataaaaaaagtaaaatgaacacctctgtatatttacagagcatggaaactattcaatttttaaaacctgctcaataagatttatgaaatgatgaacaacttctggtgaatgctttcttcaaagaactgtttaaggagtgcatcttagatgtcaacttcaacaccaccattaagaaatactgtattacatgtactaatcatgggaataatattcactgaaaatgaaaacactaaacataaaattaaagatcattatagctctaaagggttgtaaaaatcattatgtcctagcccctcatttgtaacatttacatggaagcagagagaagtgaagtgtttacccaaggtctaggtataaattatcaaaatcataaagactaaaacccaaatctttagagttccactttattcacttaacacatgtgctatgtgtcacttcccttgacaacagaccatcatcggggcaggaggagggagaaagagaaggcaacactgcagctggcaaggagggctgcatctgggccaagcaacaggatgatattttacatacattatctaatttcttccctattgtaaccctgtgaagtagatgtcattatctccactttacatagaaggaacagaaagcacagagaagaacctgtccaagagtaaacggtagagccaagattccagccaagatctgtctaatgcaaagatgcagctttcaactattcctgctttcccagtactgtcctcccttcttaccccatggtgcatttgttctgggtctgactgtgacaccagcaatgactgggtggcctggctgcctggccgggtgatgtccccacttggatgctatctttatcagagagcacagccatcccagggagaggaaagtcttcttttctcaagagcacaggaagcagatgcacttcttagctaaattcaccagaataacactttattcatcaaactctcctgtttacaactaactacagatccaggctaacggcatagaaacatacaggaaatacaagatgtactaattaatcaactgattagtattagtaatacaataaaacatacaatatataaatgtattcaatgtatgaatttacgtacattgttgtatgtaaattcaacaatgtttccattatctggcacctaaagtatatgcaactaagaactggaattatgtcaaaaaaaaaaaaaagaagaagaagaaagagtcctgagttagtacttcttaataaggacatgggactggtggggaaggagaacaaaatcacctggagggattttccccatttagaagcctattcctccctcacatacacacctcaattcttttatcacaaatgcccagggggatatgctaatcctgtcaggaaagcagctggggcaaatcatttgaaaatgtttgtcaggtattgtaattttgagagcctacaatacatgccacaccctatagggttaaaactatggtggtaagtgagaaatgtagttatccacgtttccatgtccagctagacaggagtgacagaaggattggcagggaaggacagtgtgccgtcacgagctcaacatgatctgacagtaaaaagcttaaccactaaggagtaggcaaaaaaacagtaacaaataagaagatacataaatcaaaaagcacaagagtctggactgtgagctatgaggccaatcatctcagagattccactggcccctgaaagcatcactgtattctgggataatataatcagtaatgaaacagtttggaataatcaagaaaaaattaaattgtatttaataaaaattgttaagaaagtcagggaaataaaaacactttttaatagtttttgtttgtttgtttgtttgtttgagacagggtctcactctcttgctcaggccatttcagaaataaatctattaggccaggcgcagtggcttatgagtgcagtggcacaatcatggctcactgcaacctctgcctcccaggctcaaggaatcctcccacattcaaggaatcctcccatctcaggcccaaccttgagtagctgggactacaggcgcataccacaacaccaggctaatttttgcatttttttttttttatgcagagatggggttttgccatgttgcccagactggtcttgaactcctgggctcaagtgatctgcctgcctcagcctcccagagtgctgggattacaggcataagccactgtgcccggcctaatagatttatttccaaaatagctatatttctctgattttgtcaagggtcagtgatatttgaatgtctacttatatgtaaatgatgggtaaaatgcaacatggtgtagtgatacaacggaatacgagttctggagcaggtggccccgggtccaggtggtcctggtgctcaggaggtttggttgtctttgccataaggaatgtaactgaaatcagcaaggacatgacgtttccaaaggaaagcacaccaaggttgtggaaaagtcacactgggacagaatctgagaaccacagttctcagattctgagaaacatggacacttcagggatgacagaggaggtgaaggagcttgcaaatgagacgcaggggtaatcagaaacagaaaggaagacctcaggaatgtaggcaccaaagccacaacaacaaagcattaccagaaggaaggaacagtctgctgtgtcatatgttgcatggtaatgctgaataaacaactggggagtatgccctggacataatgagatgacaggtcattagtatattagtttgaacttctcaagacaaacaaataaatataactctttgcagaattcttttttttttttttgagagggaatctcactctgtccctcaggttgcagtgcagtggcgcaatcttggctccctgcaacctctgcctcccaggttcaagcaattcgctcacctcagcctccagagtagctgggattacaggcatgtgccaccatgcccaacgaatctttgtatatttagtagagatagggttttgccatgttggccaggctggtctcaaactcccaacctcaagtgaggaggacgcctcactccagagcgttgctgcggaaccagagcttagggcggcagcagagcaagaggtgatgaggcctcccaaagtgcctgtttcagcctcccaaagtgctgggattacaggtgtgagccaccgcatcgggccttcttttcagaattttagtcatgaagggaagagaagaaaggaggacgttgctggggatgaaggaaaaggaaagccagcatgtaggttctttcataaatggctaagaaaagcttgagtatgtctaaatgcttaatgggaatgagctggcagaaaggctgatgacacggaagaaagaatgcccaatagat

SEQ ID NO: 96674 - DNA, 12694 bp, Homo sapiens
  misc_feature (1)...(12694): n = A,T,C or G
tgaagttagaaactgtttcttgccttgaacaagttctcagaccaagtcagaaggcagagttctcgtgtatccaagtaaactcaatttttctttggtgcccacttgctgttatgctattcttcaaatccctagtgagacctgaccagctcaacattctgacatgcatcttcatttgttataaaaacacattactcatcaaaatataagcacattcccatacagcgtatttgatataccagggtgcagccaaattctagatgactcttggttgaagacaacttgaactactccttctaacacttttagccagttctgcattttgatagcattctctcaaatgttaaagtaacatgtaaaggagcattgtccattttaggcatcttgttcatcttttataatatcccacgaatctctttttcacttttctcaaataaaagacagcttcaagctgaaggagttttctattttaaacacaattattaaagtatattggtgtccagtgggctcaatagaaatatgtgaaaatttatttttacctagttggctaaaaggttcaagaatatggcactctctcttttacaacctctttgaaattggaatcccaaaagtcaagggaaagggctaattcacatctgtgacctattggcccctggatgacagggactaggtctcattcactgctgtgtccccagtgtttagcataaacctcacaattttgagaaactagacaactctagtaagcactcaatatataattattgaataagtaaacaaactaatgcaaagcatcaagctcaacaaaataaagcataataaatggcaatgttgggctgcgatgcattctgggaaaggagcagcatcaaatccaagacggcaccagcagaaggctgatgaaggagcttgaagaaatatgcaattgtggaatgaaaaacttccgtaacttccaggtagatggagctaatttattgacttggcaagggcttattgttcctgacaaccctccatataagggggccttcagaatcgaaatcaactttccagcagagcacccattcaaaccaccgaagagcacacttaaagatctgtcacccaaatgtccactaaaaggggcaggtctctctgccagtaaattagtgctgaaaactggaagccagcaaccaaaactgaccaagtaatccagtccctcacagcactggtgaatgacccccagcctgagcatccacttcaggctgacctagctgaataatactctaaggactgtaaatatttctgtaagaatgctgaagtttacagagaaatagggggaaaagcgacttgtagactaaaatctgccacaattggctccagtaagtgtgagcagagaccccgtgcagtgcattcagataccccacatggaaggactctgtggaaactgacacgtgccaccgcctaccactttggcagttaccaactttctacagttttcttaatcaaaagtcgtctaggcaacctgtaaataaaggattaaaaatttaagatgttctaaaaaatgaataaaaataaaaaataaatgacaatgtctgtaaatgaaacaaactctggttggaaaaacaaaaatgtggtgttgaaatattttgctgtattttgcctcataaaattttattttctgaagcaactgttaaaatgaattaacatttaaaagaactggaataacacagattattacttcatcaaaaggcagaatcacgaggagaaaaggagattcctctatattccaatcttctcttgctaggggacaatttgagtgggaaatcttttcaccatttaggtctggagtgtcctgttaataaaatgcaatgttgaaatggctaaatcacattggctgctatgcaatacatttttttagctacggcattgcttttacaaagtagcttttacatacttagcaatccagcaggtgataaatacatatgttaagaaggattaatgtactttaatggaggaagtaggaaaccaaaataaattccatttaaagagattaactgaatcttttgtaacaagacctcttttaaaatgcatggaaacagacatttgtaaactctcttctttcaaaatgtaatgtggtaattccaactactcaggaggctagggcgtggggactgcttgaacccaaaagtttgacaccagccagggcaataaagcaagactccatctcaaaaaaaaaaaaaaaccttaaaataaaaactttaaataatgtaacgcaggttaccctttacaaataaaattttttagtgaatttaagaaacaccagtatcatcaatattagaaattacgtaggtaagtgcctgcattcatatccaaattcatgaaaagagaaggaaaccattcatgttttgaaaaccaaggcataatattaaaatgtcttaactccaagttactttggagtactttattcagaaaagtctgttaacaaaagtaacatacctaccacagaatttttgtaggttacaatattgtcctcttcactaatatttccccctggagacagagtttcgctcttgttgcccaggctgttgtgcattgacgcgacctcggctcacagcaaccgccgcctcccgggttcaatcgattctcctgtctcagcctcctgagtagctggaattacaggtgcccagcactacgcccggctaatttttggtagttttagtagagacggggtttcaccaagttggccaggctggtctcgaaatcctgacctcaggtgatccacccgcctcggcctcccaaagtgctagctaggattacgggcgtgacccaccacctcttctagaatggacagtcttaatattactaatggagttttaatatatggttaatgggctcctcgctgtgacttcccatctcaggaaatgacagatccatctttccaatctctccgaatacaaatccattagtgtaagagaatgtaggaaaaaccattgtttctcctactctcacacatcactcaacacttctgacaccagattcttcaacagacaccagctgagcatcgtctaattcaattcaatcctaacactatccacctggacatagcatcacccctcagtccctcaagactgcccccctcttcagatgccaattccaaatcccaggttgtgacctgtatttcgaccaaccagttataaatcagagatcctataacccacctctttgtgtttgattaattttctagagcagctcacagaattcagagaaacatttcatatttatttacccatttattataaaaaaattacaaagcatatgaatgaacagccagttggagagctgcatagggtgaagtataggagaaggggtgcagagctcccatgtcctccctgggtggttgtaccaccttctaggaacctccacatgttcagctatccagaagtcctctgaaccctgtcctttaggttttacatagaggcttcaattctacaggtatgactgactgtatcactggccattagtaatcaacacaaccttcagccctgcagaggttgagagatggggctgaaagtcccaatcccctgaccattctggtgaccagcccccatccagaagttacaaaggggcctccagccactagtcgtcttattagcacacaaaggatattcttatcaagggttttaggagctgtatgacagaaaacagggatgaagaccaaatacatattttacaatatcacaattagcaaattcaactggctctactttaagaatatcctcctaccaccttcactgtcacctccaagccactgttatctctcatccggatggcttgcaagagagaggcttgtctcatgctgcctcctttgcccatctgtgttccagtttctcttctgaagagcaagtgaaatgatgccactcctctgcaatgtctttatcagaataaaatccacactcctcaatatgtctggcacaggcttccagggcatttctcactgctgccttcaggacctcttatcataacactcttgcccttgctccactgatgcaccctcacctgtgagatttacgcttgctgttttttctccttggactgcagttccctcagccatccaggtggttctcatttccttgcttctttcagagaaataagcaatcgcccctttatcagtttgtgtctccctgatcaaccaatataagataacatacatctcccataactacctatagataacactcggtctgcttttcttcacggcatttattcctccaaatacattactagctgttagaatgaaattttaaatgaatagaagatttacctattgttaactggaattctaaatgcttagggtagagtctggcacatagtaggcagagaactaatggtccctaaaaagtactgacaaatcaagaagagaataagatgatgtatacctggcatccaggacacaaactccagtggtaacaagaactctgtccccactactcaccaaccttgttcccgaccttccttgaacgtgagattacctctaaggatcagccttctcgccaactgttggcttagataccatgaaatataacacataatgaagctcgaggaaagcagaaaaataatgttttccctcaccccatnnnnnnnnnnnnnnnnnnnnnnnnnnnnnnnnnnnnnnnnnnnnnnnnngttttccctcaccccatctcaaaacactcaacacatggttcctcactcagtaggcactcaataatacatgaccgtctgaaagcatgaccatttttattttactagagagggaagcagaatgagacagatgacattttctcacgacttaagcttatacatttggaaggaagaaagcagttgtagtaagagaggcaggctcttcaaattctcacaaaacacaaattcctagttttgctttggatgggaagggcttcatttcaggcacgttgggggagaaagggcgaagggaaaaatgctcagactatgctatttttaagttatttggtaagaatggctatttttccctctgatattcttgaaccacccaaatgtcatgtttccatgcactgctgtctggatgctatcaaaggcacggctctgaggtgaaaggaaggagtcagtcatatgctcatcttctcacatgctgctaccactgctgattttttttaaaagctttgtgacctagaaaggagatgtacggtatgaatgatgcacagactgcagagagcatagggcgtcatcagtctatttatacctccaggaaggaaaaaatgagtacagggcaatggctctatattccaagtactgagtatgcaaagattatctggaagaaacaataaacaacacagtgagggcggcatttatgtcatcagtgagaaagaaaaggtgaggccatattcccatgttccttgatcgttccaaaattctgttaacttttaaagaatttcaagttgatcccctgatatttcccatgactgtataaagcatcccaaatctgagttaaagacactgccacccatattttaatacagcttcacctcatatgtgcatatgtatttacatttagcaataatcgatatccatttggctatactgtaagtcccgagggaaagtttttcagggttaagaaagtatttggaaaagccttacagttaattatgctacttaactccaaaaagggggaaaatgagatttacacagatttatacaatatgatagaaaaaaaaattttctcaaggtgtgtagttcatttcccttaagatgtgaaatctttccaggacaaagcagggaaaaagcacccaggcccagctgctaacagttattcctggatcactagtaaacttaatgccaggcttcacctctcgacttccatttgtttctactgtaagcagtataacatggagcctaacagaaatgatgttctgaaacgtacccattttgctcttttgcaacccgtttacttgtgcaattactgccagtttcacttgctttggagttattttactagcagtggcgatggatttgatgacagctggccacagtatgaggtgttttctaaggcttgacattaggtatttcctagtgcaaaatttactgatcccgcgtaggctccaacctagagccaggattccttaatggaacacaaactgatttactttgaatatactcaagcttcacagcaaacacttcctgtttctattactgtccaagtcttcttaccatgcctgaggcagacaatttaaggcttgattcctcaccctttcccttcatctgctgaaatcccatttagttttagtgcaccaggcatgcastggtatttcatcctatgcattccttccacagcctgacctataaagggctgacactgagtcctggcttgttcagatcagagagaattaacacttttatttctttratttcaaaagcttctgaggtaacttttgagctcgtaaatgtcaataatttgttgtcaagacaattatattcttaacccagctgctacatayagggaacatagagactgacagaaagtcagtgaatttagaattaaaacagtaagtttatctgattgactatgcttctcaaaatgtaaatggatgatacaaattaatacaaccaattcattttatttggtttggttttggtttttgaatgggtttatgggtttaasagacattgctctctgttgwttatgtgtattcagtgtcagaaaggaaaagtgagcagtgtgaagtcttattagatggaagacaggtctaaggcacatggaaaactgatattcgtgatggacaggtcaggagctagagagcagggataaagaaagcagaaaagaaaagaaaactcagctacaggtactctgtaagtgaaactaacaggtacttgataaatattggctggttgattacacaacggaggggaaaggaatggcatgctgtatcatctttaaagactcctctacatgtgccacactactatgaataggaaatcaattttcctgtgctcaataattgtagagctctcttgtctcttaacttcctgctatataaaccagtcctgcaaggtcctccctccttcttttccttctctcatattgccacaggggagctcaccgaaggagtctgcctttaaatggagataaacctagcacaaacaaaatcagttgtgctttcaataggttattgaagtacaaacattcagagggagttttaaacactttggcaaatcttctgagaggcagagtaatgatgttccataagaaaatttgctaaacgaaaataagtagaataatacctatttctcttttcaaaaagaaatttcattttcatggaagtagggttttttatgatttccatacttaatccttaatttatgctaatgcctctgtttataattttcaacataattactgtggggcaaaagaaagcaaagggacctatacagacatatttaatgtacacacagcaaacgaaaagagttagtcttatgcaatttttaaaaagctagtcaaaaaaatgactagtcaaattttttgaaggaaacagatatttattttcgatttcctaatttcatgtctgtatcctcagtcacactgacagtcatcattcattctaaaaaaaaatgaggtattacccaaatagcttatgtcagcattaattgttaaataagtacatttgtaattcctcctgtcagccatatccccttacgtatctatgcagatagtcaagctcctatatccaagttaggagttaggaatacagtggtacagtttatcaatatccatagataggacagagtaagatttcctctcactaaacatttattttaaatctccctcaaatcaatttctatataatttcttgcaaaaagaaataaaaaccagcagttactgctgacaaattaaactaggggcaaatacacattaaatatatacatttatatatttacatttgtatatgtatatttatatatacatttatatacttacacctatacaggagcatttcattgtagaattttgactcattcaaactctgttcactaccattaactgataaattatttatgaaagatgatcatgacctccattaaaaaaaaggatccctcaaagcatgatatatttctaagaataatgcaacctattttctgtgacactgctttgttcttcaacactgtcagtggatgaacgatatagttttaacacatttttgtgccatggccatgaaatgcttacatttattgtgttaagtttaagcatatgcttcaatattcagttttcaactgagataatgattttaaaagatacaatctcacctctttaggattgttttagttttcacttccaaactgctacatttgactcgacactattacaaactactagtgaacataaatttcaaaagaattgtcttacaatttcagatctttaacccattgcagtggtgtgaactaagtatttccgtgcgtctcccactttcagccacgtggtaggatggtgcttccctgtctccttgacatttggtgaggccatgcgaggtcagtgaaatgcatgaacaagtggtatgcatcactaccagccagaagtgctgagaaccagcgtgtgactaccatgtgctctccctctcctatgtgattgtgaaagaacatgtcaagtggagcttccttcagaggtaactatgataagcagtcttcccttcaatctacacaaacatgagggaaatcttttttgttgtaagccattacaatatttgtggttgttgttactgcaagatagcttagcctatcctaactaatagacaaaacaggtcatgaatatgggtcgcacactggaaatttggggtaaaaaatacattacataattttaaaagccattttaatatggaataggtagtgtcaatgactgaattccattttggtgtagaactacaaatctggaaacagattttcaaatttttatgaagaagaaggttaataagcagttcaatatttcacaagaaatgagaaaagcagagcagaatagatggatccagaaatgcaaaagggtcatccaggaggaggcactaacctaaggaaaagcagaagaatacagcaaggagatttcagagaaaggaaagtagttacaaatgaagctatagagattggcaaggccttgtacaccatgggaagaaacaagaaatgcatgctgtgggccccggaggatcataagcacatgcactatatgatcagatctgtaattccaaatggtttatctcggtagtttaaaggcagggttgaagagagggatgggtgagatgagacagagtaattgggaggaacacattgctcactctgctcaaaaacatcctgtgagtgaccacagcttacagaatgaaatatccatccttccctgtagtaccaaataccaacatcagggaacagagattagtggtcaagaccccagtccctggtttcaagttcatctgctgccacatattagttgtatcatgtcctaaattctttatccatacatttctacttcttaggtttactgtgagggctaaataatttatgtaaaatgcttattttagcaaagtacctggctcttagtgagaattaacttgtcaatctaatccattttatgacccattacataattgcactattcttcttcaatactatatttttttcactcttctgctactaatgatgttgccttcgactacgtctttctcaggtctctccctgttcaaattccactcacccttcagaacccactcaatgactatctgctccatgaaggatcctactcaatgactactctactccatgaatgctccctttgcctcaggaaataatctctttcaagtctggactataacacagtttctaattgcttcatggtacttaattatatatttgcagaatttatttttctcaattatgttctattttcctttaaccagtattacttcttatgtatccattatactcccaacagtactttgtggtagtgccttgaacttactgagcttcactgttgaataattcaaggaattagatccaatcctggcatacaatttcattataatttattagtatgatacataatgttttattcatgtgtcagaaacaatttcacaaaacgggtagttttctccctccttttactcataaataatcaaaggtgagataggtgaagtcattctaaaatggcatggcatattgataaggaatcccaaaagaatatatccatctctgatggaaaacctctagctccaggagcagaaagggaagaaagctaagcttccacaatgagttagatcacactcttcatcccacagggataaagatttcacaaactagataaggatccttgtaaacaactggctgttaacaaatagttttatttttcctcagactccaccaccaagtaaacctactgttccttgataccctttgtccaggctgtagtaaacaagtactcaagaagtgttatgtaagtgatgtgacttattgagaaatagatttgcccttgaaaagaaatatgaatagaattgcacttggcccctgtagtttgatcattgtaacgtgaaaaagatacagcctatcccagttcttttggcttaagtgagcaaataaaattaaaagggacttggagaataattttgcttactgctctgatttcaacttttctgaaatgggctttgaatattaacgtctacttcacaaacttttcactatactcagtcccaagcaacccataggatcacacagccatgccaccaatttctttttccttataattacgttaaaatttaagtcttttgggggccaaaaattaaatcctaactattccttgtaaaacctggagcaaggcaatatcctacacaccatcactttttcataccccaccacaatgttaactctttgaaacatcccttgaacaggtttctctcacactcattagactcagagcttaattagatttctttggatttatatcatacaatgacttttaaattctcatcattttttatacagtacccaaataaaaacaatcagaaagaatgtacacagaaacaattatggattttgaaagttgatatcaacttagatattggtatcaaactatgtagggaaattatcatttatgtagagttatttaatcaaaaaatgttgtcacaaaagcaaagctctactagatagtgctagctgtctgttcctattttttccagactgacttatgcaatatcctgatgtttaaaactattctgtcatggaaaatctgtctctagggtggggtgagaggagggtgtcccattttctttttaaagttataataagaagcagacaaacaatataataaacttgtactttgcaaacattttgaattacgcattgcaaggctacaaggtaaagacagaaatatgcattttaaaataaaaacttagcagacacccattttgctcgcagcatgaacaatacagtaaaatcaaaatattttgccttataagcagtcagcaataaccagtgatctgaatatttttaagtgcaataggtcatatatcaaatggagttcatttcattttcctcaaatgctaccgtagaaatttaaagactattaagaaataatgataatttcccctttcatgcatataaagaatcaatgagtataataaaacttcattcaggtttttcccttttctatgttgactacatgatatgtggatataaacagacaaaattcatactgaatgtcataaatcaatgttaggaaaaagtaaatttagagtaactttccaactgagtgagtcttgttctcttcaaaaagtgaacctttctgctcttatctcttttcttgcaaagctaagaaaagccctttttaaaagtcctattgttattttctggatcattacagaaaaattatattttgaaactgtaaagatttcattttttaacattcaaaactgacttaagaatggaacatattggtcaggcacagtgactcacacctgtaatcccagcactctgaaagggtgaggcaggcagatcacctgagatcaggagtttgagaccaccctgaccaacatggtgaaaccccgtcttcactaaaaacacaaaaaaaattagccaggcgtggtggtacgtgcctatagtcccagctactcaggaggctgagacaggagaatcgctttaacctgggaggtggaggcaggagaatcgcttgaacctgggaagtggaggttgcagtgagccaatatcatgccactgcacttcagcctgggagacaaagcaagactccatctcaaaaaaaaaaaaagacaacatcttaagtgacaagagaatccacgaatcatgggtctggctcagtgattgaaagtgattattggactagaagcaaggcacatctctggactctagttgtgtcagaggaaacatgctaactcacatcatagcaagtccatatcctgtgtgataaagatgttatgacagaaagctaaatcactccaacatttctacttcacagtatgtgcctgaatgcataccatatttgtctctactatattttgcattgctttttagatgaataacttttgaaccatattttctcatattactaaatcactaagtgcaatgtcaacatctgaaaataattatttctgtgtattcgcataaccttggaatgctgagaaatgtatttggcttgggacacagcataacagccctgacaaccctgccttaacattat

SEQ ID NO: 96675 - DNA, 12709 bp, Homo sapiens
tccagactctgcctgttaccaagttccaaagtcacttccacatttttgggtagcttttcagcatcgccccactccaccagtaccaatttactgtattagtccgttttcacactgctgataaagacacacccaagcctgggaagaaaaagaggtttaatggacttacagttccatgtgactggcaaggcctcacaatcatggcagaagacaaggaggaacaagtcatgttttacatggatggtggcaagagagagttaatgcaggggaactcctgtttataaaaccatcagatctcataagacttattcactatcatgagaataagcatgataaagacctacccccatgattcaattacctcccactgggtccctcccatgacatgtgggaaccgtgggagttaaaattcaagatgagatttaggtggggacacaaccaaaccatatcagatggtgctaactgcatgccttcctgtacccgatctttccactgacaccaccactgcactgacactagtggcctctccgcaaacgctgcgctgccactgctgtcagtgtgaatggagggcacatgcccaaaagatctctgcccctgctatgacaccggcaacggtgcaaacacatgcttggatgccaccacaccagcacacccaatacctcagcttgggcaacgagcatgcaccctgccagactgctgctgctgctggcgtaagtgaaccagcacgaatctcactgccaccttcctatgaagcattttggctgacaccactcatgggagtgttgtgaccagcaatctgggaacaactcaccccctccagtaatcaggagggaccagagaacaaagctagggcctgaaaccagccccccagagttagggcatgcagctcgggagtcctgagctaagccatggccccccaaaatcttccagaatcaaagccagtcaaccatgcccaccttataccataatcaaggccccaaggatatcaaagcggataaaagaacaaaaaactcatccaaaggatgacaacttctaagactgaagggacatcagcccacgaagataaaaacatccagtgcaagaactctggcaattcaaaaagccagagtgtcttcttacctccaaatggccacactagttccccaacaatcttttttttttttttttttttttttggatggagtttccgtcttgttgctcacgctggagtgcaatggcgtgatctcggcttattgcagcctcccaggttcaagtgattttcctgtctcagactcctgagtggctgggattaacggcgcacgccaccatgcttggctaattttgtattttcagtagagacagggtttcaccatgttggctaggctggtatgaaactcctgacctcaggcgatctgcccgcctcatcctcccaaagtgctagaattacaggcatgagccactgggcccggccaacatggttcttaaccaggctacaataacagaaatacaatatggaatatggataaaaacgaagatcactaggattcaagagaaagttgaaacccagtgcaaggattctaaggaatacaataaaactatacaggagatgaaagacaaaatggctatttcaacaaagaactaaactgagctgatagagctgaaaaactcagagaatttcagaatacaatcgcaagtatcaacagcacaaatgagcaagctgaggacggaatctcagaggtcaaagactggctctttgaaataactcattcagaaatgaagaaaaaacaataaagaatgaacagaacctatgtaaaatatgggactatgtaaagggaaccaaatctacgactcactggtgtccctgtaagggagagaaagcaagcaacctcgaaagtgtatttcagaatatcatccgtgaaaatttccccaagcttgccagagaggccaacattcagagtcaggaaatgcagagaacccctgtgaaatgctatacaagatgaccatcccaagacacatgagattctctaaggtcaaaatgaaaggaaaaaaaagctaaggcagctagagaaaagggccagatcacctataaaggaaacccccaataaggcttaaaacagcagaaaccctacaagccaggagagattcaacctatattcagcattctttaaaaaaaaaaaaaaaaaaaaaaaaagaacttcaaaccaagagttttatatccagccaacttcagcttcataagcaaataagtaagacatccttttctgaaagggaattcatgaccaccagaaccacctcaatagaggttctgaagggagtactaaatgtggaaagaaaagactgttactggccactataaaaatatacttaaatacatacaccagtgacactgtaaagcaaccacacaaacaagtctacgtaataaccagctaacagtaggatgacaggatcaaatccatacatatcagtatcaaccttgaatgtaaacaggctaaatgccccaattaaaaggcacaaagaagcaagttgcataaagaatcaagaaccaatggtaagctgtcttcaacagatccatctcacacgcagtgacatccataggctcaatgtgaagagatggaggaaaatctaccaagcaaatggaaaacagaagaaagcagagtttggtattccaatttcagacaaaacattctttaaagcaacaaagatcaagaaagacaagccctttacatagtggtaaagggctcaattcaacgagaggatctaactatcttaaatatatatgcacccaatagaggaacacatgttcttagagacctatgaagagactgacataaccacacagtccaatagtggaaaactagtaaattgaccactagctagactactaaaataagagacaatatccaaataaactcaatcagaaatgacaaagggggtgctacgactgactccatggaaatagaaaaaaaaaaagccctcagaaactactacaaatacctctatgcacacaagctagaaaacctagaagaaacagataaattcctggaaacatacaacctcccatgactgaaccaggaagaaagtgaatccctgaactgaccaataataagttttgaaattgaataagtaataaaaagcctaacaacaagaaaaagcccaggaccagctggattcaaagccaaattctaccagatgtataaagaagagctggtaccattcccactgaaactattgcaaaaaaaaaaaaaaaaaaaaaacaaaggggggggggggtctcctcccaaactcattctatgaggctagcatcatcctgataccaaaaactaacagagaaacaacaaaacaagaaaacagtaggccaatatttttttatgaacatggatccaaaaatcctcaacaaaatactagcaaactaaatccagcagtacatcaaaaagttaatccaccatgatcaagtagtctttatccctggtatgcaatgttggttcaacatacacaaatcaataaatgtgatgcacaacataacagaactaataaaacaaaccacatgtgccaggcgtggtggctcacgattgaaatcccagcactttgggaagccgtggtgggtggatcacttgaggccaagaattcaagaccagcctggccaacatggtgagaccctgtctctactaaaaatacaaaaattagccaggcatggtggcaagcacctgtaatcccagttacttgggtgaggctgaggcaagagaattgtttgaacccaagaggcagaggttgcaaagagccaagattacaccactaaactccagcctaggcaacagagcgagactctgtctcaaaacaaaaaccaaacaaaaacaaaaaccacctgatcatcttcatacaggaaaggctttcaaaaaaaaattcaatattccttcatgttaaaaaccctcaacaaactagacactgaaggaacatatttcaaaaaaataacagccctctatgaaaaacccactgccaacatcatagtgaatgggcaaagctggaaacattccccttgaaagctggaacaagataaagatgccttctcttaccactccaatgcaacatggtactgttaagtcctagccagagaaatccagcaagagaatgaaataaaaggcatcaaaataaaaagagaggaagtcaaactatctatgtttgcagacaatttaactctccacctagaaaaccccatagtctctgtccaaaagcttcttgatctgctaaacaacttcagcaaagttttaggctagtaaatcaatgcagaaaaatcaatagcattcctatacaccaacaacatccaaggtgaaagccaaattaagaatgaaatcccattcacaactgccacaaaaagaataaaatacttaagaatacaggttatcagggaggtaaaagacctctgaaatatttcataattataaaatgttgttcaaagaaatcagagatgatacaaacaaatggaaaaacatttcatgttcatgattaggaagaatcactatagctaaaatggccacactgcccaaagcaatccacaaattcagtgatatttctatcaaactaccaaggacattcttcacagaattaggaaaaaaactattttaaaattcatatggaaccaaaaaatagcctgaatagccaaggcaatcctaagcaaaatgggcaaagctggaggcatttggcattaccagacttcaaactatactgcaatgctacagtaaccacaacaccattgtaccggtacaaatatagacacacagaccaatggaacagaataaggagcacagaagtaatgctgcacacctacaactctctgatctttgacaaacctgacaaaaacaaacaatggggaaaggattccctattcagtaaggggtgctgggataacttgctagccatatgcagatgactgaaactggatcccttccttacactatacataaaaatcaactcaagatggatgaaatacttaaatgtaaaaacaaaacgataaaactcctagaagataacacaggaaataccattctggagatgggatctggcaaagatttcatgatgaagacactcaaagcaactccaagaaaaagaaaaattggcaaatgggacataattaaactaaagagtttctgcacaccagaagaagttatcaacagcataaacagacaacctacagaacaggagaaagtggctgcaaattatacatttgacaaaggtctaatattcagaatttgtaagaaacttaaataagcaaaaaaaaaaactccctttaaaagtgggcaaaggacatgaaccgacacttttcaaaagcagacatacatgtggcccacagcataagaagaaatgctcaacagcgttaatcattacagaaatgcaaatcaaaaccacaagatgctacctcacaccaatcagaatgcctattaaaaagacataaaataatagattttggcgagattgtggaagagaagaaagtttatacactgccagtaggagtgtaaattagttctgccaatgtggaaggcagtctggcgatttctcaaagagcttaaaacagaattaattaccatttgacccagccatcccattattgtgtatacaccccaaaaaatataaattgttctaccataaagacacacagacgtgtatgtgcatcatagcactattcacaggagcaaagaaatggaattaacctaaatgtccatcaatggtagaacagatatagaaaatgtggcatgcatatatatatatatatttatacacacacacacacacacacacacacacacacacacacacatggactattaagcagccataaaaaagaatgagatcatgtgctttgcagaaacatgaatggagttggatgccattatcctaagcaaactaacacaggaagagaaaaccaaatagagccatgttctcacttacaagtgggtggtaaacactgagtacatatagacacaaagaaaggaacaacatctcccagacactaccacagccacgattgccaggcatggtgttggtgggttggtgtctgtgtcgttaaattgcacgacatggctgagcaasatcccttcggtgtccctgctggcacccctggggatcctgtcctrgggaacggagyggctggcgccagtgaagaagacccagctgcggccttcttggcactgcaagagagcaagactaygggkatcaagaacaacaaggtcgccttcgacatcctggatggtgtcacccccaggccccagccacaaggtgaacagctgggagtccagatgctgttgacggagtgatgatggtgactactaccaggaaagtaatggtccaagagacaattatgcagctatttcacaartggatcgattcccatccagcctgaaaatatatgcagatgcaaagaagagaaaatggaatgcttagcagcccttgctgcttattctcmgaagcaagaagcagagtggaaagaaaaagcgataaatgagctagaagaatggcgtgcaagacaagacgagcagctacagaaaagaaaggcaaactacagggcagaagattttgtaaatgacattgacgagtcatccccctgcactgggtggtaacaggtggcccggttktttgactgtaaccccaagtcagcaagcagggcaaagaggtctcctgtatgcactcagtcctcaactccctcaagcaggcgacccctggtgcactgacaaaccgctcctggaaacactacatctgcagtatcttaatcctacctagtgaaattctacaaagtaactggattaattacgctgagttcttttggaccaaacttttttgtgtttagagctgatcattgtttgtgattgcacgtttccttcaactgtgtcctccctggcatacagagaggagaggagaaggaggaaatggaagggagggaaatctcctaacagcagcctcaacgtgtgcttttgtgcgttattctgagaataaatttctatttcaaacaaaaacaaaagaccaaagacagaaacaacagatactagggcgtacttgagggtgaggatcataaaactacccatcgggtactatgctgattacctgggcaatgaaataatctgtacatcaaacccctgtgacacacaatttaactatataacagatctgcacaagtacccttgaacctaaaagttaaaaaaaaaaaaaaaaaaagaatactgaagtgttagtttttgaatgtttattttatgtaaggttacgaaaaacttactaaagtcagagactagcattatgtggagtcaaaacctaatgatgcttgataaacatgcattgaaaacaatttttctgagttactgaaatgtacatcttattctgaaattgtagagttataaatgagaaacgcttttttcaatcctgaatgtatataattatgagtatctttaatataattgtactcaactttattgatacgatgaaaataatatctttggtttttttaagaccacaggactctttccaatgtactacacaattttcctaataggaaaaaaattaaagaatatgaaaaagttaacaggtagtttatccctttctctgtgggaggactgattcttctctttttgttcttatcctttctcctctgatgtaatatttcttcttgatactcagagaataattaactgtattagatgaagtttgacatattaaaacacattctcattatgcagttccataatccctctgtgcatgtggttttaattacaaacaaatgttagcagggaaaacaatttttttctgatatacttaacattttgaaaggctaaagatacaatctgagttcctatttgcaaagaaagatttatttatctatgcagtatcatttatttagtatctgccacgtgtgaagtgctttgtcatgaagtaagggtacaaatcacaaggttcttcgttgtaattaattggcaggatcatagataggcagcaacagttgaagggaagtataagagcagtctgggctggcaatcaagattcagtcagacgttaggatcaagaatgcatgtagtttaaatggtgacactaaaaattaaaaccaggtggaaagaaggaatgagcggcaacaacagatgctgaagatggagttctaccaaagctaactagacagacacaaatatgaaaaaataaaaaggaatataaagattaaggcagagtttgaaagacatcagacgcagtgtcacagccataaaatgaccatggtgctgaggcaaaattctaaaacaattgcagcctcaaatatcatgtaactcaataagaagcgaggctctgaagactgagacttgaggctaaccgatatcatattatgtatccccactagatgatgagctgcatgatgtatctgtactactactggaaacagagtacctaacaaatatgttaatcagatggaaaaataaaggcataaataaataagagggaagaatctcaattccaaatactaacatcaagatttctgtatatccttaatgtatgtcaattactcttgtcttaccatttttttgttttttgttttttttgagacggagtcttgctctgtcacccaggctgcagtgcagtggcacgatctcggctcactgcaagctccgcctcccgggttcaggccattctcctgcctcagcctcccgagtagctgggaccggactacaggcgcctgccaccatgcccggctaattttttgtatttttagtagagacggggtttcactgtgttagccaggatggtctcgatctcctgaccttgtgatccgccaaactcggcctcctaaagtgctgggattacaggcttgagccaccacgcccggccagctgggtttttttgtttaaaaatttcaggataatgttaacattctctttgctggtggtatgaagactgtaataaagctactgaatgccctttgtaaatatttctgttgaaaatataataattatatttaatctaaatcagtctatatgatttttaagttttttaaaaaatgggatgatagcatccttaatgactctcaaagacctagcatgtgcaaaatccctgaggcatgaaagtgaagaaagttggataaagtacaatatggtatggctgcctaagaaatagaaaaaaaaaatgcctcgatgataaattttagactaaatcagcaggtcattttgcaataaaatgttctgcatgtgcatgcacaatataacgcttagttttactcacaactgaattgtaatgcagtgaaaatttttggactatatctggcaaacccatagcaatcctcaagcagtagctaaaatccaaatcttgaaaataacgcatttgttcacggtgggagttacagcctacgcataagctttatttcattaaatgcatattgttaaagattattgcttttttaacaacaaaaattgtttttatgtcctatgtaaccatatgtttgtatagtttccctttagctacacaataatgactgcttttgtgttgattttcatgctgttaagtggaccattagtacttgacttgtgccattacatagtatcttaatagtgacaaacaaataaacttgcaaagcagcaccgcatcacactgcctgcactattaattttctttatattctctgtattcatttacatttaagctcaatgaagaaacactttgtcaatatcttcaggttttcctagacatgtttgatttcacaattaatatatgaaaatgtgagcagagtcactagccttacaaataccactaatttttcaaaaaaaaaaaaacctaagaactaaatgaatacccaacaaaatactcctgtcttttactaagcttgtcaggcccaatttgctcaatgcagttggaaaattaagctattaaagatagaatcagaatttcagagctcatataggtctgttatatattgattctgttgactgccacaaactatgcgccattctaaacagtgtttcccccaagtgtacactgttgatgttaaggtcaatgtgtagtagaaataaatagcccagaggactgcagtgaataccacttttgaaaaatacaattcaaaacacaggccctgttgacagagcatcaataataaactttctgttaagggaacaaattatctatccaactgtttaagaatttttaaaatcttcaagatgtctagaaacagccgggaactgtccaccaagaggaaccaaaatatcaaataaaccatcacactctgaataaagattttgtgagaaagcatcaagtcaatagagaagagatggacactgtgattaaagagggaggaagccaggaagccactcagagtcgctgggcactaggaccggcctcctgtactgaaccagacctgaggaagcggtgagtgaaggaatttcggcagcacactcccaccacatacctctgggatcccagctacaggtttcccaagacccccaaagacctctgaaccggcagggaagccactcagagaataggcagaagcacagctcaaacttgcatgcacccccaaatgtttcactacgcagtgcagctccagcaaaatgtgaccaaaggtgttcacgccccgaggtgtgccatgctgtactgagtggctgtagctactgctgtctgctaggctgcaagagagcagggccaccattgccacaggactggggtgcatctgatccatgtaaccccgtggcccctcctaagcctgcctgcctgaacgatcttgcagaagtgtgcccacagcacagcctccattgccccatctgagtgttttgctggaggtctaggagcagtctgctctcctgcagcacagctgctgctttacatccaggggctagagaacaaacccctggatctggtcccaactccccaggacttgaccacaccacccagggataccaagctgcagatctgtggccttagcttgagtggggaagcagccctcaatctcagaacacagagaagactgtggcatgggctcatgtgctgacatcagagctgggcatccctcctttcataagaccagtccgggaggaacgcagcctgacagccagctgcagcttcttccccagggagtcccaaggcatcaaatgcctagaacagtgatctaggtgcagaaggcttacgacaagcttagccggttgggcctgctcctggtgcagacactggcgggagacccaccaggtcaggagaactcaagcctcttgggctgccaggctgaaaatataccagttgtacacacggtgccactgccctggtcaggatcctctgcccttcctctactgcatcaccagaccaccagtgaacacactccacaactcactctgactctggcaaatacagaggaacagtgggttcccaaggagttgtgactctcttggactgctctatgggaggcagaagcacagcccattagagcctgccccccacccacccctggggcaaggtaaacattggaaaggcaccagtagttgaatgggttaccaccaaatctcagaaaccagagaggcagtcatatatggcccccgccttccctccccagagcactacggtgaatgcagtgaaatactaaagtggagagcacgactaagatcctattttcaggcccttatctcttaagtgtcagctggtggactgcactctgaattacaccaccaaacaaaaccacattgcttcagcactcagagcctgtgaaacccaccacaggaacctatttacaaccaaagaaaccatacaaagtcttggccatatgaaagtactcagaaacgaagccagctgactatacacaccatataccatagtcaaaccttcaaggaaaaaagaacataaaaataaaaagccccaacaaaacaacagcaaattcaaaaagaaaaagaagcaccagttccttctgagaaggaatcagtgcaggaagtacaagaattgaaaaagtcagtgttttgtaatatccaaaggattgcactagctccctaacaatcgatcctaaccaggatgaaatgtctgaaattaaagatataaattcagaacctggacggcaaagaagctcaatgagatacaagaggaagctgaactccaatccaaggaagtcagaaaagcaatccaaaatttgaaatacaacaaagatatagtaagaaagaaacaaactaaacttctggaattgagaaatccaccataggaatttcaaattacagttggaagtcttaacaatagactagatcaagcagaagaaacaatttcagagcctgaacatcactccttcaaatcaacccagtcagataaaaataaagaaaaaataattttaagaaatgaacaaagcctctgagaaataagagattgtgtaaaacaaccaaatctatgattcattgtgcgttcttaagagaaagcagaaaacatggaaaacatatttgaggatataacccacaaatattttcccaatctcgctagagaaatgaaagtgcaaatacaagaaatgcagagattccctgcaagaaactacccaagttgaccatccccaaggcaaatagtcatcagcctttccaaggtcaacgcaaaagaaaaaatcttaaaggcagctagagaaaagggtcatatcacctctgaagggaacctcatcaggctaacatagtacttcctatcagaaaacatacaagccagaagagaatggggcctgcttttagaattcttcaagaaacaaaattccaaccaagaattgcatctcatgccaaactaagct

SEQ ID NO: 96676 - DNA, 32334 bp, Homo sapiens
gatttggcttacaatcaccctagggattagggggacatacaaaacaggacccccacgaggtgaggctaacaaagttatgtgaagagaacacaaaattcccatctccatcatctcttctggctaattttatacaggtttcaaatcttccatgataaaaaggatttttgtagttgttgtttgtttgaaatctcagatcccaccagaggagtgaaggaaagcagaaaggtgggaacatctctgtggcacagggcctggccgacagcgagggatttccaacgattccccagaagtttggggtgttctgcaaatgctcattgccagcttcctttttcaagtaaacttttaacccatctttttgaaatctcagttaaaaaatacccacctcacatccagaagtgacaggatacggtgcactctgtgaccggggctggcctacacactctttgtgattgtctgagagagataagtacagaatcaaaagtcagagggtagaaacttttacagttttatcatttgacacagcaacctatgtctgttgagtctaataagcagatagtgggcttatcttttttatatatcttccattttattataacaattttcatcatattttaaaaattggcccatgaaagattaaaattttaaaaacagtcatctagtctttcaccatggagagcttgagaagcactgttatggaccagacatggaacccctgcagaccccaaatccaccagcttaggaggttggccacagatgccaggacaaatcttcccttcccaccgtctgctgcgccgactccagtacttcctataaacacatcacaggcgctgcaaagcctgtttgattttctgcgctcattggcacacttccacaccagtacaagcagagccacttccagcagacacctctgtcacccaggctggagtgcagtggcagcttcacagctcactgcaaggtccaggttgtgtgctgggtgcccctgctggtcaaagcaccttggccagccaaggttagccagccaattttcacacacatgcccactgctgtttcctcttcagacttctgggtgggtttaaccgcagagggtcctaagattgcaaggtgagtgtttgaaaaactgactgcttctttgtatcaactggaaatcactctatcactaaagtactgaaattaatcaggagctgggactagtgtaagacatcaacctgcacccatggccctaggtttctagtgtgctcctgaaaatggtatcgctgttctaactatgatacacacacacacacaaatcacaaatataaagttataaaataaactcacaggctgggcgcagtggctcacgcctgtaatcccagcactttgggaggccaaggcaggaggattgcttgaggccagaagttcaatatcagcctcagtaacatagcaagaccccatttctaaacaataaaaaaagaaagaaaaaattagccaggcatggtggtgtgcacctgtagtcccagctacttcagagggttgcttgagcccagtgagcggattgcaccactgcactccagccttggcaacaggacaacactctgtctcaaaaaaaaaaaagaaaaaagaaaaaaagaaaagcgcaaagctaaaaccaaaccacatagtgattttgtcaagttcacagctggcctgagtttcatcctccctcttcttacatagcctcactcatcttgtttcttcctccataaagtgtggaatgtgatgctacatctacgacccatatattattaataacaaataaattcaagtatcatggatcaaaaaatataccaccgatcctgttgcatgtgcccaacatacggcccaacgtagggtgacagggtgatcctccctgcagccctatgaggctaacttcatcacccctgtttacagatggagctttgagagaacgacaacagtacctgtctcctctgcatccgaggctttctttgagaccccagtgtgataacaacaatgtaaaaatcaatgcaagtacccaggagacaaggcacagggaccacagccatgaacagaacacatgtatgtgacctcaaggggtttctcctaggaaccaggaggagtgggattaacgctgagttaacacctagcctgagtctgcgggctttcctgggccagcccctcctactagagcagagaaaatgtgttttgtagccctgctgggaacagtggggtgcaagccctcagtgtggcttcagggtctttccctcaaagcaggcattaaaattgaccctgccaagcttaaccagctggagcagaacatggggttgagggagcaccgaggccaggagtgctcccaacagttcctctcccagctccggctcaccaccaggggccctgggagacagccagtatgtgccagaaacggctcactcttcacgagacaatgaatccactgttgaccagccagggccttgattaatatttgcaaaagaacgaactggaaaattccacctgtgtgggtggaggctggacccgcaggacttgtcaacaaccctgatggccttgttctcccagggatggatcaggcaaagaagcaaaggtctgaataacaatgacagaatctggggattaccgtgactcttgggtcctagggaatttccccccccctttttttttttttttttttgcttctgcctctcctgcccctaaatttacacagcactcttaaatccttcaacttgctttcctatctgctgttttgctgtttcttctgcgtttcctaacagccctgctggggaggcagaactgatgtcagccccatgttacagatggagaaacaggttccaaaagactaagagcctcactcaaggccaacagatggtgaatgagccgcagaaccaggtggtctggaagccaggcatctcaccgcgctgtggctgcacagagtctgtgcagaccctagggtctgggtcagggccataggtacttgacccagtgatcttccaggctctggcagaggccctgacctttgctctgcttgtgaagaaagaggaggaagttcaaaccagctcccctgggtgggcaggctcaggcactggccttggatgaaggtaggtgttaatttattcatccattcaagcatttaatgagcaccccctacaaagcccccccggacaggaaggcacactggctggtagctctttcagaaacccagacctagcagaatttatgactgaagggagaaggtcagaaaatgtccaaaggtcgcttctctcatagactcaaatcacttcatcgcccctatcaccaccccattttacagaaaaggaaactgctctgagaagagcagtgacttgccagagcctccagttcaaaaagccacaaagtcatcaggcttaggcagccaaataaattgtgtgccttccggcaggccacctgggacctctcatgcagggccacttgaggcatggccttctgagctaggggggaaaacccccgaggggacaggcagacacacctgtttgcccacctcaacctccagttgtggctacagggcccttcacaccctctcctccactccacagccccaactacgaaactgaaccaggtatcaccccatccctaagccccagggggccagggcagtgtcattctgaacccagaacagcaggaaagccacttggcctgggtcttgggtctctgcctggcagcccctgcctgagtactcctccttcttacagctcagccacctccagaccaccctcacctgacacttcttcccctggggggagaaagaacctcagcccttctctttttacaaaaccccctcccctatccttttgccaaggcttcctgtgactgccaccaaccagcctcagtgcccttggtctctctgccccatctgaccccatgagctcctccctcactactgggctttcctgctgcagccccttagacctccccacctcctcaggcaagctctcctccccagggctctatcctcctctcctctccactgccccctgagaaagtctgactcatgaaccctgtctccaggcctaacctccgcaccctggttgtctcaaagcctgtgtgccgaacaacaccaagctcacagcagggcctgccctggcacacaactgaaaagccagcacagcccagagcctggcccacagcacagaatcagatactcacggaatgaacgcatgttagtgaatggctgcctgctcgctcgtctcagagggactagccctctattttgccctgcagagccaaccaggtggcctttctaaaaccaaaaatggatgaccatttaagcctgtaccattgttcctcagcaccatgggacaaagttcacaatcttgagcttgcagacgaggctgttttcatctgggcttccgcagcaaggcgggtacttgtgtccttgaaaataattctcactgcactcatcctcactccaggagtacccatcagccagcacccatgtgtggttcacctttgcacccagcaggtatttgctgaacaggaagatgactattagagctgaaaatgttctcaagggccacagggcccaaagcaactcagagaggtggaatgaggggctcagggtggcccagtcccaggcaggggtgcggccacaacctcaactgagttccttggtcaggaaacagagcaattctctgaaaatgctacctgcaactccacacgtatgcatgccagagcccaaacccctggctgatccccagtccatgcaagccttaatcaagctggcaggtgggccaggcctggcacacaagtagggcctcagctaaaacagctgcttgacttagtacagcctctcaccagctgacaacacacccctaagttccatacccctctctaggcctccgtcttctcatctgtagaatggagctaattctgcctacaagtttaaatggccctgagttggtcaccacaaccctgtcgtttgcaaaccgagggggctgaagcagcagttccagcctctgtgactccactgttagcccagctgatttttgtgaactttcccccaaacccactgtgtctcaaaggatggtccctgggccacccacccacgaattacgggggcgtgggtggaggctcgttaaatgcagatcccgggcctgacccggacctgccgtctggatctcattttaggcggcgctagagatcccgggccagggaaacttgagaaccgcagctccaaatcgccagtgctgacggcttccgctttgggagccccaggtgttgctgtccgaactcacttggtggaaacagacatttaccagaaagcctggggtcgggcagcgggcactcctaccgctctaaccccgcgtagctgaaagaattcgctccctcaaaggagtcagtgagcttcggcagtctgcgttccacccgtttcgcttcgcgcggcggggcgattgtgtaaagcgggcccgggtctcggcgtccagcccggccccaaacctccggcccccaggcctctccgggctagcggccgggcggcgctgctgcggggtggtcggggcgcctccgcggctactcacccggggcgactcggccgagagcccgacagtcgggaccggagcgggaggagcgggtggccgcggcccggcccctgccccgcggcactttaaccggcggcgccggcgccccgcgcgctctctgcgtccggaatggggacgcagcagttccgacccggtcggccccggagccgcgaggctagctgggctccagcggaggcgcgcgaagcccgagggcgggtgcagctgatgcacctggctcactgcatgcacgtgtgcgcgggggtaggcgcgcgccgcggcggcccgtgctccgccagcgctcggacacggcccatccctccgagccccagcaggcgagggcgctgcgacctgccccagcctgggagggggccagcgggcccgccctctgttcgggtggcgggaatgggtcggcgctgcgagaggcggagccgagaaggggcggcccggcggcgccgggataaaagcgcagcgtgcgggtggcctggatcccgcgcagtggcccggcgatgtcgctcgtgctgctaagcctggccgcgctgtgcaggagcgccgtaccccgagagccggtaagcccccgccagcacctcttccctcatctcccggccctcgagcccagatcctgacgtcgtctgatccgccagtccaggctgccccgaaggcgtgcgcggactgccrgctcraggggcatgcctgcaccctcagggcagccccggacatcggcgtcaggttgcttgagtcaggggcgtgggaatcagacagacccggtctcagatgccaccctgtactgttggttctgtcatttatgctcaccaagttccaagtcccgaacggtaaaacgaagggcagtaccgaacccaccagggtctcttaaggtataacgacatggcctgcaattagcggcgaagggcctggcacgtagttattgttacttggggtctgctcacctgttggggcacaagaactgtttctccattagtaccccctccctttttggccatattgattgccatgttcactcgtgaaggcagttgcctttcttccccagtaccctgaatgatcgagggaatcttctgggtcactgaagagaaaatagctcatcccccaaataacctttgaaatgataccgctgccctcttagaatagcatatagcatcaagctccgtagtcacctgctggtggacaaaccccattcactgtttcctgatgtcttcagctcctatccttcccctctgtgtcagttcagaagccctcttggctctttgcactaaagggaagaattcatcccttttgctgtagttgctgcaaggccaacaatttgagcttggtagcatttagggttgttgcttggcctctcaccggccatttgataagaactcagctcctggtatgatggctcatttgttaaaaaaaaaaaaaaaagtcaagtctggccgggctcggtggctcacgcctgtaatcccagcactttgggaggctgaggcggccggattgcctgaggtcaggagtttgggaacagcctggctaacatggtgaaaccccgtctctactaaaaatacaaaaagtagccgggcatggtggcaggcgcctgtaatcccagctactccggaggctgaggcaggagaatcacttgaacccgggagccagaggttgcagtgagccgagatctgcgccactgtactccagcctgggtgacaaagtgagactctgtctcagaaaaaggaaaaaaaaatctgatgatatcccttagagttcattttttaaaagacaaataaatgattgacaattttgcccaaactcaaatcattcaaaccatcaaaaggagatcttagaaggtgtttggaaatgtggatgctcagcagcatattccagagctgctggacgtatcacattgagtcttgtcatttgagcttgctgctgcctaaagccccaatattttaggttcagtattttattccagaaccaaagcacaaattattttttcttatgaaaaaacacgagcagctaacttcaaacgatttagtaccagcctttcttgaacactaataattgcttatggtttcgtgaattgctcagtgagtccttttgtgttagaaggggaacattttaaagaacctgaggaaagtaccatggactgcattcagagctttcttttgtttatctccttagcatagctactccttaacctggggtagcccagtaaatactctaggccgtcctaaaaacctagagttaaacattagagtgtgaaggggcctcacatcggtcccaagtcatcccctgcttgcagcagggaaggatgacatccagagacagatggagacccacctgtggtcttcaagtgaggttatgcactggcttgaggatcaggtatactgatggctaatccatggtccgtcatagcctacagtgggacagcttagttcccccctaagctgtgaagcagaaccagttcatcttttctttgaaagtttgtcacttgtatatgcatttaaggggaaaatggtgttctgcctaatttggcaaaggaaagcttgtggtttgccggcttcarcrtgacgcttggtttttttctctcccacagaccgttcaatgtggctctgaaactggtaggtgcattagagaatgggtatttggggctttacattgaaagcacagttggacttttaggaagcctaatataggcaayaggtcatcgaagaccagacacagggtgacccattgctttattggctgatgcagatgaagtctctgtctgctcgaagcagaactctggggctctgtgggaatgaggccstgtttcagacaggctagcctcttggccagtcaagatgggacttgccatacaaggtggaaagtgatgcctgccactctgcagagggagatcaaggccgtggaaggaaggtcacttagagttgggaccgagaagcaaatgtttcataggagagcgggtgtttgagatggtggcatttgaagaatgggtaggcttctgcccaaaaaatgtgggtaggaagagtgagctggaggagagatggcaccagcaaaggttaggaggtgggaaagtgggggctgtgtgggccagctggctggaatccagggccgaagcctgaggaaggcaggcctgactctaataaacatgtcaaatacactaaatatatacatgtgtacatacacaggyacctggagtggtcccacgtgctctgtaggtgaaagccaggaggttgagagtacttctgttagatcaaaattatctgggctataaatcagccagcgctaagaaacatttggccttagcaggaagaactgaggaattgggtcaggcgtggtggcttatacctataatccaagcactttgggaggctgaggtgggaggatcatttgaggccaggagtttgagatcatcttaggcaacagagtgagaccccatctctacaaaaaacawtttttttaattaaaaaaaaaaagaagtgaggaattgtgaatgggggaaggtttggtgtgagtcactgagaggagatggcatggcatcagactgggctgsgaaagacagtgtcatggaagtcttgctttttcccagggccatctccagagtggatgctacaacatgatctaatcccsggagacttgagggacctccgagtagaacctgttacaactagtgttgcaacaggggactattcaattttgatgaatgtaagctgggtactccgggcagatggtaagtttgcatccatcagagataaggcccaaagtgtctactaaatcagaaatgtgcagactatatgaaccattaattccccttctaygcataaccaacagaaatacatgcatacacgcaccaaaagccacatactagggtgatcgcagtagcactacttacaacaggcaacattagaaagcactcaaatgcccaacagtagaaaggaatcaccagataaattccgtcacagcaacaagaatgaatgatctgtaactacgtacaacaatatggatgaatgtcacaaacataaggcagattcaaaagagtttgtacatttatatctgtgtgcatgcctgcaggcatacatgccatatgatcccatttacagaaagtgccaagcaaacaaaaccaatstagtgtttagaagtcaggatagtagccaggagcggtggctaacgcctgtaatcccagcactttgggaggccgaggtgggtggatcacttgaggccaggagttcgagaccagcctggccaacatggcaaaaccccatctctactaagaatacaaaaattagccagatgtggtgttgcacacctgtaatcccagctactcgggaggctgaggcacgagaatcgcttgaacccaggaggcggagcttgcagtgagctgtgatcgcaccactgcactccagcagcctgggcaacagagtgaaactccgtctcaaaaaaaaaaaaaaaagcaaaagaccaggcgtggtggckcatgcctgtaatcccagcactttgggaggccaaggcgggtagattacttgaggtcaggagttcaagaccagcctggccaacatggtgaaactccatctctcctaaaaatacaaaaaattagccaggcatggtggcacatgcctgtaatcccagctacttgggaggctgaggcaggagaataacttgaacccaggaggtggaggttgcagtgagttgagactgtgccattgcactcctgcctgggtgacagagagactgtctcaaaataaaataaaataaaataaaataaaagtcagggtagtggttcctgctggggtaggaataactgtaaggaagtatgaggagcacacctgagggagtttcttaacctgcatactggttgcatgagtgtcccgatgcatcaagtggtacacttatgtgtgtacttttctgtgtatgtacttcatggaagaagataaggtaaggcgagagatgattttccccaccccacttcagtttagggaaagcactggcttagatagattacttttccacttcccagatgacgtcacgaagcttttggcatttccccaagattgtgctgcaaggcaccatatgagttctttcastgagctactcctgggatcctaatgcccatccttttggtttccatctgctaaattcagatcggaaaaaagtctacctggtcaagaatccatgagtgccaggcacagagagaggagtcacctacagtctccacccaggaggattcagaggggtaggggaggcagacacaggcacaatgtcaggggagtcccagaagggagctgtgcttcatctgagtgggatagggcgagaggagctggaaagggtctctggtgaggttgctttaggtgagatgtggccataagggtttgggcccttacctggcacagagtgagctctttgtcagctgtggttatgggctgtggtgcatgagtgagttgggctttaaaagagtgaaacttgaagaggtagataatgggaggaaaggaccttcagggagaagaatcagcatggataaaggtgcaatcggaacaggtgtggtttggtgatgacagtcttggagggtctytgtgggtctccctgaggccagcctcttcctcttaaaagagacccagaatagtgcagagctatagccacctttgcaggcatcctatgaaattcaagctgacctatgaggaggagggagcttgggctttggaatckgaattcrtatctgctacttgctgatgagttttctaagtttaagcagagctccctgaaacttcctaagcctcacgaaccccatctgtaaactggagacagtggtgcctacctttcagtactattgtgaatatgaaccgagacataaaataaagcatgctagtaaagcatctagcatcaagtcagccacacagcaagtgctaaataaaccaatgtcctcttgcctatctcggcagccagcatccgcttgttgaaggccaccaagatttgtgtgacgggcaaaagcaacttccagtcctacagctgtgtgaggtgcaattacacagaggccttccagactcagaccagaccctctggtggtaaagtaagcacttttttrttttttgttttgttttttgagatagcatcttgttctgtcacccaggctggagtgcagtggtgcgatcatggctcactgcgacctcaatcttctgggctcaagcgatcrttctacttcagcctcccaagcagctgggactacaggcatgagccaccagacctggctaatttttgyagtttttgtagaggggggtttcaccgtgttgctggtcttgaattccagtgctcaagcgatctgcctgcctcagcttcccaaagtgctgggattacaggtatgagccactgtatccgggcatagacacttttatgtatttggctaattgttgctgaaagctatgccctttgtttggggagcatggatgatgtgctgctcacacgggctggtaaatagctatgactcagagcttagagcaagatcccttggttcaaatcccattttcggctacttctctgttttgtgcctttygtaagtcagcatctctrggcctcagtttttccctaccagccaatggaagagaattggacttaaattatatcctggctttaaaactttatacttctctgattctgtaaattgtttagtgcccattccctaagtagacattggttggagacctaagttttcacagagtgagtaatgaaatacaaactaaaagggcaacacactaaggtatactgtttctgtactgcagtgttttgggaattgagagttccttgctttgcctttcagtggacattttcctayatcggcttccctgtagagctgaacacagtctatttcattggggcccataatattcctaatgcaaatatgaatgaagatggcccttccatgtctgtgaatttcacctcaccmggtaaacttcctcatttgtttattattctttgtcttgctgggatgcctgctttgcgatatgcacagagagagcccagggaaccctggataaggcttttggccttgctaaatctcagttcccttatctaaagcatggacacagtagtaaccatactttacccacagagcagagagaataaagtcaggtaaaatgtaggaaaaagtctgttcctgtatgccaggcactgtgctgaatacttgatatgcatcatctcacttaagcatctcagcaaccccaaggttgggatagctgcattttacagatgaagaaactgagaggttaagtcactttccctgggttatacacacataaaagtgaagctgacattcacactttggtccttctagagcaatgcacctgagccactctttatatcactgatgcaaaatgtttgttcgttcctatctcagctttctagagtgggctgcatatggctgggcctctgagaatctacagactccagttggcttgtccccaagctgtccatgagaggcagggtggtcctgagttggatgctgggcccttgccccagctttgtgacacaggaccagttctctggtaccacagctgcaatgtcacacacagggctgtgatgaggatgagacaggatggtgtgtgtgaagggtctatctgagccgagtcacccatcccataccaccatcctgtcatctgtcacaggcaaggcatcaaagccaaacggtaatttccaattcactgctggtcttggagattgtggtccagggtgtttttggtgctgcaccatttactacacgtggtttccaactttcttgatgagagcaaacctcattttgttttcaaataagcttttttattttggaattcttttattttattatttatttatttatttattttttagacggggttttgctcttgttgccctggctggagtgcagtggcaccatctcagctcactgcaacctccgcctcttggatttaagtgattctcctgcctcagcctcccaagaagctaggattacagtcatgagccaccacacccagctaatttttgtatttttagtagagacggggtttcactatgatggctaggctagtctcaaactcctaacctcgggtgatctgcctaccttggcctcccaaagtgctgggattacaggagtgagccaccgyacccagccttattttggaataattttagatttacagaaaagttgcaaagatagtacagtttccatatacctctcacccagcttctcctattaacgtcttgtattaccatgatacatttgtcaaaactaagaaaccaacattagtacgtgtctgttaactaaactccagactttatttggacttcacctgctttttcatgaatgtcctctttctgttccagttgcatttagtccctgtgtgtctctcctctggtctgtaacagtttcttagtctttgtttttcagaacgttgacagtcttgagttctgaccaggcatcctgtagaatgtcccccagtgtgggtttgtctgatgtttgtctcatgattagacagggaattcataccacagaggtgccgggcccttcttatcccatcaggggtccatggcacccacatgacaccaggctgggggtcaccatcaacactagattaatgtggggactgccagacttctccatgtaaatctactgtttttcccaactctcgtttttggaaacaagtcactaattctaccccaccctggggtgaggataggggagtgttaggcttcatgtccttgaaggggcagcatctacagatattaccaaatgtccttttcaaatgatggatggttttcgagtcctctcttagggatcaaagatactgttttgataaaggctgtatttaaattagactctggttatcacgtaatgggcagatgttctctgtttagcagtaaaatgttagagccccayaaaaaattagccgggcgtggtggcgggcgcctgtagtcccagctactcaggagcctgaggcaggagaatggcgtgaacctgggtggcagagctagcagtgagctgagattgcgccactgcactccagcctaggcgacagagcaagactccggctcaaaaaaaaaaaaaaaaaaaaaaaaattagagccccatttgaatttgccatcttacatctggaatgttttggcaatttgttacaggtgtggtatgcgtatgtgtgtgtgcacttggcaaagggggtggggcagagatacctttttctaaaatgtaaaaactttcattcamatttccaggctgcctagaccacataatgaaatataaaaaaaagtgtgtcaaggccrgtaagtaaatacggcatttgcttttattatttgaagaaacttgtaacttgaggcagcatagctctcttcayctttgcacagaagaactgagccctaggggagagttgaatatccaagcacccccgatggtggtggcagaagcacctatggctcctgatctccagccagtactttgcccactgagtgcagcagcctgtccagaaaggggtagaccctcagtacatttatatagtggagcaacagtcacaaagaaccacccccatccacttggttaacaacattttagcccaaatggctcagcagtgccaatcaaaggctcttcctgattgatgggagtcctacgagcccttccacctgctcagatgctagcaccacccacctgtggccatggggatcctaagaaccttctgtttggattagcaaacattcgaggtgggagtgtgagttcgctaaaggactggcccacaattacgctctcaayttgtgtcctcaaagaggatcacttttcacaggctagtgaattttaccccttgaattttgtagtaatcccctttaggattattagtccctagtgcccagtttccaagggtttgtgtaaatttctgagtaatayagtgttggaatgctaatgaggctagtggtatttggatcagcccagaactcttaggcacccttcactgcacaaggcatccctggtaccctttcagacagccgtccatgctgtccttgctagaaggcagatttggacgctgagcttcccaccaagggtacagagaacactgcaggtgtgaggaggtcagagggccttgaagtcagtcctgaacctgaactcctaaagacagttctgagccagggcctcaaatggtctcctcggtggagaagataatttctgctgttatacattgttgttcctggaaatcagtccagtccttatttgcaagtcacatgaatgaaacgactgactttttctgccagagcagacctatcagggtatatcctctaagctacgagccatttccttctttctttgcatctagtgaagctggcagaatggtctgatggatgaagctcctggaacacaaaatattctagtggttgtagtcctgattgtgagttcacttgctctataatcttagacatgttttccaacctgtagctctttctccccatcctgggaagtagaaaatactgaccctatcccttaactcaaaagagaggttgaaaacagcagtgagtagcagaaccaatccgtgcctcccaccatactcagcccagggaagctgtttttagcaaagcagcgatgtacggatccccaaactgtcttgggcagcaagtactttgagactttggaaacaatgataaaaagttcactatgtagcagygtccctatctcttggacattgttcctgagaacttggrtttgtttccataaagccctgtggggaacttaaatgagggaagagttagcaagttcatctacatggttctctctcaactcacaggaagcctgtgggatccgaacatcactgcttgtaagaagaatgaggagacagtagaagtgaacttcacaaccactcccctgggaaacagatacatggytcttatccaacacagcactatcatcgggttttctcaggtgtttgaggtactttttctcttcgtccccttcacctcgtcctccagctttccttagtgtgttgaaggaaaatggggacagtgttgtccaaasgtgctgggctactttgatgaattcarcagataaaaacaagtccctgtgggcatcctgagaggtgtcactgtgaacctcaaaccatagaaagaaggaagtctccgaagcaggaaatgagcccttctttacacatggtctagtgaaaggagtccttttgggaagcaaagctgctttgctggaagcctcgaaatctgctcactcctgtgcctcataatttttggggggyggaggttgacacagggtctcactctgtcatccaggctggaatgcastggcacaatcacagcttagtgcagcctccacctcccgggctcaagtgatcctcccacctcagcctccccagatagctgggattacaggcatgtgccaccatgccgagctaattttttcatctttagtagagacggtttcgccatgttgcccaggctggtctcaaaatactgggctcaagccatctgcctgccttggcctcccaaagtgttgggattacaggggtkagccagtgcacctsgcacctcataattcttgactctctctctcttaagccacaccagaagaaacaaacgcragcttcrgtggtgattccagtractggggatagtgaaggtgctacggtgcaggtaaagttcagtgagctgctctggggagggaagggacatagaagactgttccatcattcattgcttttaaggatgagttctctcttgtcaaatgcacttctgccagcagacaccagttaagtggcgttcatgggggctctttcgctgcagcctccaccgtgctgaggtcaggaggccgacgtggcagttgtggtcccttttgcttgtattaatggctgctgaccttccaaagcactttttattttcattttctgtcacagacactcagggatagcagtaccattttacttccgcaagcctttaactgcaagatgaagctgcawagggtttgaaatgggaaggtttgagttccaggcagcgtatgaactctggagaggggctgccagtcctctctgggccgcagcggacccagctggaacacaggaagttggagcagtaggtgctccttcacctctcagtatgtctctttcaactctagtttttgaggtggggacacaggaggtccagtgggacacagccactccccaaagagtaaggagcttccatgcttcattccctggcataaaaagtgctcaaacacaccagagggggcaggcaccagccagggtatgatggctactacccttttctggagaaccatagacttcccttactacagggacttgcatgtcctaaagcactggctgaaggaagccaagaggatcactgctgctccttttttctagaggaaatgtttgtctacgtggtaagatatgacctagcccttttaggtaagcgaactggtatgttagtaacgtgtacaaagtttaggttcagaccccgggagtcttgggcacgtgggtctcgggtcactggttttgactttagggctttgttacagatgtgygaccaaggggaaaatgtgcatgacaacactagaggtakgggcgaagccagaaagaagggaagttttggctgaagtaggagtcttggtgagattttgctctgatgcatggtgtgaacwttctgagcctcttgtttttcctcagctgactccatattttcctacttgtggcagcgactgcatccgacataaaggaacagttgtgctctgcccacaaacaggcgtccctytccctctggataacagtaagtgcccagtaacttcaaccagatgatcaaagtggctcacacacagtcactgccycccactcagtatgtggaagggttgtgtgtatrtgggcagtgcaaggggtcgctgcctgtgtacactgaactggggtgcagagaaagccaacagtgctgtcccagagaacctagaatctgagtaagaacaggctttatttgtaaaaccactcgtgactctttacaaagcaggatacacagaagggaaaaaaatacacagtgcaaaatggatgttctgagtgccacaaggatctgctgaaaaaagccaaagatgtaagatggctgggtatatatgagaatgaatatttcactatattctgattcaattaccagtctcagtggcccaggatgagcttttggtgtggtcacatggccaacatttggataacaaatgaggaataatggtaccgcctcactagtgcctgagaacagcatgttctggaaaatgtctctggagttagagatgtgttagctttttcattacagatggagaaatacaatgtttacacaacagtccaggggtggggtcaaaagttggaaggtgtcattagacgcagccaaataaagtgaagacaacccaggtgactggcagccctgacttgtgcgtgggcgaagccttacagattcctgggcactctgtgcctgagcttacctgatgttcttgtgaggcgggtggcactatcctccatgtatgtcagtctaacaagacggcctgtaaaaatgtcatctatatgtgctatgtatgtaagcagttgtacccagaataacattaattccttaaagaaccaaaaaaactggacagaaaccctagttcctactgtgaaaatgccggtgcatatcaggacaaagaagccaaagagattttaggactgttcttaacttcctgggtcccatatcccttttgagaatctaatgcaagacctgcacactctagggaaaaagatatgattggcagactmtctaaagagcttctgactgatggttttaaagggatctaaatctctacaaagtggctgggcgcggtgacacatgcctgtaatcccagctactcaggaggctgaggcagcattgcttgaacccgggagacggaggctgcagtgaaccgagattgcrccactgcactccagcctaggcaacaaagcgagactctgtctcaaaactaaaaaataataaaaaataaataaacctctataaagtataccaagtcttagtttttaaattaagagataagtgtggatttgttttccaaaggtgaataagctttgttttttccagacaaaagcaagccgggaggctggctgcctctcctcctgctgtctctgctggtggccacatgggtgctggtggcagggatctatctaatgtggaggcacggtaagggttataattctttaaagacatcctagtaaggaaataacattttgaatttttttttaaagaagattcctctggaggcaatcacatgttggcgtttcccagagttagatagcatttatgtaataccttcaagtgctcctacagagactgatatgagcatgactggattacacatgccaggtgaaagcagggtcaggacttccagatcttctgactgtcccgtttttatttttaccattgagccttctaccagtactgaaatgggcaaaagatggctgataacaaattacactttacctgtgatggttactctatgctagttcctgttttttaaaaaatagttcttatgaggtgttaagaaaagctttcgcttggattcatacacagttgacccttgaacaacacaggtttggactgcgcagagccacttacacctggattttttcaatacatayattggaaaattttttggagatttgtatcactttgaaaaaacttagatgaaactcggatgaacttttcaattaaaatattgaaaaaaatgaagaaaaaggtatgtcataaatgcagaaaatgtatacagatactagtctactttatcatttcctaccataccaatagttaactattttaactattaaaagttaaaaatttatcaaaacttaaacacacacataccaactgtacatggcaccattcacagttgagasaaacgtgagcataaagatgtggtattaaatcataactgcatacaattaattgcagtgcgtactgtcctgctgtgaataatttcctagccacctcctgttgctactgtggtgagctcaagggttgcaagtatcgacttaaaacaccctgtgatgctaaccatctccaaacgagcagttcctgtctccagtaaattacatatcacagtaaaaagtatctccagtggttctctggtatttttcgtgtttagtgcaatatcgtaaaccttcaataacaccttaggacccatacgaagtgccactagtaatgctggcagtgctcccaagaagcagtgtcatgaaaaaaagcaaaaaaaacttttttttttcattacaagaaaaaaagccaaattgcttgatatgtaccataaattgagggtctgcagctgtgattgttcaccatttcaagataaatgaatccagcgtaaggaccatagtcaaaaaagaaaaaamttcatgaagccatcactacagctacaccagcagacatgaaaaccttgcacattttgcagaataccttttaatcttgtattgaaaatgtagcttttatgtgggtgcaggattgctgtaagaaaggcatatctgtagactctaatatgatttgagaaaaagcaaagtcattatatgacaacttaaagcaaaaggaaggtgaagcatctaaagctggagaatttaatgccagtaaaggatggtttgataatttttaaaagtggtttggcttaaaaactgtcaagataacaggagaagcagcttctgctgaccaagaggcagcaggtgagttcccggatgccattaagaaaatcactgaggagaaaggatacctgcctgaacaggttttcagtgcagatgaaagtgtcctcttctgggaaaaaaaygctacaaaggacattgattagtaaggaagagaagcatgcatcaggatttaaggcaggaagggacaggctaactggactgctttgtacaaatgcaattgggtttatgatcaggactggccttatctataaagctgctaaccccctggccttgaagggaaaagataaacaccagctgccaatcttttggttgtacaataagaaggcctggacactgagaaaacttttctggattggttccactgatgctttgtccctgaagtcagaagtaccttcccaggaagcgactgccttttaaagttcttttgatattggacaatgcccccagccacccagagccccatgagttcaacactaaagtcctcagagtggtctccttgcccccaaacacatcataatttggcctctagattgggaggccataaggaccttcaaggctcattacacacagtactttatggaaaggattgtcaacactatggacgagaacaccaacagagagaacaacatggaagtctggaagaattacatcactgaagatgccatcattgtgacagagcaagccatgaaagccatcaagcctgaaacaataaattcctgcaggagaaaactgtccagatgatgtgcatgacttcacaggatttacaacagagccaatcaaggaaagagattgtagatgtggcaaaaaaggtggggggtgaagggtttcaagatacggatcttggagaaattcaagagctaacagataaccacactagaggaacaaagagaagacaacctgctggagacgagtgcttccccakcagtgtgaggtgatgatgaagacgacacagaagcagcagcatcagaaaacaaatcgacattaaacaatctggcaggtttctgattagtcaagactgcttttcacttcttttgtaacacagacccttctatgatacaagcattaaacctaaagcaagtggtggaggaaggaytggtaccatatacaaatatttttagaaaaatgaaaaagcaaaaaagccagaaattatgatgtctttctgtaaagttacactgaggcgcccacctctcctgcctcctcttccaccgcttctgcctctgccacccctaagtcagcaagactaaccccttcctcctcttcctcgtcagcctactcaacaagatgatgacaagaataaagacctttctgatggtccacttccatttaatgaattagtaaatatmttttctcatgattttaattacatttttttctctagcttactttattataatacagcacataatacacmtaacatgcaaaatatgtgttaattggctgtttatgttattggtaagacttccagtcaacagtaggctattagaagttaagttgtgggaaaatcaaaggttataggagattttcaactgcatgcagggccggtgcccctccccactgtgttgttcaagggtcagctgtactctctaagggctttgctaacttcaaaacatggagtatttgaatacagaaaccagagcatttacatactcagctcaaggcagagctattaaaaaaactcctcttctccatatgtaggaaaggaaatacaaatgcatcctttgagtcatttgtgatgttgtaaataaaatgagattaactccatgttctaagctaagaaagccacaggggcacctggacctcaggaattcttacatttagggatgctgtctgacctgtattcgttacagtagtttcaaacatggtttgttttacagcaccgtatagggcagaattccaggttaagttccaggggctgaaaaggggtgccacttaactttgggaactataaagaaactctaccacctgcaggtagaagacagtacaagcaactacctaattgacccgactcaaaatgtgaagtgcagaggtcaagtgtccctgttcatatacagcactaaaagtactgaggttacaatcacacacctcaaagtatttttttttttttttttttgagacagggtctcactytgttgcccaggctggagtggaatggtgtgatcttggctcactgcaacctctgcctcctgagctcaagtgaacctcccaccttagccgcctgagtagctgggaccacagatgcatgccatcaagcccagctaatatttgtactttttgttgagatggggtttcgccatgttgccctggctggtctggaactcctggactcaagtgatctaccagccttggcctcccaaagtgctgggattcctggtgtaagccaccacacctggccaacaaagtatcttaaacctaaagtttctatgaatttatctgaaaagagaaggcttggttgagaggattgttttagtgagagggacttagaaaatactgcttttaaaataaggtttaaaaagttaaggtttaaggcagggtgcggtggctcacgcctgtaatcccagcactctgggaggcccaggcgggcggaacacgaggtcaggagatcgagaccatcctggctaacagggtgaaaccccgtctctactaaaagtacaaaaattagccaggcgtggtggcgggcgcctgtagtcccagctactcgggaggctgaggcaggagaatggcgtgaacccaggaggcggaggttgtagtcagccgaggtcacgccactgcactccagcctgggcgacagagtgagactrtgtctccaaaaaaaaaaaagttaaggtttaagcatcartgtgtttcaggtgatgtgttcaaaaggaacatcaggatgtttttccttgctgtcactaacaaggcccttggtgctcagctgacattctctagcaagggatcatttgtcagggatggtttacagagtgaaagcctgctgtttgctgttcacagataacaaatgcttttctcctctcacagaaaggatcaagaagacttccttttctaccaccacactactgccccccattaaggttcttgtggtttacccatctgaaatatgtttccatcacacaatttgttacttcactgaatttcttcaaaaccattgcagaagtgaggtcatccttgaaaagtggcagaaaaagaaaatagcagagatgggtccagtgcagtggcttgccacycaaaagaaggcagcagacaaagtcgtcttccttctttccaatgacgtcaacagtgtgtgygatggtacctgtggcaagagcgagggcagtcccagtgagaactctcaagacctcttcccccttgcctttaaccttttctgcagtgatctaagaagccagattcatctgcacaaatacgtggtggtctactttagagagaytgatacaaaagacgattacartgctctcagtgtctgccccaagtaccacctcatgaaggatgccactgctttctgtgcagaacttctccatgtcaagyagcaggtgtcagcaggaaaaagatcacaagcctgccacgatggcygctgctccttgtagcccacccatgagaagcaagagaccttaaaggcttcctatsccaccaattacagggaaaaaacgtgtgatgatcctgaagcttactatgcagcctacaaacagccttagtaattaaaacattttataccaataaaattttcaaatattgctaactaatgtagcattaactaacgattggaaactacatttacaacttcaaagctgttttatacatagaaatcaattacagytttaattgaaaactrtaaccattttgataatgcaayaataaagcatcttcagccaaacatctagtcttccatagaccatgcattgcagtgtacccagaactgtttagctaatattctatgtttaattaatgaatactaactctaagaacccctcactgattcactcaatagcatcttaagtgaaaaaccttctattacatgcaaaaaatcattgtttttaagataacaaaagtagggaataaacaagctgaacccacttttactggaccaaatgatctattatatgtrtaaccacttgtatgatttggtatttgcataagaccttccctctacaaactagattcatatcttgattcttgtacaggtgccttttaacatgaacaacaaaatacccacaaacttgtctacttttgcctaaagttacctattagaggtcactgtcagagttctcagtttcttagttactatttaacttttcatgttcaaaatgaaaataattcttaagttgaaagccctcttgaagtaacctttttataaatgagttattataatggtttacttaaataaaaaacaggggtgggtgcagtggctcatgcctccaatcccagcactttggcaaggccaaggcaaaaggatcgctcaagaccaggctacgtcacaaagcgagacctccatctctacaaaagatttaaaaaattagctgagtgtgatggtgtaagcctgtggtcccagctactagggaggctgagatgggaggatcacttgagccctggaggtcaagggtgcagtaaacggtgattgtgccactgcactccatcctgggtgagagcagaccctgtctaaaacaaacaaacgaaaaaacccccacagaatgacagaacataaaagatgcacattttgtcttccaactttttactcttctaaaagcatcttttttaaattttttaaattttttttttttgagacagagtttcactctgtcacccaggctggagtgcagtggcgtgacctcggctcactacaacctctgccttccgggttcacgccattctcctgcctcagcctcctgagtagctgggactacaggcacccaccaccacacccagctaactttttrtatttttagtagagacggggtttcaccctgttagccaggatggtcttgatctcctgacctcatgatccacccacctcagcctctcaaagtgcagggattacaggtgtgagccacggcgcctggcctaaaagcatctttttctttaatgcagaggttatgttgtattattagcataaatgttttttttctgggaatgcttatttcacacagcacaatactgaatcttctctggaatgtggatcgatttcagatggatgactattaaaatgtgtatatttgcagattatccttaaagggccacctcatgccttctaatttatgtcttacggataaaaaatcaaaatgaagcataaagtaaaaactgtgtccagctttacaagtggacgcttagtaatggctgaggcaatatgtttaatgtagcaaattttacttatttgtcatgatcagttttcacagtgcttgtaagtgctggtaatagaagatggacatggtttaggtcaaaacttggaccagaaaccaacttcctttgaaacagctctaccagttataagagcaatatgctgttaggtgaagaactgtttaacagaaatatattatgtttttgcaaacaggcagctgatccaaaattgtgttgaaacacctcagaaacataaatgacatcaatactctataaattaatgctgttaacaaatttaaaaaataaaacatacaattttcaaattgaaggcacacatcccagttggtactggcaagtttaaattgtttctaatactggtggactcttcatttgtaacctactgagcagttacagagggtactcccattgatacaaaatgctcaggtaccggcatttctccacatccagagttctttctatattcccttctgatttccatcccttatctgttccctgcttttgtccttccccagtctcacccccatctctagccatggtaagtgagatggcggaagcaggtgcctagaagcaagcagcaggaagcagcattttcccactcctcccagagctctgggctcccagactgtgttcctacctctggacaatgctttctcttcctcctgggctcagagggcttcaccagagcctggaccaccagtggtaatagctgcattatttagattttgcttcaggatgctcagaggttaaggttaactgatcatactgaacatcatgaactccaaaagctttcacttaatccttcaggtaaaggaaaattgaggcttgatgactaagttggtagtattaataactacatcagtcaccatatctgtacaacacaaggactcttaaattatacccaaatcatttctatttggctttaggaaaaaaacaagatttccttttcagcatttgttctgttttggccaaataaaaattgttttctttcttcctctaagctcaccctacggcatgtcaggtaacaaaagccagtctgcccagccttccatctttacctttggaaatcgagacctgaatgggtcccattctttttctgtaatccaacagaaaatgaaaaaaaaacaaaaaccaccaaaactttttccccctatttgggattctaagaggacacatgagtcacataagtgcatttaactcagacaactttagatcctaatgaaatactagacaagagagaaaatggcatgagtggacagttctccctcgtcacatactatccctcatggttgcatgaggctgcctgctgatgagattcaagccaacttaaatgaagggcttcaccacatgagaaccttcaatagcaacgtttacatcactggggagtttatgagaccctgagagagggcaagagagtttacaactgaagagaaagttcctatttattctcaaatgccctgactaaactgctcaaaagcagtttatattttcaaaccaatgtcatgtcctcaacataaagttcaaattcatttactgtccatgacacttaagcatccagatcaataaattacaatacacatattctgtaagagtcttttataccaagaagcttgtttttggtcttcggcagtgacatttcctccccattcaccacacaaacgcagcccgctctcgtaacatgcggacaccaaagcgctgccactctcgctgataaatccacagttcctgtgttgtatccaaacaagccaacactgcccctcctttccatgcaatcagccgggggtccatgtcctacagaagggatgaaggcatttcagcctaatcacataagacatatactcaatcatttacttgaatatggggccgagaaaaatccctgctgagtcaatacctagtaagccaggctttcaccctgtattaaagacagcaggattaaatacaggctcacgcctgtaaccccagcactttgggaggccgaggcgggcagatcacgagatcaggagatcaagaccatcctggctaacacggtggaatgccgcctctactaaaaatacaaaaaattagccaggcgtggtggcaggcacctgtagtcccagctactcaggaggctgaggcaggagaatggcgtgaacccgggaggcagaggttgcagtgagccaagatcgcgccactgcactccagcctgggtgacagagtgagactccgtctcaaaaaaagacagtaggacttatgaactacaggcatctttctgtttcaatagccaagaaaacttttaaatttttataactgaagatgctactatttactactattgcacaaataccctatttaccctgtacacaggaacatatataaataaatgacttacttatttcgcagtttgagtggaataaatagatccccacaatccctccctcaggattaaaaagaaataggaacatttccaggaattgtcagtgagatttaataaaacacacaaaatctatttctaaattcctgggtttatctttcttttcaagatagttcaaaccaaaaagatccttaaagatcatctggtccagggagcagaaggagatccttaatataaaaaagagattaaaatggagctgttctggctggcagggcttgagagcagttggtcctccccttgccccacctgatcctttaacaaaggtggaattcagtcatgctagtttggggagcacggcaggggaaagcagcagaaatccagtaccttaggccagagcaccttccaccacatctatggcttgctgaaattaacttttccacttgccctaagccctcaagaactcctcagacacaagcccatgcctcccaggatttgatctgtccacatacaaggctggtttcatttgcatacagtccaacttgcacaatgaaacaacctaccttaggccttgtgatcacatccacattttcaataattcgcctgaaggatggtggcattttgttgagaattctgtgctgcagaaattcttgagctttatgaaacatcaaaccacctcccaccactaggatggagctgtacatcttctttttggtgtcgtcagatgctgaaaagacagttgacatcctccatgcttttttctccacatccataattctaggccaagccaccaacacctcttgcttgagcaagtgcaatagccttctcaaagatttccctccagcccaccctccacactgcagccaggggaaccctacgaaacacaaatgtaggcatgttgccacgccaccgcaatcctacttgcaggattaggatcaaaatctttaaaggaggccgagcatggtggctcacgcctgtaatcccagcactttgggaggccaaggcaggcagatcacgaggtcaggagttcgaaaccagcctggccaacatagtgaaaccctgtctctactaaaaatacaaaaagtagccgggcatggtagcgtgcgcctgtagtcccagctactcgggaggctgaggcaggagaatcacttgaacccaggaggcagaggttgtggtgagccgcaatcacgccattgcactctagcctgggcaatggagtgagactctgaaaaataaataaataaaatctttaaagggacccacaagatccactacgggtggtcgtcccctgcttctctagcctcatcctcacaccctgcttcccagccacacaggtcttcacaggcttcttcctctaccccatctgtgactgctaactgacccctttcatcctttacatctctctcaaggtctgccttcctcaaggaagctttccctgcctcccaccttccataccatcccctagtgagtaaagattctatgtgaaattcctcaaattattacacaaatgtgaaagtaccactggcaggtgctacaaagtttatctaaagggtactgactgcttagtagtggcctgccagtggtaatttcacatttgtgtaataatctgacttattttggcctcttccactaggctataaacccatcctacttcgttaatgtattcccaacacctggcaatgcaagccaagtaggcgcttaatcacttttcaatgaatatgttatactgcacaagtatatcctagactgaaccaatttatttaactgctatcttgtttcactgctatctcccggtctccccagatgtgcttacaacagcagtctatgctatggaggatggctttatccaggcccagggcttttccttcaaacagcgagatggcagtcttcctggacatcagtgcagtgagggcctcctcggaatcgttgccggccatcaggccatctccctgtgcagaccccaaatctacctcctgggaatggagtctttctggaagatcagaggactggccacgaagatccccttcaaatccaataggtttggatgcagactttcggtcagcagtagcttttgcagactttaaatcaaaaggacaatcaagtatgtggtattacaacaacagaacactattgatgttgtctagctagatccctccctaccctactactataaaacaaaagccacacagcaatacaacaactgcccagcacccattcccaggtaacttaggaatgagagacggtgcacagatgaagatgctttgaccattccaaagcaaggtagctgctggtaggcagggtagctctcagaaccttatcatcactggttagattttaaaagtgaaataccagtgcagacagactttcttccccgtgccctgagtttttaaatggagtattccagtgggattcatgggccatgactgttaaggaattcttactttcagatcctatgagtccacctcatgcctgcctctggggaggaacaaagactagaaaatctagtctccatcatgagctggtactgtttcattagcagacaagaccttcaatttgtgcccctgtaccagacatcatattatggggatccactttcaacaaaggaattcagctctttggctatgccacacatctttcacaaaattaagtaacaggtgagattttaatgaaaatactactgaaaaaatattcagaagtagataatgtaagtaaatgatatacaccaaaaggaaagtgtcattaacttttaaatgtatggactagcattcagaaaattaatgtttgctgaatagagaaatatgtcttccagattttaaactcagacttcagttcatctacaattctaaaagctatatcagtgttattatgctggaagatagaactgattacaatggcctattaactctggacaaatttctccttcagggacaaaactctctcttctcctaccagaattgctacggacctgttcttgtttgctctgtgtggccagcaggtaatgttcatcgtgaggatcctcaggatcgccctgagatctgtgctgcaaagtcgtcattttctgtccaacgattccaaaagttgcggggtaaaacaaagccattggagcctgtacatgaagaaaaagagtgatcaacaaaagatactgcatcctgaaaaaaactgatccactaaattctgttcttctaaaaacaaaactggcagatcagattccctaagttagactgggcaatgttctctttcgggagtggcattatttctctggtgcaccataggccagaaaactcactcatcatccaaccagatgggtgatatgacaccatatgagagaaatctcaaagcaaatatcaagtacctcaaaatctacttcataatttcctagtaagaatgatacctttctttctaattaacacctcatcatataggggctaaatagaaagatattcttcagatccattctagt

SEQ ID NO: 96677 - DNA, 52634 bp, Homo sapiens
ctctattttgtccttgaatataatttcttttttttctctagtcagggcctgcccagatacagataatgaaagcacctagatggaagagacttcgtagtttattattttctccaaagacattactactataaactgctttctagtgatgtcatgataaaagggggagagatggaaacagaccttgtttgcacacagtttgatgagtccttaaagaaatatttcctataaagacaaaaaattagggggaacaaacaagttagccagaactctcaggtagaacatcatcctgtccaaaaggctaaactatataactgtttctgctaattactctcttctgagtgattactctctgagtaattagcagaaacagttatatagtttaactttggggatttaaaaagtgataatgtttttattccatcaactttaaattcttcaatatggcactgaaggtctcccaactatcacccaccctcccattggccaaccgaaccaacctaacttttcattattcatttaggttattaaccttttcagagcagaaatccccttttagacactgatgaaagttatggactgtctcacttgaaaaaggcacacgcacataatattttatatatagtttcagcgttcatagatccccctaaacctgagcctgaggtcagggagccctgttctagatagatagatagatctccttctaacccaaaacaaagttcttgatttctttggacatgacagtatctttgcttggatcaacctttcctttccaccagcccacatccttttggtcccttaaaatttagaaggaattctatcatttatctcaacggacgtgttgaaggaccttgccagctgttatctgacagcactttatatctgtctcttgtggtctttggacatgttacttaccaaccttttcatctgtgcctgacttaatttcatcaattaaacagtatgttcctggaaggcaagcactagatccaggcactacgaagcttctcttgctcacctctgcagcctatgcacccagcacaaggtctaacacatagcaaaaacttaatcataccacatttgttgaaatggtgtctgtggtgtttgctttcttttcgaatttccctcagagcctagcataatgttatattaatatcaattgccccaaaaatgcacactataaaaaaatacaattgacttttttctagaaaacttgcaacattttttctatacacatatgtatagatagttagtcaatctttcttttttcctaattataaagtaagatgtgttcaaggtggagaacttagcgattaaaaaaaaaaaacctcatgtatcaaaaaaaaaaaacccactaagaatcccaataccccaaaatataatccctgttattctgaagcaacgggggttttttctgttttttcctatgccctgcatacacatatttacagtttttaaaaagtcaaatagatttacactgtatatacagttcagcagtctgcccttttcatttagaaatgtattgttaacctttccctatattgggtaatattttttcatcacatgattttgtaaaggttgtacagtatttctccttatgaacatatctgattcaaccaactagtctcctattatttgacatttaagtgattcaaattcttcactattataaacaagtaaagaacttctctatataaatatttatattgcttctttgtgatttattcctagaaacagctgtaaaatacaaagagctcctacagtgcgattttttaaatcaaactattacaaaattggggaaagtatatgcctcggcaattcacagaagaaaaaaatctaaatgttcaattaaattacacagtagatacacagtattcaggtaaagaaactgaaaaggaagaaagagagcagaggatatgttggcaagcagtgagctacctaacaccgagaggcaggccaggccagtatttaacagcagatgacaggcctcaaatcacagccccatccttcccagctctctaactttggggaagttactgaactttctcagcttcaatatcccatctgaaaatgaggaccataataatactcacctgatagggcttctgtggggcttataacatggcccacatgaaaacactgtgcatagcatagtatctggaacacaccaagagtgcaacactattacttagtcatacttcttttttccaagcctatctttagaatgttatgctgaacatgttatgatgattaaaatgataacctatgatgatgctatgcttagctctcagaaagaaacctgccatgaaaaataatggttttattaaaaagcagtaaagttgataaccttatatgctatccaacagatccttttgtagtgatggaaatgtcctttgatctgtactgtccaatacggtagccagtggttatatgtgggtgctgactacttgaaatgtggctaatacaactgaggagctagattttattttatttcaccttaattaatttaaacttaaatagacacatgtggttagtggctacgatattaggcattatggttttagaaggcaatacaggaatatctatataatttcaaagcacatacatcctttgtcccattttaggtagtcactccatagcaacagaaataccatgaggtagggaggagtgactaatatattaagactaccaaaaaaaactgctgataatcaaaaagagaacatataattccatttatgcaaaagtacatatggctgtttacatatggacagagagatatggaaggatgctcccaaaatactaatagtattatctctaatagtaggacttttaggtaatttttacataatttgttaacccttttttatagtttgaattttttatgaccatgaattatttacataaccagaaaaagaaaacattaaaatattttcactttgggaaaaaaaaaaagggcattactggatcaaaggataagctcacttttaaggccttttatatctgcctagccaaattgtcctaataaaagggtgttctacgcttttacactgttggtgggactgtaaactagttcaaccattgtggaagacagtgtggcgattcctcaaggatctaaaactagaaatgccatttgacccagccatcccattactgagcatatacccaaaggattataaatcatgctgctataaagacacatgcacaagaatgtttattgaggcactattcacaatagcaaagacttggaactcaacccaaatgtccatcaattatagactggattaagcaaatgtggctcatatacaccatggaatactatgcagccataaaaaaggatgagttcatccttttcatttgtagggacatggatgaagctgttaaccatcattctgagcaaactatcacaaggacagaaaaccaaacaccgcatgttctcactcatagatgggaattgaacaatgagaacacttggacacagggtggggaacatcacacaccggggcctgtcatggggttggggggagaggggagggatagcattaggagatatacctaatgtaaatgacgagttaatgggtgcagcacaccaacatggcacatgtatacatatgtaacaaacctgcacattgtgcacatgtaccctagaacttaaagtataataatttaaaaaaagtaaattaaacttaaaactttcaactttggcttaactagagttaactttatcagcatattaaataaaaactgtaatatacatgttacatacaaaaaaaaagggttttctaaattcagctcctcccaaccaacaaacacctcaaacatgcacacccttattatcaccaagcattaaaattgctttcacttttgccaatttaacaggtaaaaaattgtgtatcattttaatttgaatttcattaatagtgaaattgtgtattcatttatttgctggctactcactcgtcacttcttttagaaatatcatgttcaggtgaggtgtggtaactcacacctgtaatcccagcactttgggaggctgaggtgggacaactgcccgggcccaggagttcaagaccagctcgggcaacacagagagaccctgtctaaaccaaaaaaaaatcttctaaaaataaaaagaaattttaaaaagaaatatattcatagcctttgacctttttcagtattagggtatacatctttccttttacgtcggaaagtacttagattttatataaattatatgctacggttattaaacctgtccttttatatatgtcgcaaatattttccttctttgtatttcctttactttgtatctttttcttttttgagacagggtctggctctgtctcccaggttggagtacagtggcacagacacggctcactgcgacctcaatctcccaaggctcaagcaatccaccttcctcagcctcctgagtagttgggactacaggcacatgccaccatgccctactaatttttaaatttttatttagtagtgacggggtctggctaagttgcccaggctgttcttcaacttttgagatcaagagatcctcttgcttctgccttccaaagttttgggattacaggcatgagccactgcatctggccatgctactttgtatctttttaaacatgtagatgttttcaaagaatttctagacctctctggctttgacattttttgtctcttaattgtattataaacacctagggatgtgattccatagtttacgtcctcctacacaggattaaggaggcagctgcttcttgggttttagcatatacaagtttcttcaaggtcttaaaggaaaaaaagtacttgttaggagggctacatgtcactgggcaacaggaacttttcagcttcattataatcctatagcaccaccgctgtatatgtggtcctataagattataatggagctgaaaagtgctagcgagcttcttaactgggataaaagtttgtttgtaaacgtatgtaaatgtatttacatgtgctagcccagggtcaacctaaaaggtagcgaaagtgtttagcccagaagtctacatagaaactagggttgtctacctccataccaccctgaatgtcccccgatctcggaagctaagcagggtcaggcctggttagtacttggatgggacaatagggctaaggtgagtagatttaatgctccaggataacgacctttaccgacaggtcattgtgtggcacgtggctgtatgtagttattaaaatgtaaatacatatatttacaaacaaactttttttcccagttaagaagctcgctagcacacagcattctgttgaaagccccctttatttcgcagtcctgaagggagtgagggaaggaagtaaaagggcagaggaaataatgaatgaatgcgagacgccgattgtacagggacttgtttccatactgctctctaccagaaacgttctcagtttccttccttctgctggacatgttccaagggccaaaacctcaaataatgtgactttgtagattggagagtgtgtgaccacagaaaggaaagggaggcagcacgtgccagccggcgacagaatgttaagtctgcagcatactccaccgcaatgaaacaaataatttgtgtatttcctccccttccttcgcccagagccactgtgagaatgggctacagaaagtttcgaggcagtaaagccagttgttcacccagaacatctgactgccataaaaattatggtgacgagaaagaacgtttgctcaaatgccggggtcgggttgagggctggagaaaggtcccaccccgcagcatctacctcccgggctcctcaccatgtgcatcgcctcctccatccacttttcggtctcctctgccgacaccgagcacgcgccgcttgcagctggcttgggtgccgccttcgcctccatacccagccaccactcagctacagagcccgcggcagaggaggagcgcgggcagcggaacgcggcgggcccgggaccccgtttccgggggtagtctaatgaaaaggcactcgggagctatttctgaacggacctgggcttgtcggaccagtgagcggcggcggctgcgcggcggcagcggcagaaagcgtagctgctttgctgtagtccacgcccccttgccgctccggtgacagtctctgcggaaagtcacgtttgtgatttcgggagagcacagaacgggacgacggcgctcttgctgggtcatctgggccaggtgacgaagaaacagtttcctggtgaagcagtccctcacccctagtcagcccacacccctagggcctaaagatgctgaggtctgtatggaattttctgaaacgccacaaaaagaaatgcatcttcctgggcacggtccttggaggtgggtgacaacgtgcttgaaagggggcattgggagaagggggtgggagaggtgacttyttctaaaataaggacaggccgggcgatcctagtctgggatatgtagagggagttcgatcaaccatgggatgaaaagggaggtggccaacctccagggttctcccatctctgcagttgagaaatgcctctgtgccctttgccctgtcaccgactcttaactctgtttctcacctatccttttttctcacggacctttggagaactcatcacagtttaagtttctgtttcaaggcaccattctcttacaggaactttttaaaaaaaattctgctttcctgtgagattctgcatttctccttggcactcttgatactttggctctcacccttctcaggagtttaataataatctagggaagttacctataggctgcacttcgggtggtggttaaagtcgatttgaatttttgaaaacagcgcagttgtcctaaaggactgaaagatatggattagataaagaaaaacaaatcaatattttagctctgtttctgccattttagaatacaaactatggcagtaagaaaaatgcttgagggatgttgtgcaatcttcctcaggatcttcaaggttgggatcattgtaatctagctgacataactgagttgcacaggcccagaggagatttagaaacagataagataaaaatcttgagacgcttttccctcatacaatgctcatgtgataatattcagggatttgaaggagggaataaaagttttgtgaattatatgaaaaggacatctaggaactataaaagaggaaatttgttagaacttgagtttttgagaaatagtctcatcacttattacatgctatgtttacaaaagtacttaaaatcaagaacagagtttcccaaagaatttggttggcttttctcttagtattagattgtattctgttctccccaaacaatttgaaattaacagtacgtattagattgtattctgttctccccaaacaatttgcaattaatacctttagcatcaatagttcagattttggtgatgcttgaaagtttgaaacagagttcttgttgctgagccaaggatggtgttttgcatgtctctgaggtctatcacacatcaataataagcatatgtaaattttgaacaccttcgagaaatcctttatatataaaaggtattttctgatatcttcagtcgctagtatctaatgtatatttaaattatcctaagactacagagtccattttatttataaaagctaaaaatatatgtgtgattgaagaaatacaaataaagtatttttgcgtttactgaaggaaggaaaattatctctttagcgatctcagaaggaatactccttcagcttatggaacaactttgtagtagattagaaataatcacaggggaagcaaaagagtatacttaaacttataatttttttaaaaaactaacaagagctttatagttacagaataagaggaatgcaaaaaatagaaaagttcagacggccagaaagagaaaataatcctagtgttttatatcaaaaaaggagtcagtctgaaaagaaaggaagagtagatgaccgtggttggcatttgtttgagtctcatgttctttctgcttcagggagaaagttctacagtgtgttagattttaattagtctaacttaagaaatacctatcaagtgcctgtaatgctgaaggtaatataaatggaaatacaagatttatatatttttaatagtaacagctactatttattgggtgcccactttacgctgggcattgtgctaagctcttcctatttaagcagaatgacaagaagacaattattattatccccattcaaaaatgtggcagcaagaaccctaagaatttaagaaacttgcctcaggtctcagaattagtgaaggggaactggaattcaaacccaggtgtgttggaccacaaagcacattctatttccatattatatcactgtgctttcatggcctttatagtctgataggaaggaaaagcaagtatacatgtaattaagatacagaaaaacaagagaggtgaaaaaatgctgtacagatcacactggcaagtagcatatgcagttgtgaaaaatcaggaagaatttcatggaagaagagacacattttgacaggcttgaaagctgggtagtatatcaacaggcatgcgcagagaagtttgggcattcaatagtgggggaagtaagtaagtaaaaccttgagtagcaggccttcttaagtaacaatttctgtttcctcagattttgggtgggtaactaattggtttacgcgtttgtataatttgaccagtttggggggtttgggtgtgttcgggttttgtgtttttttgtttttttgtttttcagacaggatcttgctctgttacccacgctagaatacaatggtgtgatcgtagctcactgcagccttgttttctcctttgctagctttacaatgtaaggcaagtagaaaggcttccttatgaagatttgcctgacatcttcacactttcctcactcatgcgatcctctcacctcagcctcccaagtagctaggaccacaggtgtgcaccatcatgcttggctaatttttaattattttgtagagacaggggtctcactacattgctcagactggtcttgaactcctggcctcaagcaatcrtcctgcctcagcctcctaaagtgctggaattacaggcatgagccactgagcctggcataatttgaccagtttgtgaaaagactagagaattgactcccaaactttttgatctaaggtctcctttacactctgaaaaattaaggaccctcaaaagctttctaaattttatatctattaatagttatgatattcaaaattaaaatgaaattttttaaaatattaattcattttaaaataataaacctattacatattaacatacataacattttcaaaaaattaatgagtgtcrttgttttacattttgcaaatctttttaatgtttggcttaattgaagaaagctggattctcatctctttctatattctgtcagttgtggtatcacacatcatgtaacctctcaattactccactgtatacgcatgagagaatgagaatgaaaaaggcaaataacattttagtattattacgaaaacagttttgattttatagactccctgaaatggtcttaaagaccccaggggtgcccatgccacactttgagaaccattgcactggaaaaagttttggagaacagagagcaaccagattgatatttattgacttactggtttctgaaaacctcagaacattgacttggatttataccttaaatcctgtaatctctggcttcacattttttattcattcattcattcattctgtcattgaacaaacatttgaatgagagtaagtgactgatctcactgtactttactctggaaatacaaaggaataagacagatcctgactttgaactcatggtacagaaatggaaataaaagtagtatgatagtatagtacaaaaatagagcagggtgttgtgggagcattgatgagaagaaagtgtgaagatgtcaggcaaagctccataaggaagaatttctgcttaagttgtagagctagcaaaggagaaaggacacagaaggaaaaagagcaattcaagaggttcagcaacattgctttttatgaatgaaactgtatttcactatggctatgcaaatgagaagtggcaaaagattaacttggaaaagtagctagagtacagattgtgaagggccttatgaagccattctacataatttggacattatcctttgtattggtgcttgctagagtttactatggataaaaaaatcacttagggagcttaataaaacataggatcctttattccagattctgattctttaggtttagagtgcagttcaagaattccttaattcagcaaatatttattgcgttctgagtcccagtcagagtttatgtactggggatgcagcatcatgcaagataagacatttgggggtattttcttttcttttcttttcttttcttttcttttgagacggagtcttgctctgtcgcccaggctcgagtgcagtggctcgatctcggctcacggcaagctccgcctcctgggttcacgccattctcctgcctcagcctcttgagtagctgggactgcaggcgcccgccaccacgcccggctaatttttttttttttttttttttttttttttgtatttttagtagagacggggtttcaccatgttagctaggatggtctcgatttcctgacctcgtgatccgcccacctcggcctcccaaagtgctgggattacaggcatgagccaccgcgccctgcccatttaggggtattttcaaggagtgtctttaaaggctacatttttaattgtcccaagtgattctaatgtaagtggaacagggaaaccacattaagaaatgatggcaagatgttgaaggattctaaaaacatgagtgatatgagatttatgttttagaaaatcactttgcatatataagataggttaaacaggtgtgtgaccagaaastgaagagttagggacctattgaaccagttcaagagcattaatttttagagtctaagtggtgacagtgataaagaagttgtagataattggcaagatttagaaaatgtgtctgaaatagaatcagaatactgtagtaggattttgtgatctgttggattgggaacaataggttattttcaaactttttttgaaattattaaccttgtgaaatagttgcattgtagggattttcatccagaaagagaagactaagagatggttttaaaacaactgaattgtggaaagactagaagtcttattttctagtaatgttattaatggaaaactcaaagcatttgacatttattttttaaggtatttagtaaatattttcattgttaatacataaagtcatagctacaaaagaaacattaaagctcatataatcccagtctttcatattgwggatgaagaaatttagacacagagggaggaagggactttctcaaaagtcacataactacttgataccagagccrtcaatatctcctgttttccaggctaggctgccagtcgagtatatagatagtcatgagctccatgttttagctaatgaattacctgtcctcattcttatttttctaagggaacaaatctgacaaaatcagaatttatgagcctggatgaattagaccttgtataagaacttagttcagtgctaaaatcaagaaaaataatggattgtgtgattttagcctgatttccaagtaccacaaaatgggcggcttaagcagcagaaatgtattatcttacaatcctgaaatttagaagtctaagatcaggattggttccttctgcagagtgtaagggaaagatctattccaaccctctcaccatggctcatagataggcatctcctctgtttttgctttgtcttccctctgcaattgtcgatgtccaagtttccttttataaggacaagtcttattgaattaggacccaccctaatgacctcattttaacttgattaccactgtaaagattctatttccaaataaggtcacattctgaggtgttggggctcccatggcaattcattttcttttttagtttagttagaatatcaaagtgtggctaactaactactctgtaatgttcacattctsatttcacgttcaggaaaatttcgcactcaggaaaactgacttcccctcagatatagaccaaatgtacacacttatatcatactgcctatgctgaaatgtgttaaatagcagttcctaaaaaaaatcatcagatttgttgagactctgattaaagcagtggaccttctccccagagaaacacaccaatcaaatttactattgttaaagaaaaaaattcttagctgtgcaaaaagtgtcatcttagtgttgattttacagtataatttgagaaataatcattttacatgtaactttcagtaagctgttgtgcaaataagatacaaacaattccttcagatctattatgtcagaattgcctgtcatagagtaactttgtgaaatgtaagtcagtttcctttgttggtattgtagcactatcatcagtttctttagaatggagtacaggaaaggtagccatgtagccacttatatgaactctcatttcttctttaagcttggttataatacattaattgcatataaacatagcaacagcaatcatactgtagttctaattgtttttagcacatacccttttactgaactactatttttaagaatatgtaatatcttatcagttcacctatagcacctgtattagtgaaaataattcaggatatgtatttgttttgcagttgctagagggctacccactttctacctgtgacagaccaaatctaattacttaggtcatgcacaattcttaggttatgtttagtagatactgggggtcacagacagtgggaggtaggtgagcattagttaattccttacagccttgctctcaggttataatgaaaccaagttctggcacacttaaaaacatctactggcaaacagagattaaaagtaacacaacctgttctgtaagcttattgaagtcccagtgttctgcccttgtttcatgctacygcagaactgcttataaaagatttacctgaagaaaatgcaacaatattctagctgtaggattyggttggctacctggttaactcagttgactaagaatcctttgaactagcggctaaggatcccaggcaaaggtgaaggacttgcttgatttgtatattctagttcatatgaatattactaaaatgttttagctmgtccagtatcttgaaaaccattaatctatgaaaatccattcctgataatcattatgctaatcaaaaatatttggtgctaaatcagtgataaaagctagttgaagagcttaagctttggaatgtggcttttgatcaagtgtggctaactaaccactctggaatgttcacattcccagctaggaaaactgactgcccctcagatatagactaaaatgtacacatatatatcatactgcctatgctgaaatctgttaaatcacaggccacatgacaccacctatattcttatcctgtggtgttagaatttaggagtttctgtaccctcttccctcttttttttccagttaagttactaatttttagatgagagagttgtattttctctccttatctcaaagagatttttctaacacatggatggataaatagacttctgcctgactaactacctttctttcattgttccttttaaaatttttatcttatakttttaaaaagcattttgtgttcattgaagaaaatatagaggacaaaatgacctgttatcccaccattcagcaatgatcattgtttgttatattttagaaattaaaactcacctattttttgtatctgtttccattaaaaaaagtaacatttctgggatcttattttatcacctaacagtataacatggatatttccttgagtcattatttagcaatgtggtttttaataactacataagatttcrttgtatggctagactatcatttatttaaacaattctccattgctggacatgtagaatatctctagtctactagtaaaggcactgccagactttttagatttaattcctttcccttcctcaaacctggtccttatgtgcccatcatttcctctgtcattggctgtaaaaatgctaatttccttttctttgggccaatcttacaaaattctttatttaggttttaaaaatgtaattttagctatccactaatataaaacttataattgcataaagtaggttaaaaatactgtgtagaatttttggtactctaatgaatatagtacttttttaatgattgtaggagtatatattctggggaaatatggacagaagaaaatcagagaaatacaggaaagggaggctgcagaatacattgcccaagcacgacgacaatatcattttgaaagtaaccagaggacttgcaatatgacaggtaagacagagaaatatttatacatgtgtaaagttgtttgayggttgtattaatttgcatatcaccgggatcaaatttagaggaaaaggcaaagaaaagatggtaaatctagcaagtgtttgaatgatttaactgaattacatcattttaatgtgaattttaaaaatcagttcattcattttatttattcatttagcaaatacttgtatccaggcctggggaagcaggaagtgaacaacaacaacaaaaagcccctgacctttggagtttatattctagggagaggaaaagatgataaacaacaaataagtaactttaggcagtgatggctgccatatggaacataaagccatgtgagggctggaacgttctttaagacaggggatcagtagagtcaggtttctttgaggtaacatttgagcagaaaccaaatgttacaatggagggagccatgtgaaatgcctgaggcgggaacaagcttggtactctcaggacacagcaaaaaggccatgtagctagagcagaatgaacaatggcagtgataggaaacaaggctgcagaagtaggcttgatcccatcgggcctgtgggccataggaaagagtcattaagtttattaaatttacagtaggcaactatagacctgtgagtcgtccacaatagtatacactcaggcaatgttaattaatggcaataatttaacctccagagctagaaacatagtcctgggagaatgccatcacaaaatcaacctgcccatatttgaagagaacagtgtgtcctaactggcataaytgaagaattagttctcaaatccatgcaaagcctgtttttcttttctattgtttaaagcttactcatttctctaacattctttcaagaacaattaatttagaaacaatttataaaggtacattctccttatttaattttaaaattagaaattttttagagttaaaggcctttattattagtttacttacctcattttacttgaggctgagattaagaagggtaagaggcacatccaaaattacaattggagtatgatttttaatatttgaagtagtaatactcagaaaaataccttcattctgcaaagcgaatagtaatcataaatactatacataatgacaattctgagagtaaaatgaacattataaaagccacttcataaatgttttgtgaggccgtgatgagataatgcctatacagtgcttgatgtatgataaatacttggtaaatgataactttttaaatttacatttagcattcaatatattgscactgcctaggacattttaatgaatttttagggaatggtccatttctgcttattatttgaattttcaaaaaataataaaatgggccaggcatggtggctcacgcctgtaatcccagcactttgggaggccgaggctggtggatcacctgaggttaggaatttgagaccagcctgaccaacgtggagaaaccccatctccactaaaaatacaaaattagccgggcgtggtgttgcatgcctgtaatcccaactacttgggaggctgaggcaggagaatcacttgaacctgttaggtggaggttgcggtgagctgacatcacaccattgcactccagcctgggcaacaagagtgaaactctgtctcaaaaaaaaaaaaaaaaaaaagtaaaatgtagctgctggggtcttaaaatacatcgcagtttgacatggacccttgtgtcagtttgggtcccctgggaagcagatgctaggatgggattagatgtacaagagatctactagtagaaatgcctgtaaaggataaaggggaaggkaggcagaagaaggcaagcgaagcatttaggccacagtgcaggtctgacatttgtgaagggaaaaagacaaggaaggaagaaagattaggcaagaagagtctcagactacagcacagttctaagaaagcattgggagaccatgaagagtctgcaagccaaagtttctggtagaggagacctgcagaaatgggcctgctttactgtgcccatacaagcagtgtcattggctgggagcagtgcaaacatggtgatggatccagagcagtggcagatggggttgtcaattatgtatgctcctccagcaaaagataggggtcacacgtttccatgatgcaaccctaagatgaacaaatagctgactataggcaattaaaagtaaaatatttaatctctaagagccaaaatataggttcagtgaaactttccaaattagctttctgcacattctgcattttttgtacaattcataacatgagcaatgataatggtgttacaaataatatcaaatttctattcctttggataagatgtaattgatatactagaaaaaaaaaaaaagagtgctttggggtaaatataagtagttttcttacccaagaagttttcccttttagaatgtggtgttcatagccaggtgtggtggctcacacctgtaatcccagcactttgggaggcaaaggtgggaggattgctagagcccaggagttcaagacaagcttgagcaacatagtgagacctcatctgtacaaaaaatttaaaacattagctggtcatggaggcccacgcctctagtcctaactactcgggaatctgaggcaggaggatcgcttgagcccaggaggtcaaggctgcagtgagccgtgattgcaccactgcactccagcctgggtgacagtgtgagattctgtctcaaaaagaaaaggaatgtggtggtcttcatattttttcattttgttatcrttacttttttagggtttagagactcattttacatttttatatgtgtattcctccatttctttttttctctaatcccatgacagattcttattctccagcatttcttattccacatgtagagccataaataaactcctaaaaatcacatgaagtttttttcccatagatygctagtctcatttcatcttcacattattcctgggagtaagaaacaataacaaacaacagccactgacaaaactaaaactaaaactcagcaacttttagtttctaacccagtgcacttttatttatgttataataaatgtttattgctttgtagtattacaaacagtaaacatgtacaataaacagtaacaaataatacccactgacaaaactaaaactcagcaactcttagttcctaacccagtgcacttttgtctaggttataataaatgtttattactttgtagtatttaataaactttttaaaaattagaatgaaaaatgaaggaaaaagtatagctgaatataaaaatgcttttgatcattgtcattaaatcagaagtaaacacttttgtaaaaaatttggagagtatggaaaagaaaaaaaaggaattgttcataatccatagctcaaagaccaccactgttaaaatctgagaataattctttctattgtttcttctgtgtgtacttgtgttgctgtgatcataatgtttatataattttgttaaattacataagcagataaatgatttgttaggatataatcgttttataataataataataatttgaatcgtctagccctgactttcccttctgactcttgctagttgctagccctatcatatagcctaaaacaatgcgcatttcttagtgagggcagtcatatcacttgtgaccttttttattttttttgtttgtattacagtgctgtccatgcttccaacactgagagaggccttaatgcrgcaactgaattccgagagcctcacagctctgctaaaaaacaggtaaatgcaagttacagcattttctgtttaagcactacacttaaagtttatagaatgaactgatagacttttcaaaaatctttgttatttttctatctaatgaaagtttatataggctcagtaagaaaaatactaactatatcatttaacctacatttaattttgtctatgctctacttttttgcataaagcattcaaggcaatgatatttgtatgtattgtttttcatataaatagaccttatagcactttgaaattgttcacaaatttaattatgcagtgcttgtgaaatgtgttcctgaaccagatgctgtgaagctaacaaagttacgttaaatattgtgcttctttctgaaagagcttacggtgtaatacagcatgtgaacatacgttttaaataaataagatatacaggacttatatcttaaattactaacaaaatgaaatacaaacataacatgagcatgcaatactaataatttacattgccatggcagtttgctgtttccaaaagcactttcacatatgtaaccttgtatattgcatgtagcatgtgttggggtattgtaatttggtatgatactgtattagtttgagaagacttccagcaggaaatggcttcttattttgatgacaatgatgggagggtgggcagggaaatggtttcactaaataaatgttaatcattgtggccttcctaaaataatcacttgcctttaatcacccttcaaatagccaggggaaaagtagttctatttctaaactgtctcactgtgctagccctggtgctaggtaccttccatatatgctcccacttaatttacacaatatccctgtgaggcggttactattattcattttgcagtaggaattgagtgctcagacaggctacataacaagtggggaatttttttaaaaacacttactatattcagagaatacttcccaaaataacagtggatttgtgtacttgagatttcttttatctgattaaaacagaatgctagtgatgggggttttccattttaaatttcttcattcttagaggtagacagaccttccttccttcttacagatataaggtttagcttataaattagttcatacagttttatgaagaagaaacatataagcagattgcttttgatcaaataaataattaccatttgtgtgtacataggtaggaattgaaaagaagtagattttaatttcctttttgtcatgatgagaaggcaagacaagttaaataagtgaatagcatttttatacaagcaacataatacagataaaataatcgtggtggcattcttccttcttggtgaatctgtttcctgcaaggccctatgttccrtgtgctttaggggatttaatagttaagatcaagtctctttaagaccttttcatccaaaggaggaagtagactaaataaattatcgtaattccggacatatttagtgcaatgacaaaaagtaaaaggaaaatttaggagtatcaaaaaaaccaaaggattaattttgatagattatcctggacagctttaaagaaaagatgtgattctttttttcttaatcggtacacagggaggagaatttcttaaattctggagaatttaaggtgggccacagttctcctcattcagtttcctctttaaatatctcaatgttacttcttcttggctttcttttgatttgaaattactatttgtaatttggtggggggagaagggtaatatccatttgaaaaatatttgcataaataagggcttgatcccttacaaagtrtcattaaataaggcctccaatcttatgactgcttttatattaattttatatgagactctggtctcatataagcctgttgagcaagtttttttttctttaaactatttgtgataataactaagataataactaatgagaaataagtagatgatttgatagtcttattttgccaacttcataacagcaaataaacagttatcactgtttttgatatttggcactcttcttgaagactgataatggcaatgaagtttcaatggcaaaaacaaaaaaatcttaaacatcctccatcataagagaagtagaacacttcgaaaagattcgtttaattctctttactttttatttctccatgaaggtattttagtgacattaaagagtctggttgtatttaacttgcagttgatttccatcaaacaaatcatttgaaaggaatatttgtgttgaaggtacttttctctgttctacatagatttggaatcttttatgtagattttggagttttttaaaaaaaaatagcatcagtatttaaaaatctacttttaaggtctaataatgttaagtgtaaacatgaagaaatgtcctgggtaactattactgtcttctcccaccaaaatcatcccaaataaaatacagttttttgttcgtttggttttggtttttttttagatagagtcttactctgtcgcccaagctggagtacagtggcacaatcatggctcactactaagcactttctatattgaaattttcggaaccactgttttcttatcttttttcttttagaatttttataagaagtacttagaaatttttctgagggagcattcaaaaagagatatgagtcacttaggatacattaaatacctcacctttgaattgtggttgattcccagtttaatccgaatacatatgacattctgccgtgagtcttgaacactagattagattaaggttgcagcagtgtcttgcatgagttactcaacacattttctgaacctgtgccatctaggaaagaggtaactgaaactatagagtctgctcattggcaaagaaagacaagaagctagtagtatctttaaaattgtaatagtaactcaatttcttgttggaatgcaaatttatgtctgaaagtaataataaagaatatggacttgtgttttctatatctgtggttttttttatttcatgttttctagtaatttatttttattgtatttaacaaaagtgctgctctgtgacagattggaaaggaaaaggaaaaaaaatggatccttccactagtggtttgaaaagcactaaactacctccacatagtacatccatacaatggtgtactacacgttggttagaagagaaaagtggctaccatctgtatacaatagtcccatccaccttatccatggtttcactttccaaggtttcagttagccatgacaaccatggtctaaaaatattaaatggaaaattccagaaataaacaattcctaagctttcagttgtgtgccattgtgaataacatgaagaaatctccctttgtccagcggatccatgctgtagatgctatctacctgttagtcacttagtagccatcttggccatcagattggatgttgaggtattgcagtgctttgtttttaaggaacctttattttacttaataatggccccaaagtgccagagtaatgatgctggcatattacggttgtgctattttattgtgagttattgttgttaattttttacactgcctagtttataaattaaactttaacataggtatatatgtataggataaaacatagtatatgtaggggttggtactatcttcagtttcaggcatctaccgagggtcttcaaacgtatcccccaaggataagaagggactactgtagtactatggaatgatttccacaagatatattgctatatttttaaaaaggtaaagaaaaatgtgtataatatttttcacttatctaagggggcagatataaatgtatatatacatattcacttatataaagcaaaacaatggaaagtttaagcattttttaagtcgtcatctatgaagaagggagaaaatgaagggggttaggaacagacttttttgaatatactgtattatataaatttgacttgggaaccatataaatatttaatattataaaactatagtgtttaaaaaataatgtccaaaaatatatagtaccataaatcaaattaacctaaatatgattcttgttggtagtgtaactacaaagacagaaactgtgctaaattactttgaaacagaaatttcatgtatatccttagtaggatatatactcttcacacacaaagaattggaaaaacagaaaccttaaactcttttacactgagactgttgtgtatagagtgagggatgaaacaaattagtaattatgttgctttcacctattttttatgtggacaaaaagaaacacagatgtaagatcaatgagattaagttaaaaaccttttgactaattttagactaattttctaaattttgactaatttagaaatatcagtatgaattcatgatgtatattacctttttgatcatatgcacatataaataaataaataaataaacatttattagcttagttcactgaaaaaatcttagaaataatgacctacccagtagcaatgaacattctgcatcgaaggttttggtctctaccatttcctgctatgagaaaacaggacccagtgaaattggtgatatcaagtctgcagcaagaattaaatgagatgaacccagaataagttttcatgtcagaaactgtagatactataaaagactaataaaagattatacaaatcaaaaggattcaggaggcaatgtgaatagtcttccagaagtgaaagatgggcagtttgaacatcgatagagataataactacagtggattgatacacatgaaatatatgtgtaaattcatgtgtttatgatcgtaaaacaaaaaaaacttcatatttacctttgaaggattataggacctacttcattatttctaaaacagcaagttagggaaaagaaagaaatatttcctctgcatttcctatatgattttgtaatctatctatacataacactcaaggagaaaaagattgtaagaatatataccagttaaagtggttgttattgattactggaattaaaatttttttttaccgtattttgtgggcttgcttttctgcagttatgctgtgttgcttttaattttttttaaaaagtaaawatagatctataaaattcagagttttctattagattatctagattattattttcatatttttaaattttgttctttaggccttcaaacaagctagaaatatgggaggatctgaagataataagtaagcctgcatattctgtgtgacagcacatccttaaaatatttataaagggaaatgtttgcattctattaggatgactcttctttacctgccttttagaattgttgttagtattaaataatatagtacaggtaaagcaaatagatcaatgtctggtcatagaaagcattcagtaaatgttagtggtaatgctattgttattatgatgatgatggtaggtaaaattgtcctagactacatatgcctttattaggtactgatatctctaatgtgctttaaaggaagtttttattccaatccagatcatagatttactttgatattgtattgtaaatttttgttagtgataaaaaattgaaacaaaaagctaaactagggcctacgtatctgcttgtctcagaactgttatcctgttttcccatccattcagctaatccttgtcagcagaatgatgcttaagccttgcctatttgttttttgttgttgttgttgttgttgttttcatttttattatactttaagttctggggtacatgtgcacaacctgcaggtttgttacatatgtatacatgtgccatgttggtgtgctgcacccattaactcgtcatttacattaggtatatctcctaatgctatccccccccycccccaccccacgacaggccccagtgtcgacaggccccagtgtgtgatgttccccaccctgtgttcaagtgttctcattgttcaattcccacctatgagtgagaacatgtggtgtttggttttctgtccttgcaatagtttgctcagaatgatggtttccagcttcatccatgtccctacaaaaggacatgaactcgtccttttttggggctgcatagtattccttggtgtatatgtgccacattttcttaatccagtctatcattgatggacatttgggttgaattccaagtctttgctattgtgaatagtgctgcaataaacatatgtgtgcatgtgtctttatagcagcatgatttataatcctttaggtatatacccagtaatgggatggctgggtcaaatggtatttctagttctagatccttgaggtatcaccacactgtcttccacaatggttgaactagtttacagtcccaccaacagtgtaaaagtgttcctatttctccacatcttttccagcacctgttgtttcctgactttttaatgatcgccattctaactggtgtgagatgatatctcattgtggttttgatttgcgtttctctgatgggcagtgatgatgagcattttttcatgtgtctgttggctgcataaatgtctgcttttgagaagtgtctgttcatatcctttgcccactttttgatggggttgtttgattttttcttgtaaatttgtttaagttctttgtagattctggatgatagccctttgtcagatgggtagattgtaaaaattttctcccattctgtaggttgcctgttcactctcatggtagtttcttttgctgtgcagaagctctttagtttaattagatgccatttgtccattttggcttttgttgccattgcttttggtgttttagtcatgaagtccttgcccatgccaatgtcctgaatggtattgcctaggttttcttctggggtttttatggttttaggtctaacatttaagtctttaatccatcttgaattaatttttgtataaggtgtgagaaagggatccaatttcagctaagccttgcctatttgaaaacaaacctttctagttccctgtagttcctttcagcttttatacttccttttctggggggtgaggggagatggagtcttgctctgttgccagggtagagtgcagtggtgcaatcttggctcactgcaacctccacctcctgggttcaagcgattctcttgccttagcctcccgagtagctggctctacaggtgcgtgctgccatgcccagctaatttttgtatttttggtagagacagggttttaccatgttggccaggatggtctcaatctcttgaccttgtgatccgcccgcctcggcctcccaaagtgctgggattacaggcataagccaccgtgcctagcctatgctttcttataatccttatgaccaagatttctacattccctttcttctcttcactccctcacgctttgatgtactacagccctgcagcctgkcttccacacctgtgtcttcacctaagcaggtctctcaagcgtcagtaacaacttctgtgttaccagatctgctggacattttccttctgctaggactctcggcagcagtcaacaccttcactctctcctytgttttgaacaccctgtcctaagctactgggaggcctgtcttaccaggcttccccagtctttctgtactttcctgtagtccttaaacaggctcatcctcctcgggctgccattgaaggctagagttcttccacactcagccttcttctcttacttgaaaatagctccattgacaactaagagttctgaagctacaattctttgtgcttcccagacttttccttgttttcctttctaagctaatagtatatacctctttcacctaatatatttcattggttattgtttcaattaagggatcatacctaatttttattaaacaattgtgaggagagactgaaatattttgaattgatatatttttatactagaaacagttgtaaatatgtttttaaaagtcatcttacaaaaaaataaccttaggatggttcatgattttacacatttgtattaatcacagtaccaaatgsttttcttttctctgtgaaggtttcacaagaagtactgtggctgtatacagtacctgtatgctggttgttcttttgcgggtccagttaaacataattggtggatatatttacctggataatgcagcagttggcaaaaatggcactgtaagtttaatagacttaaatagacattgttctttccctcaggaggttcaaagtttaacttatttatcctgataacaatttctatgaaataaatatttttatatttcatgtgattgtgaacttttagtattatgaataatttttatatgttgaaactagaatttttggtgtgttaaaaattactatttttcccgtcatttcagatcttgaaaaatctcagccaaagttttattgaaaacatttcttatttaccagtttaaaacttggataattgaactgtatttctgttttatacagacaattcttgctcccccagatgtccaacagcagtatttatcaagtattcagcacctacttggagatggtaagattcttatttgtgacttttrtactaattttaattcatttatttttattattgaggaatttttaaactaagcaaggcttttaggyttgttttttctttaataggcctgacagaattgatcactgtcattaaacaagctgtgcagaaggttttaggaaggtaaggcatttttctttgacttttctgacttcttgattctaatgagtgaaagaaaattagaattgttctagtgaaaccagtgacttgacaaacggtgatttgtgaaactctttgtaataaaatcagataccatcctaggatattgcattgtgggatccattttctttatctttttttttatacagaggggaaagttttaatgtttcattgttaattgattgatttcatacaaatcagaaatatttgggtcatgagataaaagacctactttaaaatctgcctctgaggcttttacctcccatttatactagtaatatctataattacagtaggaattctcttatggaatccagagaaatacttttcttggctctgtagtaatggcccttaactagtggctgatttcrtaatccattctattccagtcagcagttacaggtgtaagcagaagaaacaggattttagatagtagcctgttaagaaaagagtgtatataggatgtgttgtatagtttctatttatcccaattcccttttctctgtttctagtgtttctcttaaacattctttgtcccttttggacttggagcaaaaactaaaagaaatcagaaatctcgttgagcagcataagtcttcttcttggattaataaagatggatccaaacctttattatgccattatatgatgccagatgaagaaactccattagcagtgcaggtgcttaattcataaccatttaaccaaaccagttactctattcttttaaaattttactctcttgaaattttgatttctgagtctcttgaaaggtaagtgattgaaaagcatatatttcagtaattgaagtaaaacccattaatttagaaaaacagccattatgagtgatttctagtaagaagyacttaacaattttagatattcagtacatttttattatcaggtatgtgacagtagatactgtgatgtattctggagatgtaaaatgtgtaagacatgttcattacacctggggaactgaagatacaaattcaattggtgggctgcagcgtatttttgtatcagatcaagtagcagaacatagagctgaaggtcagggcaagattataaagagctttatatgccaagataacgagtctgaactccaatttgtagacaaagaaaggtagattttaaccagtccaataacacaatcacctttgctttttaaaaaagttaatgatgaaagtacaaaaatggactgaggaggttatagtcatccacttgagaaacaatgtctaatccaaaaattatcarctatagtgttgctaaacactggtgtgtcctgggtagttgttacgtaagttattcattgattaaaaataatagaaatgccagattgcaggttatggctcatttcctaaattagtaatttttcgtttgtctgctggtttgcactcattctttgtaattgggagaacagctcttacttgacaactggaaaagccttagaacagagaggccccctatgccatacctcagcagagaggccctgttagaacagaatgccttgttttcattgcctgcaggatttcccattgccagagacaaagatgaacctgtttgggtgctgagagatcctacattcatgagtaggccaaaaaaaaagttgcatcccatttaaggaaaccctgtaacttgaaagatagagactaaactgatcaaacagaacagatggaacagaattaatgaaacaggagacaacttacaaaatagaatctcaaggagacgcaataagagtattaagaaatctttttaggactctaaagtaatttacagttttcaaaattcaaaacaggaccaaaaagaaaacaaaagaacagatgaagagagaaatgatggaccagatcttactgaactgaattaaaacctgaaatttaagattgaaaggacacatagagtctcagactagattgatgaaaaaagacacacacatatcctgataaaatctcttactgataaaagaaaaaagcataggaggttgacggggaggatcacttgggtccaggagttcaggaccagcctgggcaacatagcgagatcctgtctctaaaaattaaaattaaaaaaatcagtcagatgggcatagtggtgcatggctatagtcccagctactcaggaggctgaggaggaaggattttttaagctcagcagttcgagtccgtggtgtgctatggttgcaccattgcactccagactgggcaacaccaatctgtctcttaaaaaaaaaatgctttgggaggccaaggcaagaggatggcttgaggccaggaattygagaccagcctgggaagcataacaagaccctacccctacaaaaaaaaaaaaaatgaaaaattagtatggtggcccatgcctgtagtcctaactactacttaggaagctgaggcaggaggatcacttgagcccacgagttcgaggttgcctaagctatgatcatgccactgcactccagtctggatgacagagtgagaccctttctcaaaaaaataataatagtaaaattaaattaaaaaaaaaggccgggtgcggtggtgcacgcctgtaatcccagcactttgggaggccgaggcaggcggatcacgaggtcaggagttcgagaccagtctgaccaatatggtgaaaccctgtctctactaaaaatacaaataaaaatacaaacttagccggtcgtggtggcgcacgcttgtaatcccagctactcaggaggttgaggcaggagaatcacttgaacctcggaggcagaggtttcagggagccaagatcatgccattgcactccagcctgggcgacagagcgagactccgtctcaaaaaaaaaaaaaaaaacccagacctctgcaaactcaaaacctatttcttctttgtctgactatactagaaatctatccaagaagggccagataaacagagctcttactaagtataattttacttttactcatgtcttaaattctacttatttgcacacataaaccattacaggtttttattttggtgggggagggwctaactttttttattgttgatagaacatagacttagatttcctaaactctttatttatgaatgtgattagtttcatcataaccctgtgctaatgtttgaaaaccttaagtgtgacattttaattctataggcctgtggactttctcctcgagacattaccactattaaacttctcaatgaaactagagacatgttggaaaggtatgtatacttcatgtagcaggaaaaatatgtgtgtatgttgaatgtacttgagactattttttagtttttcttgaacaacatggtcggtataatattatattaaaattaaatttttgactctgttccccagcctttagataagatttcctactcaaactggagggaagcagggatttcttagggtaactcagctactaactctactatctgaattcatcgagttccagtcttttgtttttcctcagtaggattgtccacttttttsttattcagatttccacctcatcatttcatgaagctctggagaaggtcatcagtgatcttttgccatatccartgaacctgtaatgttcatcttacttgacctttctctgatatttgacactgcctttcttgaaattctttgctcacatgactttcatgacagtataatctatatttttctcccacctctcaaatcatttcttagatttttctatctctgtctttcctttaaacatcagtgtttccaacctggtgcagcagctcatgcttgtaatcccagcactttgagtggccgaggcaggtagattgcttgagcctaggagttcaagaccagcctgggtaacatggcaaaaaccccatcttaaacaaaagaaaaaaaattagccaggcatggtggtgcacacctgtggtcccagttacttgggaggctgaggtggaaggatcacctgagccctggcaggttgaggctatggtgagccgtgattgcaccactgtactccagcctgggcaacagagtaagatcctgtctcaaacaaacaaaacaaaacaaaaaaggccatcagtgtttcccaggtatttgttctttcttcattggcaactgcctcccaggcaatgttttatactcccattactttactatgctagtagttaaagccaaatgtatagccctagtcctccaccctcaggagcttgtctggattgaaatttctacacttcatagatagaaataatttgttcattcacttaattcatttatctcattgaattattcatcaactatgtattggctgtctgtggtatattaggtactgttctaaatgctaggtcttcatccctactggaatgtgtatgttagtgggagagaaaaataatcaactaataaatttgatgtaatgtcaagtatgtataacttygttgatgaaacacaaagcagggtaaggggttagagagtgaccagggatgctgtttgtaataggttggtcagaaaaggcctctttgaggagatgtcatttgagcagagacctgaatatactgtggaagtgaaccttgtaacccagaagaatacagttcaaggcagaagaacagttgcagtgatcctaatgcttggcctgttcaaggaatagcaaggaggccattgttggctggagcacagtgaatgagaaaagtaatagggaagtgagattggagagatagatggaaactccagagtatgttgaaccttgtagtccatgataggaaatttgttttttattcttaatgtatgggaagccattggagaattttaagcagggcagtgacatcatctgtgtttataaaagatctcattgctctatggtaagctgactataaagagataagaatagaaggagggaaccaatttcaagagttgaagtagtctaatcaagagacagttgcagtttgaactgggtggtagcagtggtggcaataacaagtggctaaataatagatttatttttaaggttgaaccagyagtacttgtggaattatttagtgtgggttatgaaagaggaggcaaggatgactcctaggtattggggctgagcatttgaggaaataggaactgccatttacattttggcagtgttaagcatatccaagtggatatgcctattggcaattgaatatgcaagtctggaattcaagttagtttacaaatataatgttgggagtcatcactttgtatatggtatttaaagacatgggaataggaacagatagagactagaagacaactaagtcatagagcagtccaacatttagagtttgggatcgggggaagagccagcaaaggagactgagtaggagctgccagcgaaagaaaagaaacaccaaaagaatgaggtattttggaagacaattgaagaartgtttcaaggagactgtgattgattgggtctaatgctcctgaaaggccaaaggagataaagacagagaaataacattagatggagttgttgattgatcttgttgagaagtttcagaggagcagtggagataagctaattcaaaagaattagagtttagcagagaccaagcacagacaactgttgcaacattttgctttgagagattctgagaaatagacagtatttaaggggaatgtgggagccaggagattttgactttaacacttttttatatacacctttctactaaactccatgagacgagtaatttttgtctgtttagctcaccaatgtatcttcagctcttagaacagtgccttgcatgtagtagatgctcaataagtatttactgaattgatagagggaaaaattgatgtagaaaagctcattaattttaagaacaaagtactttgaataggagaaaggaatgagattcaatacacagtaaaatagtttaggagtcaggtagggatggctgaggataggtcagatgcatgtaagtgggtagatgggtgggacaagtatgtggaagttctctttgcttctatttttatgtgtgtgaaataggaagcaagctcacctatttctcatttctttcattggcctaaatgaattcaattcaataataagaataaaaactaacatttttgagtgcttatgcagcaagcactgttctatactgctttatctatcttaactcacttaaaccttacagtaaccctaggaggtaggtactatgatgatcttttcttcagtttccatttcttcaactttcatccccttaatcatttttcttcttggaaccttaccatattacctttaaaagaataaagttcagcccaaattaccgtgcaacccagcaattccactcctaggtatctaccaaaaagaatgaaaacatctctagacaaaaacttgttcagatttttcacaacagcattattcacaatagccaaaaagtggaaacagtccagatttctattaactaacaaaaggataaaatctgatgtattcatataatggagccctatgtagcaaaaaaggggagcaaaccactgatacatgctacagcatagaagaaccttcaaaacatgctaagtgaaagaagccagacacaaaagaccacatatgtatgactgtttctatgaaatgtccagaaaactatatagaccaaaagtagattaatggttacctggggctaagactgagatgagaattggctggaaatgggcctagtgggtgatgaaaatgttctaaaattggattgtagcgatagttgcacaactatgcaaatttactcaaaatcattgacttgtgcatttaaaatgggtgaattttatgccctctaagtcctacttcaataaagccgttaaaatgcttttaaaatagagatgactaaggagaaaaggtaggtagatagaaagatacacacatacacatgcacactgtagtcaagaaattggaacataactaggtattttctagctttcttggcatctttatatattattctttatattaaagagttttgtgaggaactaagagagtataattaagatcaaaaaaccccggtctcatgtttgagctccccaatttactaatcacaggcctttcgtcaagcttcttcatccctcaagtatcatttcctcatctgtacacaataatattttctgtctcactgaaatatcatgctagaggatgtaaagccaactaatctatgactataaggaaatttaagagtttcctcaaaattagtagtactagtactgatattttttaaaaaattcattgtacaaagtgctgactagtataaaaaatctgaagtggatgaatattctcattatgttgtgctaaataagctcatttttaaatactttttaaagattgatttcttgatatattttacagtattagattatgactagaaatgttggtggctttcaaaggtaaccacgttattactgaatttgttttctcttccattcagagtctaaaaagtaacttatacttcttactttatatagcccagattttagtacagttttgaatacctgtttaaaccgaggttttagtagacttctagacaatatggctgagttctttcgacctactgaacaggacctgcaacatggtaactctatgaataggtaagatgacatataaaaatgttatactaatgaatgctctaaaaaaatggtgctttgcttgtctttttgttccagataacaacaacaaacctattaaatttgagtgcctcattttttaacaaattaaactctgttaaaccaacaacttcttcactagcagaagctccttcttggtttcagtattaaaacttrgagtcttccagaaactttgccactatattgaagtactttagttgtaattacctttctataagttgaattccaattattgtttttttttaactctttagaatacaaaactcacaatatgttttaattttaatgcattctctaatgttattccattactgcaggccattttggtctgcatatttcaatattttgttccttataatacccgggcattgttggtatagattctcatttgatgaattagctccttatagttctacaaatgcttaaatgtattcattccagtccttattacagaattaggaacatgtattagtgcaattgttagtgattttaatcataactattactaaatcatggacttatgtatgccataaggtatcttacggttttttatatctttgttatcccaacacaaatatctttggtctcatattagaatttatactctttaaggatttctattttgcagttttttatgtcaaactcggaaaataatgggtactaaattaatgttgactgactgtaaactcattcattaaaatttgagacacatcctttgaagtagctttaaaattttttttttaattggggacacagtaattgataggcaatatgtatgtgcaatatccaatttaattcttaaatacatagggccagaagttacttaccagattctctgagacccttctttattgtagagaaaagattaatttgacattgacattaagcatttggaatgcttacagccataaagtatattctctgaagtaatttaaatatcaacataaaatctttaaaaaaattttaagttatacaaaaataaatttcagctcaagaccaatcctatatactgtataaatcaaggtgctccaattagtaaaatttcaccataatctgtatatagcaagatattcgttattttgcaagtagtgatacataattgtaatggttattttaacataaatacttgattttgtacactgaagaattgtaaaaattatactacagccacaacagccatgatagtgtttcttttytgaactatagtaatcattatctgtactttcatgtacaacctacatgtgctaccttgaattggagttttattcctcagttacattttaagcctcctctcaaaagtcaaaaactatcttgtgccctttcatgtctctttactcatacaaggcactcagtagatattttctatataagtttttctgtttcatctcaataaccaacttcatgctccatgattgaaccctagaaacatttccatcaagcctattgtcatcattgtttaatrtgttgtgaaagtctagccatcatagtaagtcaagaaaaaacaaatggctaaggcctgtaatcccagcaccttgggaggctgaggtgggtggattgcacgagcccaggagttcaagaccagcctgggaaacatagggagagaccctatctctacaacaaatacaaaaattagctgggcatgcggcacatgcctgtagtcccagctaattggaaggctgaggtgagaaaatcacctgagcccgggaagtcaaggctgcaatgagctgtgattgtgctactgcacttcatcctgggcgagggagtgagacccccctgcccccccaaaaaaagaagtaaggtttttaactattggcaaagacacaaagtatattatttacgtgtattataattaataagccagacctctgaagagaatcaactgaaaaatgaggtaaactaataaaggctttaatttatatatatatatatatatataaaatatatatgcaacatatatgtattaatgtattatatgtattacatatgcatgtaatataatgtataatggatatttaaaagtcaaaagtgcaaaatgaaatccagaagtatattacaataataatagcagctaatactttttccatgtgctagtttgatgataggtatttttcagaatgtmtctcattgaattcttaaaataatcctaggaaatacgtactagtattcttcattttccaggtgaggagactaagacacagaaaaattaaataacttcaggtcaagtggtaaagccagttgttcaataatgtctatctgagatagaaatttttctccaaatttttaattattctccaacactatgattaattaaggtttaagaatgtaaggagggttaaaactagaaaagctattttggtaatccataacattaataagctaataagataaaaaacattatcttcagtgttgctgaaaagacattcaataaaacaacatttattatggataaaacctcttactagaaataaaaaatacatttttatataataaaataatatttgagtcaggtatgatagctcacttctgtaatcctgatgcttttggaggccaaggcaggaagattgcttgaggcaggaattcaagaccagcctggggaatatagcaagactcctgtctctacaaaaatttttaaaaccaccaagaggattgcttgagccccagagttcaaggccacagtgagctatgatcatgccactgtactccagtctgagtgacagaataagaccctgtctcttaaaaaaatatataaaaaaagagtatttgaaatcaaaagcaaatatacttaatagtaaaactggaatgatttccattaagttcaaaaacagtataaagatggtcactattgacagattattcagcatcattctattattctatctaatggagtaaggctaggagaagaccaattttgagattcaattaaggaaagctgttgatttttttctatacttatatcttgaaaataggtaacttttactgttggatagcgaaaaaagaaagaaaatagacaatttactgagtgttcttaccattttaataaactgttagttgaccgttggttttctaagttaaactcatgctatctttaaaaatgatatcaattttgaaaagggagaagaaaaagctattgttatatgaaggggacagactttatacttagaaacccaagagagtcaactaaaaagtgtaaaattagccttccaaaattaatctaaaatataatcaaaatattatcaaaattctattggagattggaggatggttgatttttttcatcttaaacctgacaaatgataataaaggtaatatggaggaataatggaatgagaatgtttaagcagttattggaaaagaagagcaatggatatgcttttcctatataatatataatataaggtataattattgttactcataaaataataggtaagtcagtgaaatagaatgtaaaatccagaagtagccctaaaaattgtaggatgttagtaatgattgtgggcaaaatatatgttggtaagaygaataacaattagtcattttacaatgactaataaaattcaggaggtttaagcatttaaatatactaagtaaaaacaaatatactgatcgaaaacaggtgactatgtgacctcaagatggagaaggtatttctaagaatgaaagtaaagaactttatataaaagaagkctaggtttgactgtataatttttaaaacttcaagatcaaacaagctttttataagcttttcatcaatattaaatgcaaataatatacaggaggaaatgtttgctctctttatgtatatatatcatccatgagtgtaatgacattatatacagaacttttgcacatcagttaaggaagcaaacacctaaggaaagaaaaattttctttcttagaaaatgtgcatcaaagacacagataattcacaaaagagcagatggaaatggccagtttgttaatctaagatttattgaacacgtgttatgaatcaggcactgtattaggtttctgttcccatagatcttacaatctaattggggaaatagtaaatataattgtataaactatgagaagtgttataaaggagaagaacactgaacgtataatagaaaaatttaaacaaaagtagacagtcaagcagttttcctgaggaaataatttgaactactaagattggaagctattaaatatgaccctagactacagtgggacagttgacattctgggcagaagctacagggcaaaggttttgaagccacctaagtacattttaagacttataaagaggctggcatggtagctgaatacatagaacaagagtggtgtcagacaaagctggagaatgcagcatatacagatatggctgtcatctgagaacactggaaggctgctggagagttttgagcaggagagtgatgtaatggaatttacattgtatgatttctttgactggtttgtggaaaaggaattgggtaaacagggactggggcaggacagacaaatggatgaatgaagacttattaatcaattcaacaagtatgtattggatgtccactgtacacaagaccttttactatgtgctgggacaatacagtgcataagatagacatggtgtgtaacctcatggagcttgcatgatagtgaggggagacagagcaatcaagtaatcaaaatcatgatagattttgaaaaatgccacaaaggtaccatgaaaaaaaaaatgcctgcttccctcaggaatacataaatcttcccacttcctttattcttttttaagcattgcctcaaatctcagcatagcacactggttgtacaccctagcttcagcacttgcatgatatttaaaaggaaatttttagtgtagccctaggttgaaatgtatgagatgtcatatttaatgtaataagactaaatctacaaccccaacgcaaaaatgagtcttgttgtttaagtcattgcatcacrtacatacagtgatacatacatgtattcatttatgcatccaacaaatgtttattgtgctctaacaagttaaaaagttattgctgtagtcyaggcaagagataatgctcagcttggaatctgttgggcaacggggagaattcttggcacttatttgaatataggcaagggaaagaagtgccaaggattttcaaaagattttaagattattaaaagatttcttttgagaaatctttagaatatctgattgggtataggcaagagaaagaagtgccagggataatgcccatatttgctgcttctagaacctgatagataatggtgtggttcactggagtaggggggaaatactcaacattgttagtaattaagagaaatgcagatttaacctgtaagatactattttcacctatcagatgtgaaagattaaagaaaaggataatgttggatgttgaaagaaggcataatggagcagatacattcataccctttgacccagtgatttcatgtttatacaaaatcttacttagattaagaaaatttaggcaaaaactgaaatgcccaactctagggaactcatgatataaattgtcacagctagaggacagattactgtatagtcattaaaaaacaatcagacaaacactttagaacttttaataagatggaaaatactcataacaataaaaatgcaaaaacagtgtgcttaggaggttagaggtttttggtagacacaaaaaaacaaagatatgtgtaaaaaaacgccaaaagaaattggtcatgatgtcaattagagttgttatttctaagcgatagaattgtggggttttttttcctttttaatagatttccaaaaatattctacaatggctatgtattacttttataattaagatgttaaagtcctgtggggtcatttcagaaaataatcattactgtratgatttttcagtctttccagtgtcagcctgcctttagctaagataattccaatagtaaacggacagatccattcagtttgcagtgaaacacctagtcattttgttcaggtaagaagaaagcttgggagtgttattaaaagcaaattatatttgtggtggtggtcatgtttgtctaacataaagttacattctctgctgagaggttttttcaaaaaatcacagaacttggaactacatgtagagtatggtagagtgtcccatgagagtaataacrgaccatagcaaatgtgtaagtttggagtacctttctccgtgttgtagtccaacactgtgggactacattttagtccaggtgtattatagtggtcagttgaatttatatagcatgaatgtttgcattaagctgtgctagtaagaagattgatccttggggcagatcaaggatcctgttctacacattttgaggaaaactaaaaaaatttgtggagaagtaaagcattttagtgattaataaaatgtaacagttaatagtgcatcaataatatgctcactaaaagccacataaacagtgggtcatttaaatgttttatcagactacctataactccatcttatttcttcatttccatttggaatgcatggagtaattcagtaattcattgagtaattcagtaattcattgagtaagacaaatattataaacaaaataactttgaatttctgagtcatgtgcaaacttggaaactgtgttataagttaaaaaattgtttgcaatgccagttgcaaactgcttcaataatgtacaatgagaagagaccctatggcctaagcataaagctgacatcttcttagtgtaacttgtctcagacaatttagtgtatcctctctgtagactttttactcttgggaacgtggagagcactgagactaagagttcgtttcctcctttcactgtggtgtcatcagcctgtccttcacatgcacattttcccacactggactcttcagtcttctgtcctctttctcacccctaagagcttggcactcatattgcagaagaaatagtgaataagactgatctcattttactgaatgttaagcttcacatctatatcaatgtgagaaaaaggtcataacttggggcatttaaaccttacctttacctttgtcctsttctgtagaagtccctggcttggccagtaggctgttcattttgacagatgagtggaaattacaaccaagcataaagcatcatcagccttaatgcttaaataattttatgcactacactttaattaaaatcgatataattgataataaaaacaaatgtttcaatatggtaaaaacgccattgatactaatgtttagtaaagttttttastgtaactggatgtatattaaatgtatatactagaccattgattgacaaggctattacaattatagtttaattttttaaactataatttctatgagttaaaataccaagtggtcttcttaataaattgtcatatgctttactatttccacttatctttttataaagcctttgccttgattagaatgctaatttacataaaattagtcctttcgaattactgctactacttcaactacaatggtgtgtaggagagcctatggtgggaatgctgtagaacaggggtttggcaaactgtacagggccagatagtacatactttaggcttaatgcaacatacattctctacagaaactattcaactctgctctggcagtgtgaaagcagtcagaaacgtacatgaacaaaagagtatggctgtttcaacaaaactttatatacaaaaacaggcggcagtggatttggcctgcaggccatactttgctgacccctttggtagaagatattaggatggtagttggtaaaggtaggaaatgggagaatcagaaaacaatcgagaaaggtggtttttcaaattattttcaaatagctttcaaataacataagcaggagataaattatttcagattgctttcagataacataaggaaagagcttttatagtgtgaaccaaccctatgatacataatttttatctcagactactgaaacatcctagaagctgcatcaggatacagtatttgaacagattaaagtctttattataaagctgatataagttagctatgacctatgagccaaatccagccaagcaccagcttttgtaagttttattgggtgacagcatgcccattggtttatgtgttgtttatggctgcttttgcactacaatggtagtatttctcagatttgtccatacacctcacatacatatgtacacacatataccacagtcctccagtgtttaaatcatttttagtgtataaattaaaaactcaataagatccttaagattagagctttttcgtaactcaaaaccaaagcacttttattgtcaagtagaatctaaattacaaaaaaagattgttctataatatggctgacgtctactattaataatttgttgtgccaaagtgaatgtggacctgtctgctactgttcatgctgttgagcattcagcctgcattttctgaagctgacttgctagtatttttttttttatctactgtaactattctgaaagcttcatttgtatcatgtgttttacatgatttggtcttcatttgaaagattttctgcctctgttcttctctcattagcacaagacagttaaagtaatgttacttaaagccaataakaacataaatataaacaaatgccctaaaatcaggaacaatagtaggttatatattttatcttctcaataatcaagagcgtgtttgagttttctttacattttcatagaaatcaaaacacaaaatttcccctcaaattcttgggcccctgaaagtatgtctgtaaattctggtttgagaaacattgatctaaacctatgtttcattgaacacctagactgaatacttgaaactaaataacatcaaattctctgatgagataatttaaccatgaattgattgagattaggacatgtctaaacctcacttggattttccgatacttaagaaacagagatcactagggacaggtttacttcccatttctttgacactctcagaggctgtcaaccttttctatcatggaccctttcacagactggtgaagcctatggaccccttctcagaacaatatttataagtgcatacaataaaatacataatattataaaggaaaccaatcatatatagttttcaaaatttcttttaaaattaagtgtatgatatagcggtattgcttctttattcatgcattaaataccaagatataatgagagttctgataacttccacaactgtcatatgacatgaaaatgcctatgatttctattgaagacaaagtcatacaacctgctaatattatcacagtttgttgcctacattcataattgaaagagataccagattttggttagaagttaaagaaaatgaaggtgtaatttttttcttatcttcacattcgcaaatcccttggggtgttaataacccttacactatagtgtatatgtgtggttcatgtatgtgtgtatatgtaaaatatgcacttactacacatattcataccgtatgttagatcttctagaaagtaatacacccttaaccgtgttatgtcagcttccagcaaaagtacctttactcctacaattatttattcaacagatacctatctagcacttgacatacaccaaaattcatttgaagactatttggggtttttgtccctcaaagtcacacttgaacgcttatgataccatcatccctcatataagaacctaaataataactatctcctagaatttattacaagaaaaactactcattttcttaaatggtttgcctcttggcctttaccacaaaacttagagctgaattcatcgcttgattgcagaaattaattcaaattagctatatgttttgcaaactataatgttatattatcatctttgctaggatctgttgacaatggagcaagtgaaagactttgctgctaatgtgtatgaagcttttagtacccctcagcaactggagaaatgatttttccttcaagaaaaactacagtgggattcatttactttttaaaatacactgggtaaatcacctatacttagagtaacagtttgttatcaaaatgcctgataaaatatattcttaataaaagtcttcatttcataatgaaatcaatttatttggcatcttaatatatttttttagattcatcaacagaccagtttttgtgggcatatatatatacacgtgcaaatatcagaattgttaataatttgttacacatggacatttgttccaaactgactaaaaatcaatatagatattttatatacatatatatatatawaaatacaaaattcagtgtactttaccatattaatactgaggaaaaatctgttggagacataggtctaggatgtgtgaagtttggaaaaatatgctatttaattataatgttccctagactgctgtaaacagaagtgaatcagacttttctccagctacctttcaaaataataaattatttgtctcaaatataccttgatggaggacttttttattcttatggaaatrgtgaattccaacaactatgatgaactatgttctttgctatttcttcactatattttttaaggttttattaaaaagccttagaaagttacatattggtttagaggctaaaattgtgttgatgctgtttactcacctaattacatagttttaatcatttgtacataattttaaaaacttactttgtattgattttgaatacagtgaaaatcttattgcaataaactattttagtaaaatattattttgttgagttaatatttttcagctattaatttacttatcccatagcatttttgttattatttcggaagagagagcatgctagtttaagtttcattttaattggtcrtgtacttggtgcttttttgttgttgttaacttgttcatttagtaaaaagcaaatagctttactttctgaaaaagaaataattcattatctctagtaatacatctgtaattcttcatttagaagggtaattagggcaaaagtaaataaatcattatatatcattagtatgttgacatatattttcagtaacattgttttatgttcctccagcgtaacatgtagctgaacagtagaaggtagaaaataaattatgacatctcttctaaggcctggctaggcctgaagctcactgccagggagtttgtgtctagaatgtttttaaaaataggtagtggagccatagccctcaccatagacacctctgagcccactggcattgtctctgagcagaagatggctgtgccactcacatatgctaatcttggcaaatctgccaagcatgtcttcaccaagggatatggatttggcttaataaaacctgatttgaaaacaaaatctgagaatggattggaatttacaagctcaggctcagccaacactgagaccaccaaagtgacaggcagtctggaaaccaagtacagatagaccgaatatggcctgacatttgcaaagaaatggaacactgacaacacactaggcaccgagattactatggaagaccagttagcatgtggactgaagctgaccctccattcatccttctcgcctaacactgggggaaaagtgctaaaatcaagacaggatacaagtgggagcacattaacctgggctgcgrcgtggatttggacattgctgagccttcagtccgaggcactcttaagtgctgggttatgaggattggctggccagctaccaggtcaattttgagaccacaaagtcctgagtgacccagagcaactttgcggttggccacaagactgatgaattccagcttcacactaatgtgaatgacgggacagagtttggcagctccaattagcagaaggtgagcaagaagttggagactgctgtcagtctcgctgggacagcaagaaacaggaacactcgcttcagaatagcagccaagtatcagatcgatcctaaagcccacttctccactaaagtgaacaactccagcctgataggtttaggatacacttaaaccctaaagccaggtttcatactgacactgtcagctctcctgggtggcaagaacatctatgctagtggccacaagcttggtctaggactggaatttcaagcataaatgaatgctgtagaattgtttaaattattttgcagcatagataccttcacaatttagtgtatcttttaatgttgtatggctgggatgcaagtattgctaaatgtcatattggacctccaggttaaagatgattcagctttaaggtgttaccctttcaggggtacagaagaaacccagttccaaaaaggtcccttcagtggtagatttggggaacttggtggcccctgtagagatgccaggtttcttttttatctagaaatggctgcaagtggaagctgataatatataggcaccttgtaaattcatattgagtaaatgaatgaaattgtgatttcctgagaattgaaccttggtttcctaaccctaactgatgagaggcttgttgcttgatggtgtgtacaaatttacctgaaagggaccttttaaagacagatcttcatgacttgttcccatcccaggtcttcattacctcttttacacaaaaagatctacagggtgtggtcactgtttcttttgtgctgttttggggtggagagggtggatgtgatgaagccaataattcaggacttaattccttcctgagttgtggtttttttgtccttgcatcagtgtataaaatagcttccaggagctctagctataagcttggaagagtctgtataattgtaatcacagggtgacagcactcagaatctaaactgggcttatgtggtattctcaccactcaatttattttttagcagtttaatgggtacattttagagtcttccattttgtgtggaattagatcctcttcctcaaatgctgtaattaacttaaaaaaaaaaaaaaaaaaaggtaatggtccagcctgggcaacatggtgaaatcttgtctctacaaaaaaattagccacgcatggtggcatgtgtccgtagtcccagctacttgtagggatgaggtgagagaatcacttgagccgagtaagtcaaggctgcatgcagtgagctatgattgcaccactgcactctagcctgggtgacagagtgagaccctgtctgggaaaaaaaaaaaaaagtagtggtggagaggagggaatatgcttcttttcaaaatttgacaaaatatgatattctcacttttaatggggcaaatgaaaaatagcattttggtaaatttgggaatgagtgtgtaatgggcacacatctcttccaacaaaattaacccaggatttcatccagggaaaatttgagactaaacaggtgtagccttgtaaggatacaaatttgatcagctgaaaattatctcctggaatcatatgcgtctgtataactgtggcagtggaagagatgacaaggtaaaaaccacatgtatttaaagctacttgggaggccgaggccggagaatcgcttgaacctgggaggcggaggttgcagtgagctgagatcatgccactgcactccagcctgggcgacagagtgagactctgtctcaaaaaaatgaataaatacaaaaataaagttaattgttcttagatagtacaaatctgccttctaatagtatagcaggagccctctcatcagaaacctttagttgtttggttaatctaaaaagttatttaaatcagggtgtcataaaaagtacatatatagacattttaactttaaatattctatatttaccacttatttactataggatccaggttttttctaactttttagtgtacatctactcagtcgggctgttggtgatatagtggtacagcatagctgccttcccatataggtctgctgatagatgttctctaattgtctttcttgaattcctggcctcaaggatcctcccacctcagcctctcaagtagctgggattacaagctggagcttgtaatctaattatctttcttatacaaattacatgcattacattacataggtgtgaaccacagatgcagaattcttgaagatttttactatattttcccccaatcttttagagcagttttgcccacagttaaccaatagcttttttttttttttaaatttttaaagtcaacaaacttttatctagtctttccaaagtatttaacttggctttaacagaaactagaactcttcacgcttgcgtccttggctcatattatcatcataaaaagttcacctggcataatcagtttgtttggtaactgtatttgtttcctagagcagttgtaacaaattaccactccacaagtggcttaaaatgagaaatttattctctcacacttccggtggctagaaatccaaaatcaaggcgtcagcagggccatgctccctctccaatctctgcctagtcgtcacatggccttctgtctctgtgtccttttctgtcatttataaggatactgtcattggatttagaacctactcatatccaatatcagcttatctcaatacttacctattacatctgcaaagacatgatttccaagtgagaatacattctgaggttgcaggtggacataaattactggggaacactatttgacccactacagtcacaaactcaaacagcctttggtaaacataccttgcagcaaatgggaatagaaaacacaacccctactcaggttaaacaacagaaatttattttctcacagtgttggaggctgaaaatccaagatcaaggtatcagcagatttggtttcttcaaagacttctctccttgacttgcagatggcaccttctcactgtctttatatggcctttcctctgtgcacttgtatccctggtgtgtcttccccttcttataaggacatcaatcctattggctttagggccccacccttatgacctcacttaaccttagttacctctttaaaggccctgtttcgaaatatagccatgtaccacataacagcttttcagtcaataatggactgcatatatgttggtggtgccatacgattataatggagctaaaaattcctatcacctagtgacatcatagccatcataaggtagcacaacacgataatcatgttgtttatggtgatgctggtataaacaaacctgtgctgccagtcatataaaaatctagcacataaaatgatgtaaggtatatagtacttaataaatggctaggttactggtttatgcattactgtgctatatgttttgtcattattttagagtgtacttctacttaaaaaaaagttaactgtgaaacagcataaggcaggcccttcaggaggtctgtgagaagaaggcattgttacaggagatgacagctccgtgggtattattgcccctgaaaaccttctaagcaggacaagatgtggagatggaagacagtgacattgatgatcctgaccccgtgtaggcctaggctaatgtgtgtgtttctgtaaaagtaaaaagttaaaaattttaaaaatagaaaaaagcttatagaataagaatatgaagaaagaaaatatttttgtacatttgcacaatgagtttatgttttaagctaagtgttattacaaaagagccaaaaaggttttaaaaattaaaacgtttgtaaagttacagtacacttatgttaatttataattgaagaaagaaaaacttttttttataaatgtagtgtagcctaagcatacagtatttataaagtctggcagtgttcaataatgtcctaggccttcacattcactcactgactcacccagagcaacttccagtcctgtaagctccattcgtggtaagtgccctatacaggtgcaccatttattttacagtatttttactgtaccttctctatgtttccatatgtttcgatatacaaataccactgttactattgcctacagtattcagtaacatgctgtatatgtctgtagcctaggagcaacagtctataccatacacattaggtgtgtagtaggctatgccatctaggattttgtaaatacactctatgatgttggcacaaaaaaaaattgactagcaatgcatttcccagaaaatatccccatattaagtgatgcataactatataatcatgggggatatggcttcaacataaaattttcagttcggtccataataccaccaattccttgctactataatgtgaaaaaattctcacctctgagtcacacatggaaacaaatcaatgtgaagagactttaatggcaaagtgcactggagagttaaaatggttacatgggtaatttaagaaaaaatttagtgggaaaaagggaaagggctgaactgccaaaataattttcttatccagttttacatttgctttctccatgtgctacaattatagacacctgatagttcctagccttagacataacttgcagcatcagccactctgctgcactttagatcacattagtcagggctagagcccagccccatttacacggcatctgatgaatggttagctgtggcagttctaccataatgccattttgctccaaagaaatccagttaagtggctgtccatggcccagtagtttcacctgaaattaaaaacatacatgcaaatgtctccaaatttatctctttatctcacccactttctattgggaaggagtgattagtagttcaaacaaaattgtagacaagaggttcatttttacctttatttagtgattcacaatcactcttcatccaattgagtgtatgtatcttgcctctatattcttgcttctattttactctcaagagggaaatagaagtgtgcaggggttggggaaggagaattttcaagactgaatggagtctcagagtggagaaaaagctaaagagaggatcaggagcagaaagtggctctgaaaccagagtctgcccaagtatctactcagcgttcctcccccagattttctaataacctccactaatcaataatacataaatttgatcaattattactgtaattgttttatattcttagtcttactatactaagcaaattcaaataagttccctacatattctagggttattttgaaccaaaaactttgcttctcaggtggatcaatatgaaaacaaagcccatgagcttttaaataataatgttaattggcaccaaaaagaacatagataaaataaaaacataatcagtatcatacctgggctactaagctgtaattaaacattagatttgaactcatcttctttctgcctcatcaaccacatgtattagaaatgaaatgcagaaaagtgatgcaaggagaacccccatatggacagttcacctccaaagggataatttatttaaaaaaataagttataaaatatatcagaatgaactcaatgccagatctggtggtttcaacagttagattaatctctaactttctccaaaatgttttataaacataaaatagtagagtcatgacatcttgtattcagatatgttctggggtggggtgtcagggaaagcatccgaattctagttttatgagaagaatcattttggatgcatgcagtgaacttgaacaacgtaaaatgactgtgaagaataatgtctattttacagtgatatgcatagagatactgcagctgttttatcagcttagttttctgggaaacaaaaagtttcaaagattttgaccaaacactgtcattggtgaaattcattttattttattatattttattttattttttcagagacaggctgaagtggtgcagtcatagcttactgtagtcttgacctactgggctcaagcaatcctcctgcctcagcctcctgagtaactaggactacaggtgcgtgccaccatgctcagctaactttaaaaaaaatttttgtagacaggggtcttgctatgttgcccaggctagtctcaaacttctggcctcaagacatcctcctgccttagcctcccaaagtgctggaattacagtgtgagccacaatgcttggctggagctcatttacaattccttttatgaagtataagtgaaacagttataaggctccccttaaaagttaatgtttgcatcaagatgttctaatcagcaatttaaaggaataaggtaaaattccctct

SEQ ID NO: 96678 - DNA, 380551 bp, Homo sapiens
catacaaacatatgtaacattcagtgatttctgttagaaaaactatgaactcctcaaaacccgatgtacacaaataaatatccaactagcatgcaggtcaaacacaaagcttaaaatagtgggaaaattaccaggcaataatcctgtcattatggcccaattacatcttgttttttaaattccagtattgtatcattagttttttagtttgtgacaaagatactttcaagaaatgaacttaagatgaaatgtagggttttttggggggcgggggcagaggcagagttgtaatcggtatgcaaaatctaaattaaaagtcactgaatggagaatgatttttaatttcattgtatgaccgcctcaaaatgaatataaatatgctcactaaagctcatattaaagtactgtacttaagagcaaaaaaagtaaattgatcttcgagggctctgaacagaacttggtcataattacgttgccatctttacctttcttctttattacttggaacattaattcaagatgtacatgagaatataatacagaaagcaggcaagcaagaaaatatcaataatatttgcagtttttctagagaatatgtccattgcatttttcaactccacatttattgatggttaagcttcttctgagccatttatattccattctgtcaaagtaaaaattacagatttttaagaaaggcaataaaatggaaagctgatttcatactaagaggaacatttctccaacagtttcctatttggagaaagcaaaccacaggtgtggcagggagctgacacgagggtccctcgacctgggtgagctgtgggcccaggcaggtgtgggggccaccgtcagcagaactgcttaaagagtcgcggggaactggccacgcgctggggggacagcgggacgtgccttggtgtccttggagggcgcggtggctgtgctctgctcctgacctggcagctggaaccctctcgagcagcctgaaggtgtccccaggggctggccgcgcgacgcctgggccttccctgcggtgcagaatggaaaggccgaggcagcagggctggagtccgggcagcacgccgggcgatcagtgcacggcatgggagtgggtttctcacggtgagcgtgcacgggtgggggcatttttgaccctgcgtgatgggaatctagaagggcccagggatcccagcacgagaggctgaggcgaatgcagctgcagggccgtggaggctggacacaggtccctgcaggggaggccgtggtgggttcgggccgagccgtagccgcctccacctggctgtcctcggctcctggggcagcccaggagtccaggcagccacggctcctgtgtcactcccgccctcctgacctcagcggcggggaattcctacacagaggcagggagaggcgaggcgacacagcccgtccctctgcgagctcctagcccggagcccgtccgcgctgggcggggagagaaggtctgagagtgaagcaagctgagcgttcccatcagtctctagaagagcacgtgcgactcaaggagcctgggaactcaggggagggcagaacaatttactcaccctcactacccacccctgcgaggggttccgcagtggcacggaaaggctcctccatccagtcaagcttagcttttgtctctcaccccctttaaacggaccttttaacgatggcatgaatagtggtattcagcataacaattacacttggtgacattcttactttctctgcaatgtccacaaagagacctttaaaaagtcattagttggtgctcatggaagatttgcatataaaggaaaatcagaatgaactctcaattatcagcaaatccagaataggtgatattttaggggacttaaaaactacaaattatgagctgactgaatagagaagcctccttaaattaaagctttagaaattgctatttgctttcttgctcagattaagtaaaactttctgttgcataaatagaaaagaacgctattttctcttgggcgaatatgtgcatgcctgctcacttggggcccattttgagcgtttaaatacattaaagcatattatacagatttctctaggcagatctgtaaggccttagctgaattggtcgcaatctctgattgggaaatgtgccagttcccagctagcaggagggatgtcactggccaagcactggaaaccagccacaacccagtcattttgtctgtggatccctgttggggtacctcagaggggtggaggggtgacaaggtatcagaggcgtttaaaccagagcaaatccatcttaaatagaagctgggtaaaatgaagctgggacccactgggctgcatccccagacagtgaagggattctgagtcacaggatgaaataggaggttggcacaagacacaggtcagaaagaccttgctgatgaaataggtcgcagtaaagaagccggcccaaacccatcaaaaccaagatggcgatgagagtgacctctggttgtcctcactgctacactcccaccagggccatgacagtttacagatgccacagcaacatcaggaagttaccctatatggtctaaaaaggggagatatgaataatccgcccgttgtttagcatatcttcaagaaataaccataaaaatgggcaaccagcagcccttggggctgctctgtctatggagtagccattcttttattcctttactttcttaataaacttgctttcactttactttatggacttgccctgaattctgtcttgcgtgagatccaagaatgctctctttggatctggatcaggacccctttcctgtaacaaaagcacacattccaaacatggctttgaaaacaggtccagccaaaagccagttgtcccaactgtcacccggcatctgggctctcccgcctggtgaggagggacacaagaaataggacctctacccagcaaggcagattgggaataatcggagggacgagccctctgttctgctagtgggggcggagtcaggggaggttactgaaaggatgggatgtctgagtgtggatatggagggaagagcagagataactcccagagtccctggaatggcagtagggtgtctcgtaggctgagaagcaggcttcagatcacatggcctgttccacacacaggcagggggcatgagtgccagttccagctccatcctgagctgctgtttccatactgcagttccttttgaggactgaactctgaccttttacttctcttgcccaaattcctatctaagggacctggggagtcacaccccacaaaccataaaatctcatcagagaggtttcatttaaccctatataacgtggcttactttccagcctgactctagcataacctcacatgacagacaaagtagaaaatcaaaatatttcaccccaaatatctttctttgccatattttgaaatggactgaaaagtcattttagtggggagaaagttgtgtctataaagaatctctattaacataatagatctttccccattccataccctcccagtcctgaagagatttacggagagtctacatctgccaacttattttctctaagggtaccacctatgagacttcatctacataataagaaacctggtttccacagccccttatcttgaccctgacactcttttctgttgattccaggtgtttagacaataacttaactctttcaaccaattgccaatcaggaactctttgaacccactatgacctgtaaaccaccgcccttctgaaccaaaccaatgtataccccacacatatcgattgatgtcttatgtctccctaaaagatataaaaaccaagctgtaactcaaccaccttaggcacatgttctcaggacctcctgagactgtgccctgggtcatggtcacccatatttggctcagaataagcctctttaaatattttacagagtgtgactctttttgtcgacacctttcatcaccgtttcagaagcaatgaatgggattctcttacacaagccattcttgatataccacatttgccactggtccagaaacaatggggatgtgcctgggtcatgaacctatctgcaactctgtatcctcctggcagtctgatcccttcaggtaaagttggataagtggggacagtggtaaagccagatgctggtgaaatggggatgtccagaggaaacttggccacaacaacttggaaagatttatacagagaaaccacaaatataagggccaatcgaaaacagaacacagtggaaagaggttgggatttcactagttcactggggcaggccagtgaacctgctgatgcagccctatgcgtaggtcactactcagcccttctttgcaatgatgtgagagggccaaggaaggaactaaactgtcttcgggggaagggagagctgagcagtgaaagtttgtctgggttggaatatttgcaattaggaattagtagcatctagaaaatgaactttgcattgcatttctgactgctgacatatgggaaaggtattgattcttgaatatttatttcatatgtaatcatcttagatgttaattatgatattaacttaaaaagatttcacttaattttcttggaaggaccatataaagccacatgtatttggttctctccataaaccctgtgctgcaggtaggagacatttacctaacacgctagtttcaaagcacttaccctcgattccacaattcattcccctccttctctccaagtagaactcctgaaaaatgaccttcttatagttctctgcaagtcaatgagctgctttaatcctcccagtaacttggtttttaaattatggagactaaggcacggagttgttacatgacccgtcaaaagccacagccggcaaacagagtttgaacccagaagaactgcagccggagcctttgcgcctcagtgctgtgctcggcagctgcatgctttgtcccatttcttgtttctccacaaattatcccatctgcccaagcatcttcccctgcttgtccaccaggtgacccacatttattggtacaaacccctttaggcagagtggcctgagcctcctgcccagctggtttgggccgggacaggcccaggtgaaccagcctcaccgtggccaggtccctcgagactgggctggtgcggcagcaccctggggtgctgctatgggatccccagggcagcatccagagctgttggaagtgtgagcttccatctctggttagtttgcagcattaccgaagaagaagagaaacatcaattccctgcatctcccctactcaaaacttatccaggcccagtttctttcttaactaaacaaacccttcctgctgaaaggaaaaggcatgacatttttgttgttgaaagagggagttttcattagtccgtgcagagcaggctcagtatcactagttacagcaatgtgaaggagtgaaacgaacacaaaacctctacctttatttatcaaagatgagattttctccccacaggctgtaggaaagaggtatatcatctggactggattgaatagtgtctcccccaaattcctgtcttttccagaactttaggatgtggccttacttggaaatagggtcattgccaatgaaagtagttaagataaagtaatattggagtattggagtagggtgggcccttaatccaatccttatgagggctggtattctcataggaagagaagagacacagacagacgcacaggaaaaaaggccatatgaagatggggcgggactggagtgatgcgtcatccacaagccaaggagctcaaggacggctggcacctccggaagctagaagcagcaggaaggaggcttccccggagcctgcagtgagagctggccctgtccacaccttgatctttaactcgtagcctccagaactgggagacgatacatttctgttgtttaagccattctgtgtatggtaatttgttacgtggctccaggaagctaagacacagccttcagagctggmttctgatttctttagacatcgccctaccaggttacagacaactcagaataatccttccctccgggcaggcgcaaccagggaggtctacagagaagagcacatagagaygtaatttacagtttgtgactgaccccactcccctgatgctttttataagtggatttgggttgaaaatagactcaaatgtagcagtctcagtgaagaggaaaggcatttaacctcataagcatgtgtaggtttcaccatggtaaagaggtctttatgggctgaccacgcgtgggggcatcaggtgagggagggaggcctgagcccttcccaggaccatctgctgtcctgggctgccctctcacttagatcrctgcacaaccatctgtttctgtagaaatgagtcctccctccccatcctcaaagattttccaggctttgggagctctgcttatagagaatgcttggaagaagtagggatattgcacttggagaagtgaataccgagggggaaggaaagttttctataatttcccgagggcttgctatatgtggaaaaggattaaccattgtgctgtgtagtttagatgagagaggtgaaccagatggaaatgttaggtgtaaatttcctttcaaaacaggagctgcctttctctttggaagtagaacagctaccccatgaagtagtgaggctgcttggacaagacggaataaataagtactggttgcgtaggctgagttagtgaactaatttcacacaagcacatattaggcacctgattctactaggtgtgccaagctctatataagaaaaggaaagaccaacacaaacattttgccttcgtggaagtaatggttgattagtttggtaaattggagatactcttagaccaaaggacccctacacggatcttccaactttataatcccaggattctctgcagacaaatgagttaagtgtgcayggaggaagtgctcagagagactagatatatgcatgacaattccaaatctaactttcagaaatgtggggggcagtagttctaataatttcctcaaggaatttaggataatctcatggttcaaatttaacacatttaaccatttcaaagggacttcgaagtaaatttctaaaatgtaaatcatgaacgcagaattgttcagaattccatgggggatkaacctgaattccaaaattaaatgtaaatctctgtgaggagaaataacatttacatacatcaactttgggacagaaaaactgaargttttgttgctgctgttgttgtttggtaatccattcccagaagttcatcaacgtttgaaaagagcatgagaattggtcccagagaattcacacgaatatcaaggagggttatcaaggagggtttgaatcaggttgacttacaaggcctaggttctccttagaagttgttttaaaagatgatcaacataaaataattacttctatttcttagaagccgtttaaattacaggtcaaagacctggtacaaacatcctaaaattttgcaaacttcaggcatcctcattccccatatgttttaatgtgcctgcatctgaattaaaattttaagtctctttaatgaactttttattagtctataatggtaaacatcttagataaagccaagcaatttgattcctacaaacgtggggacaggatatttcattattatgtttacttttgcatatttcatgacataaatttacaacattatcagagtctctgatatctggagtctgaaatcttttaggtagggattgtttcagaactattggtactgttagaaatgaaccaaaatatggtaaacaggcctgtcggagagccctaatctgctggcggagcccatattccagctgtaaaagctttaatgccatttattggctcatgctcctcaaatgtaatactctgcatcattaatttggtagtttcatctctgaaagctataaattgaagattcctattgttttaattttctgtaacctttaataacatttgtgaaagaacataggaaagaataaattgctattggctgtatgacaaatgcatccaaggaatattttgtaggaactcccctttctttcccctcaaagcagtcactggaaagacagcatgttttacgtccaaaattcactgtttagaatgcaggcaaataagctcaaaagcttagacagcagtttggttttttcaaagaggaccgtggcccaggctttccttgtctgtgctggaaagaggtttctcctttgtaaatacgatgctccctaaactccagtcacatattcaagctgagagattatgccaggaaaggatggatttgaaaacctgttaccagtgaatgaatctgagtctttcacttatttggccactcgccctgcatttggcaattagagccaaaatgaaccatttgaagcaaaggcactgatgcagctggtgagaccgggaggccacatgccactcacaggctcacagagggccaagcgacaggtcacccaacgagagagcgctatgggtcacacacaacactttcagttgcctggttgtgttgttacataataattcatagagcatgatattcttctataatatatactattgtatgtatataatattggayatgtatataatgttgtgtaatcataatggctctctcattaatacccggtcatggacaggctccatgtgaaggtgccctgaacaccttgtctctaattatgcccaccctaatgaaaagttgttacgatgcatatcttgtgtagacagaaaaattgatgattacagactttaagggatttgcctgaggtcacagcttttctggctccaaaatgttactgtttagtctacactaccattcacatctcagatttatctgttcttgttttaactatagcctaattaaactctgtgaaaaatattatgaacacacaagaggatacagccactttctctgctagaacaagaatgatctagtggggctggctctaagttttcattgctctgatcgtgtagatggggcctgaattggtgctgtgagcatggactgttcctccctcccctacttgatttccaactggtccttgaaaagactggaagcctgggctcctcacatgggccactgtcccaatgtctagctccctggctctgcaacccccactgcttatttcagaggaagttcatgtgacattaaaacaggagacattgtaaaaacttcaggcagtagaactaatctaatgtttgcgctttgaggggatgctgacagacaggtcattttatttgaaagaatattttctctcattcttttttgtcatttgtatctggtctcattctaaaaagaattttgtagtgggacttgaaagaaatatttttgaatctgagtttaacaagacattgatttacataaaagagaaatacaaaaaaagaggaatacggaaatgtgcaattgttctcaaatacattgaaatttaggatgagttttttctactgctacatactgtcaatttctaatgtaattttaattgtaaataattatatctgttactaaggacatctgcttaaataaaataagtatatataattttgtgatgtatatcataaagcaggctttcttaaaatgttattaaagctaaatcattttcctagtgaaaattctaatgtaattgaaaatcctgcgataagcttttttttctgaaagaattggatctagggtaacatagctactttaaggaacagttttaagtttttatagctagaatgctccaattttgtaataggaccctctgaaaatacagcaaactgcaggctggcattgttgtgacaggtttctaagataagtagaaaatgaagcggaagataatatttttccctacaaatgtcagaaaaatgttaagcagaaaaataatttaaatgtagaattcctgatgcatgcatttagaaagactccaaaagaattagctgagtttggaaccaattaaggactctcgtatgaactttaaatgtcccacattgataaaatcttactagggatttattcttaaagtcaataattttctttgttaagtrtatgaacacctgtgagttaaaggtttaaagaaaaactataatgagaaagcagtagaaaccaattgttttgtttagtagtctagagctcccaacaagatttatctgtctttgcggcagcaatatttatccatctttatagatttccttgaggataaagaaagattctaattgtcctttgaacatcactgattttctacttttatacagggatacagaatgatgcttagatataagttctagcctttattgtgtgaccaacaaaagcattaaagcagtgttgcagtagctacctattcccagatactcaggcaagaaaggagaaatgtgttcaggcycatcttccaggatcatcaagtacagaataactgttcacatgggaggaaagctacaagaggcaacttctgcaacaattaaawggaaatagtaatagtacatgcatcataggtttgcatgaggattactgaggaaatattagtgaatcgcacacttcaaaaatgttaactaagacatttgggggtggctgttccctgatgcttccatctctttaataatgctctcatctctagcagaacatctttatctctatctccctcaagttactagaatctaaatatgaggtatgcagttagagtttcttttatcgaccttagttgaaaaaggtgcacatcgggagtctcccataacttcatggatatttgctgctactatatggtaaaaatatgaactatgaatgaagactgtttaaataagtattttccaaatgtagtaatattgttactaaaacattacattttaacaataagagactcaattattaaaacccagttattactttgcgtaaagactaaccatcttgcctgaatgtccaccttacccacagctcttcagataatttgaacagaataccattgcaagcactccattacaggcatttgtaagctcctataactccagtttgaagtcctttttctaaatatgtatagtatttaacatataagccggttctactactgaaagagagctaaaagctttttgagaattccatgatttcctgaatagtctatgcctggagcagacataatagcaattgagtaataatataaaaaatagtgattccaaacaaaagtctgtttgtggcaggagctgctgtaaactcagcttcttgtttgattttttttcttgaatgtatgatgagcagatcatgttgtaaaagtttcattcagtgctccattaaattactaacttattgataccactatcaggaaataacttcatgttgacttataacatgcatgtgagaagtacggaacttcaaaattaacaacaaaaaagaaaattagactcatcatttcaatgaaatcacacgcttaatgaatagatttacatccactgcctgccaaaggtcaccaaaaacttgctaatatctttgttagggtaaaatagagccatatgaattcatctgtgttttccaaagcttatagaataatactacaaaaaataaatgaatcatcaaaaccatttaccagattttaataatagtgcttaaaaattcatcttaaaccaatggaaaaaagctgactgaaattgtaacaggaagtatctaaaggtagaatcactatgaagaaaaagaacaaactcaaaacctactaatgtattcaaaagaccattaamaaaacttcacaatttaattattggaagtttatagaactgcttcagcacttctgtactgagtaagtaagctgtacctgaggagtaataaatgaaattgttaactttactgtttccctagggagtagctggagaaggcgtgggaatatgctatttagatctccaaatggatcatggtttatatgcaataataaatcctaaacgtgttgctaattaactctacttcaaaccactccctttttctttggcttaaaagacattttgactcgtgggctcactcaccattcatattcttaaagatgttcaggacagggaggatttgacggtaataaggcaccaaggccttgcccaccatctcagctgacacaaccagatgctggaggaccttgagagtgacacagatgacctgtcggtttcggaggttcaaggcatctatatggtaaaagaaggaccaagcagaaaatattttaatagaaagcatcaggtctacaaggttaaggtaaagttgtcttgtggttgcatttaattaaactgtgctctactggggaccaatgggcctttattattatagctttggatgacacattgcaaccctaatgttttaaawggaatcttgtctgattactrtttattctccccattggcactgatttctcaccagccctaggaatgcagctcattttcccctcgtagaagaggccggggctctgagttggataagcagtatgaaagacaaaagatcacttaatgttgctggagttaaaggaacccatgtgggttgacaacagatacattttcatgcaacaatctctttcatgcaacaatccatacaattcttaaaaccattaacatggaacgaacatttgggaaggagggtgaggcatggtgttcaaatctataggctggttacaaacaccgagaatattcttggtagaagtgaacataaagtgactacgtttaggccctcacaaagtaggaaagaaaagcaaaattttttaaagttcagttagaaggaaacaacacataagctataagagaccacaggaatatgacagttctaaagaaacagttctgagtgcaaagtaacaagctgtactgcagagacagagcaagatgccaccagggagggtctgaaaggcaccacttgccccagtgggaagtgcagggggtcgggaatcaggatgctgataactggctgtgcgaggttggccaacttactggcactttcttggccccagtttcttcaatcatgggagcctgttatgcactttctaagatggctaaaagtaccatggtttaagtagaagagccagataaaacatctattatagaaggtcaaaagtgcaattaataaaatgtgatgcctcagatgactccaagaagaagtcaaaggctcttatttgtaagatgttctaccttctaatgaaaaagattgactatgaccttaaagcagatgccactgtgaagggacaaaaggacccaggctataaaaagaaatgatgctttggtcaatacatctctgaggcagtcctgacactgttcttgaactccagctcacatttccatcagcctggatcttgccagaacctcaaattcagtttgttccaaagactaaatttcctccctgaacttctttttcttccctatgttcctcatatttagtaaagataaaccttgttcccagtcactccaggtcaaagcctgtttctcctccttcgcattcctcatgttaccaaatcatctggttttccttttgcagtatctcttgaatttgtgtctccctctccatcctcaccaacactcctctggtcctggtctccatcctcacctcctctgctccggtcccagtctccatcctcactgcctctcctctggcctcactctccatcttcacctcctctcctctggtctcactctccaacctcacctcctctcctccagtgtcagtctctatcctcaccctctctgctccagtccyggtttccatcctcacctcctctcttctggtcctggcctccatcctcacctcctctcctctggtctcactctccatcctcacctcttctcctctgttcctggtctccatcctcaccttctctcccctggtcctggtctccatcctcacctcctctcccctggtcctggtctccatccttacctcctctcctctggtcctggtttccatcctcacctcctctcctctggtcctggtctccatcctcacctcctctcctctggtcctggtttccatcttcaccttctctcttttcatcctggtctttattttcatcttctctcttccagtcccagtctccattttcaccatctctcttctggtccctgtttccatcctcacctcctcttctctggtcctggtcttcatcctcacctcctctcctctggtcctggtctccagcctcacctcctcttctctggtcccagtctccatcctcatcttctctctctggtctcactctccatcctcaccttctctcctctaggtatccattcttattgctactcctctggttctgatccttgggacccattcactggagcaccagcctgctcttgtatggatctcttttctttctgtctttctccacttccccaacctgtctttcaaggtaccgcggggttaccctccctcaagcttatctgatcatctcaccacctgctaaaattgctcagggccccctacccgcttccattggcctcagaatttgtggggtgctcagaagtgtttttataccacagcccctastttgttgctgaaagggatgaatcataccccactttatttttaaaaattttctagtgattccagaggaaatagctgcaaaaccactaaatgataccttattttccaagacttataactgaggatttggtttagttcaaacttatcctaagtgcttcctttatgcctggctagtttgaactaaaccgaatcctctgttaaaagtcctagaatataagatatcatttagtggtttcacagccatttcctctggaatcactaggaagttttttaaaaaaatgtggtcagattcatcccccctagcaacgaactagggtttgttgcatgaaaacacttcagagccccctacaacttctggtccagtccagactctgttcttgtttagtttgaaagtaaatacaaatgtaatgaaaagagacggctcagccttcactcagggaaccaacctaaatataaccatagaactcagcagcaygatggctcattacagcagcagttagacacactgcaggacaaaatctatctgctgaaaaacaactaaaattagaatgctatcatttagcttaagagctggagtcatgagatattcaagaacaaggtttcagatcaccatgagaaggtgaggaggaagaaggcacgcagcgtgttgcagtcagcagtagagactctctatctggtcttatctgatctaaaagctgttttgcctttttagaatgtcaggggttagtgagccttatgtactgacaagctcaggttaccaggagaactggcaggccagaaatgttctaaggattgggggcagttgatattctttcaaagtctaccaactatgctcaacgggtttaggcttcaggactgcacagatatgtgcgtgattcacagcacctgtagctaacatgtagtgagcaccrccatgtgccaggaattaaaccgagcacttcacctgtattaacttacttagacttccctcaccaaatgtctattgagagtgcatgcattacatgcccatcactgttttaggaattggaaggacagaaatgaatcaggcaagtatggtaccaacctcttggggtttgtaaaatagtatggaaaaagatattaaacaagtatgacaaatgtgacaattacacataagaaggacagggcgtttaagcagacaatcaagtcccacgcctagtctagggttaagggaaggctcccagatgtgggaacaaaccccagggctgagtagatgtcatttacatgaagagtttccaggagaggaagcagcgcgctagggactagcttcccagtaaggagttctttcactgcaggggctgctccagcttggatgcatgagattcccctgggggattcaagagatagtagaaagataccctgactggatgtgtcactgggagtgtgtctttcttgggatcgtttggaagygctggagaggagtatggaggtgcatacaaaaggagggtgaggctgtagtgatttttcccaagctcaagaatccctgggtcccaccttgccttatcaaccaaacagaatcagatgtttgagatcctgggtttctttcttttctctttattcatctctccttcccatcccactccttaagaaggactcagagccacagctagctaaatatcttataaactscttagtgaggaaggattagacacagaacagaatcacatgggtgtgttgtttgcatttctgtatatattaaaagaaatgtatgactgagcacatacagtcctcactccatttcataggttttgtttttgtgttttaaaaaaagctgttctgttgacactatgaagtcataagtaggagagcctatggaaggtaacaaagtgattactacctgaatgtggtaattgcagaaaaggttttggtgaccgttgtggtcactggatgctggcgtatcccagtgttgttcttttagtgtgtgcccgccgaaggttgcaataaaacagcctgggtatgctgatctactgccaatgtgagagaagaagtttgccctgtagaatatactggtatcaaggagtaaatttatatatataatataatatatatattatatatatgcacacatatgtatatatgagatatatgagtaacactaacattaaatttttattaggtttatgtccatgtctatacctaattgatcattkgggcatgcattaataatctctctcacaatggataatgatattaactattaggrcatagattagatattagctatcaggaaaccttgcctgaattaacatggttgtgatcaacgttattggattgacagtgaccaagaagtaaaatgcctgaactgtaacgcgtaatggcatctaaaatggagctctaagtcctcctcaatggacaggtaatggctctaaaacttctgcagtagctgtgaaacaaaggcaggatatgcactatttaaaagcctcttaacttcgtccaacagggatttcttacactgcccattttctcttcagttcctctatttctcttcttcattctcagagaattaagatacaccatgaagtcggaagtctttttgttcttactgtcacagcggaattaaagcaaaaagattttttttttgaaacagttcttttcctttgaaaaagtatgctaacaggtataaagagaatatgattttgtagcttgaaagagaagaaatgtgtttattcttttgttgatgggcctgaaagctattgtcaagacataagtgaggactttgaactcaagatttaaggttttgaaaaggttctaacatgaggagtctactgacattatagatcaacaaatggaacctttctattcagaaaattggatttctattgtactgcttactggctttaggtataataaacaagatagaggcttcagatatagagaaattgctgaagaataaggaaaaaataatttgaagtcaagggtggtaaaagttatttatcttaaatggttatatgctacatgtataattttctcaggcataaaatccactattttatgattttttttttgcaaagtgagaactttttctactattagatgtcattcactattgtggtatcaggaaaaaaggaaacatttctgcttcttcttttaaaacaagaaacaccaaacaaaaggcaaaagcaaacaaaattctaaaaaatatttttgacatatgctttaaatgttaatagctttaacatacaaatagctatcacaacccaataaaggactgaatcttccaattaaaaaaatgggcacggcacataaacagacaacgcacaaattaatacataaaaatgaacatttactattctggaatgttcaacttgtgaaacccagaaaatctgagacaggtctcagttaatttaggaagtttattttgccaaggttgaggacacgcccctgacacagcctcaggacgtcctgacatgtacccaaggtggttggcacacagcttggttttatacattttatggagacatgagacatcagtcaatatatgtaagatgtacattggtttggtctggaaaggcaggacaacttaaagcaaaagcaggaagactggaagcggggagggagcttccaggtcacagagaggtgatacacaaacagttaacattcttttgagtttcagatgagcctctccaaaggaggcaaatcagatttgcatctatctcagtgagcagaggagtgactttgatagaatgggaggcaggtttgccctaagcagtttccagcttgacttttcctgagtgattttgggggcccaagatattttcctttcacaaacttcattggtaatttttaatatcatgttaacacaaagttgttgacaatttaacactgtcagtgtggaaacaggtttgagaaaagagaaaagaggagacgccctgatagacaccatgttataaactattccaacctttctacagagcagtttggcaataaacctaaaagccataaaaatgcataaaacagctaacctagcagtttcatttctgggtagttagtccaaggatttaggcaaatgtgcacaaagcattgtaggaaagaatgctaagcccagtattattgataattagaaacaatctaaatgttccaagaacaacaaattgtttaagtaaactatagtatatccacacaatgaaaaactataaaattattagtcatctaatagaaaaaatagtttaaaataggaaaatgtttaagacacaagtgactaaagaagtaaactataaagcatatttgcactcggacctcattttataaaatagaatgtaaactgcataaatactagaaacttgtgtactgagacgctaacagaagggactatcttttccatagacatatgttccactaaaagataagcgcttttaaaaactgctttctaaaaaattatcaatatacagtgcatatttttcttttgttattacatattattattcatgattgtaactttgtgttttaatagatcagaattcaatctatttctcattgttctttctcaatattctctcaattatttttaaccctttattttttgagacaaactttaagataattagttgaaattgcaaatgtgcttggccctttggtaaaattagagaataatttggcagacaattgccatctttactactgaatccttccattaggaacatgatatgtcttcaattttcttgtctttaagttccttggaaaagttttatagtattttttcacatagatcctgcaaattttgttagatatactcacagaaattctatattttgttgttatttgtgtaaaattatttaatcccaatattcttcctaaaggttattgataatatacacacaaaagtatatgacttttatatacttactttgttaacgggctaacttatttaattcccttactggatctaattgtttttgagtgaattaagttggattttatatgtaatgatattaccaaaaatattgttaaatttgtgtttgctttctaatatttatctctccttttttggtcaggtgacagaggctagaatttctaaaagaaaatatagcattatagtgctgagagcaggcatgttagtttttttatcattcttatgtattttaataccttattttgtttagtgggtaaaatatatgtaacataaaatatggcatttactcccccccacttttttttctgagacagggttttactctgtcaccctagctggagtgcagtggtgtgatcatagcccactatagcttaatccacctgggcttaagtgatcctgtcacctcagcctcctgagtagctggaactacaggcacacaccaccatgsctggctaatttttttatatttgtagagatggggtctcactatgttgccgaagctagtctcaracttctgggttcaagtgatctgccctccttggccttccaaagtgttgggattaacaggcgtgagccaccatgccttttcacctttttaaagtatacaatttagtggcattaattagatttacaatgttgtgcaagtctcaccattatctttttctaaaaattcttcatcacccacaactctgtagccattaagcaaagactccccatgcccctgctgtagtccctgataatctactttttgtctttatgaatttgtctattatagtgtctcatagaattttattattttttctgaagttaaaatgtttaataaatattttatgttttgggcccattatagcgttagttgaattagattacaatggatataaattttgctagttcaggagtgccaaccatataattttctattttatagggtagaatgaattcaaaatatattttcaaaccaaatttagatttcaaaattgtagaaatttttctccttccataacagagctcaattgctatataagtaaatatgacacagcctgatttatcatattcctaggcaattaaagtatgatcgatttagatcagctattatggacatgaggtaagcctataataaggattacatttttttctttaattcattgttttcaagtttctcctacttgaagtaaatgtcatacaaaaaatattgatttttctctcaacacatatataatatgtaaaatatataaataccatagcatgccatgcaactatctttatgcaaaactcagattttccatcaaagttttgccattacaagtggctgactctttttcaatttttcaatagatcaaaatatattctttcatggctgtagaatataatttagtatttgttgaaagtgtttggccmttctctccatgacatactttgttttaaatgtagatacataattcatgctgtttgagtaaatgaaagtattcagttaccaaaatggtctccatgatgcagtccctagcatgatctatttgacactccccatattccagacacagagaatgaaacctgaagcrtcatgtcatccaacatactccttttcagtcttgttgcccaggttgggcctgcacttgcttacacacgtatgagcacgtctcacagaaactgagagtaaacccatcagcactgtggcactgtcagaggcggggcaggttcgtgtctttggagctccttgctcctctgtacctaaattgtgtctcagttcatctgcaaagattggggtgaaaactgaaaaggtgaccaaaggaaggagttagcaccattttcagagtaaaaaccaagagaatgctgcatcatgcaccactacttctaagaatgactagggccgggcacagtggctcaagcctgtaatcccagcactttgggaggccgaggcgggcagatcatgaggtcaccagatcgagaccatcctggctaacacrgtgaaaccccgtctctactaaaaatacaaaaaattagccaggcgtggtggcgggcacctgtagtttcagctactaagggaggctgaggcaggagaatggaatgcacccgggaggcagaggttgcagtgagccgagaccgcgccactgcactccagcctgggcgacagagtgagactccatctcaaaaaaaaaaaaaaaaaaaaaaaaaaaagaatgactgctacatttcttcttctggttgagaaaaggtgtctacatttccacagggtttagacagtagaagcagtggagtgtaaagaaagatacaatgtgcacaggctcttcacaaaacaagacaagagatgtgcacaaaatagaagacgggtaaagagaccaatttccaagaaggagtttgaaaactacacactgctaagcctgacatcaataactgctgtgattctaggactgattatttaagcaggtgattcgggagctcctaggaaaatagtagttgttaccaggagtcagagtgagctctctggaataaggccagccaagctaacctcatgtattctaatatgtttcctcataaaggagataataaataaactgtatcagcaaagcatctggcaaggcctctatggttttccttatagggaggatacaggaatggttgaaaaagtaggctttttctttctttcttttttttttttttaactctgtgaacaattgtatccaagtaatacgyactaatgatttggtaccagcctgtacagccctgagtgggatacctcatgtatctatatttgatcgagtccagtttccatctaaagtttttactgtaacttggatgaatgttatagaatccaaatctatcaattttttttgatgaccccaatttagaagtctgcagagacatgaccatgaaggaaaaccaaggatataaaaataatttattcttgatsgggcaccatgctaaatgttctatttgtataatctcattactccttacagtgtctctgggcaatcagttttctaatgctctgggacagttaaaagagtcaggtggcctgagatcacacagctagttagtagcaagctgggatccggtctgcactcagcatgctcaggcccctcaccctcccagcgtacccacaggcatgggatactggtgtacagccaacctggcgtgtgctcatgagaaatgttcaaagcggcacagcaaacatagaatctagggtggactttgagcaggcattcgagacacctgctgtgtcctgtgctttgrtggcttaaggaataagccactagtaatagtgatgaagtggggtttcacggcaacttttgaagagcaaggggaggcactgcggtagtgctagtcctgactacagctcagcctccacatgggagcaggagtgaagattctcagtctgaggctctagcccgggtgactaaaaaatgttgccgtaatttaggcagagaatsatgatgatgatgataatgatgacgatgataatgatgacaatgataacacttataaccttacatattagctcatttaatcactgaaatagcccaataaattggatgtcattatcatcattgcccccctccccccctttttttttgagactaaattttgctcttgttgcccaggctggagcgcagtgcagctcactgcaacctccgtctcccgggttcaagtgattctcctgcctcagcctcccaagtagctgggattacaggcacccgccaccatgcctggctaatttttgtatcyttttagtagagaaagggtttcaccatgttgaccrggctggttttgaacttctgacctcaggtgacccacccacctcggcctcccagagtgctgggattacaggtgtgagccactgcgcccggtcctattgccccaattttataagttaggctcctgagtctccaggtagttaacttggacgatagcagttatgcggtagagttggaattttgatgaggtagtctgacttcagagcttttgcccctcaacatcacattacactagaagagtgatagaattggtttgtttatttatttatttgagagtgggaaagggacagttaatgcacggcggattcggcttgaaaatgcatctagctggttctctctttaaacatrctgtgccttgctggcagggacagctaagctgtccattctctccatctctgccgcctccatcgtgggtgctggatcacccttcctcattcccctgttmatacagggcgaggcctgatgttgattccttcctctggcgagtgaccaggcaaactttactgtctaagacaatttgaaaccactttctttctgtatctggtaaccaaaataatcctaagtcagacacctctttttaatgttttttaaacagattagacttgtttttccaaaattaaaaatcattacttttaaaataattatgatcacgttcagaataatttacttggaaaatgtcaagataagtaaaattattagatcatgagtaaagggtaatgcatttcaattgtacttgcttctttcttagtaaatagaattcccaaagtaatttttgtattgtgatatggattctcatatttcattcttactcggyggtgtttttccccactaggttttccttaacagaatattttgcttggtaaaatgttcttgctcaggtttcttccgctgtgtctgtgcacgcctgccctttactgccggatgacctcacctcgttagagctctcctaatgaagccaccgtgttatggccmgtctatttgtaaagcagtgatatttccataattctttggcaaccagggtcacctctcctcctactaggccatctcacaaaagtatgttgctgcttatgatagaatcacgtgagagaatgtagatgaatcaacagaaatgtactctcaccacttaaataattctcccaataaatagaaagcactatatcattatacccttcatytgttgtttcatatgagagagtcttatgcgacagtttttatagaatatatagtacagtggcaggcccaaatggccacttcatgcttttgattacggcacctatacagatttcagtacagacagcagttatgtaccttattaaattaatcttgcaaatattttgatgcatctcttgtgtactagccaggacattagatkctgtggggatgtattactttctaacattatgttctaagtgacatgagagaggagctataaagttatgtcggggagggaaggcagagtggggataggactggagttgagggtagggagtggagaggtgaatcagaagaggctttatagatcaattcatattggagctgggctttgaaggtcacttaatgtttaggcatctggggatgtgagaatgggcattccgaaaaatgagcgaagacamagaattagaaaagtgcaaggcaagttctacggcacaatcggtttggctagagcacagggtgaatgaagggaaatagtaagaaataaagtcaaaaacaaaattttcagccagatagtgggaatccttgaaagccatgccaaagaatttaaagtaggccgactttggagaggagtctgcccttaaaatctggaaatgcacctgataaggtgagttgaaagctttttccctacgagctaagttgtgtggcctggggcagcagaaagcaggtaaactgacttggagagagagttctgggctggaagagcaggtagaaaattggaagaggggatcttggaagcgagggcctcgcagagggtgtaaactgaaatttgcatgtaagctctgccttagctgacctcttagaattacacacatggggagattcccagtagtcccagatggcgagcaaaagctgcaagatgaaaaaactgaaaatgaaataacttcagctgttgtccaccacagagaagacaaggtttggggtctgtgtccaattaattgtctgccagaattagaatcaacactcttcasaggaagacaacagaatccaggggctgtaaaatgtattcataatgcccttgtaggattgcacgttgtggccctgttaaggttggatgggccctagactatgtctggccaatgaatagtgaatagaagtgaaatgtgccccttccagggtggaccttctgagctcttgtttcctgtggtactgaaccagcaacaactatcaggctgggtccctaagcaatgacaatgaacagaaccttgctgctaacctgcaacagacaggttgcacagtcagaaatctatattgttcatgttttaagtaatgtattgttttaagcccctaagatttttgggattggttgttattgaaatgtaaactagtttattctgattgataaaattccctgtatcagattaagggaattcctttctattctcagtttgttttaaatacatgaatgaatgttaaatgttatcaaatgctttttcaccatttattaaataatcattttttaattcattaatgttgtaaattggcttgattgatttttctagtgttaagccagtcttatactcctgaaataaaaccaactttgtcatgaggtattatcattttttatatattgatggattctatttgttagttatattgtttaataaattttccttgatgtttatgagtgagattgtcctggaagtttcctttcttataatatccatgaatattggtatcaaggttatgctagctttatgaaatgagttgaagtgtgtattctccagttttattgtctggaaaaatttgtacaaaatgacaattatttttttcttcagctgtttggtacaactaaccagtgaagctatgtgagccttgagctattgttgtgtgggggattttaaytactgacttaatttcttcatttgttgtattagtgtttgtattttaacttattttctatttttcaggtgtcagttttggtaagttatattttccaccttgatcatttcatgaacaattcaaagttttagggataagttgttcttaataccctatcatgatattttcaatgtctgtaggatttgtgtgacacttccttttttatttctgatattggttatttctgtcttctctcattttaaatttagttatatatatatactttttgagacagagtctcactctgtgacccaggcgggagtgcagtgcccaatcacagcccactgtaacactgagctcctgggctcatgcgatcctcccacctcagcctcccactccagtagctgggactacaggcggcatcaccacatctggctaattaatttttttaattctaagtttaccaaatatttatcaatgttattsgtaatttaaaggaaccaaccaacatttggtttttggttctcttaattgtatggtggttttctgtatgtattttaatttatttttgctttattttttgtaggtacatagtaggtatatatatttataggttacaatatgtattttgttacaggcatgcaatgtgtaataatcgcatcagggtaaatgaggtattcatcacttccagcatttattctttatgttactaataatccaattatgctcttttagttatttaaaaatgaatgattaagtcgttttcaactatagtcaccctgttttgctagcaaatactaggtcgtactatttctaactattttttgtaccttckaaccatccccgcttactcccctcgcatctggtaaccatccttctactctctatctccatgagttaaattgttttaattttgagcaccccaaaataagtaagaacatgtgaagttcgtcttttttgcacctggcttatttcacttaacataatgacctccagttccatccatgttgttgcaaatgacaggatctcattcttttttatgactaaatagcactccattgtgtttatgtaccatattttttttatccattcatctgttgatggacacttaggttgcttccaaatcttggttattgtgaatagtgctgcaataaatacgcgaatgcagatatttctttgatatactgatttcctttcttttgagtatatacctaggagtgggcttgctggattgcatggcagctctcttttagttttttgaggaacctccaaattgtcctccatagtggttgtattaatgtacattctcaccaacagcatatgagggttcccttttcctcaccaacatttgctattgcctgtcttttggataaaagccatttcaactgggataagatatctcattrtagttttgatttgcatttctctgatgatcaattatgtcgagaaccttttcatatgcctatttgctatttgcatgtcttcctttgagaaatgtctattcagatattttgcttattttaaaattggattattagattttattcgtatagttgtttgagctcctaatacattctagctgttaatcccttgtcagatggatagtgtgcaattattttctcccattctgtgagatgtctcttcactttgttgatygtttcctttgctatgcaaaaggtttataacttgatgcgatcccatttgtccatttttgctttggttgcctgtgcttgtcaggtattgttcaagaaatttttgcccagaccaatgtcctggagattttccccaatgttttcttgtagtagtttcatagtttgaggtcttagatttaagtctttaatccactttgatttgatttttgtatatggtgagagatgggggtctagtttcattcttgtgcatatggatattcaggtttcccagcatttattgaagagattttcttttcccagtgtatgttcttggcacctttgtcaaaaatgagttcactgtagatgtatggacttatttctgacttmtctcttatctatgctgttccactggtctgtgcttctgttttttatgccataatgtagtataatttgaagtcagatgatgtgattcctccagctttattctttttgcttcggatagttttgacaattctgggtcttttgcggtttcatataaaatttaaaattgtttttttctgtttctgtgaagaatgtcayaggtatttttatagagattgcattgaatctgtagattgctttgggtagtatggacattttaataaaatcgattcttccaattcgtgaacataaaatatctttccattttttggtgtcctcttcaatttcttgcatcaatgttttaagtttttattgtggagatctttcacttctttggttaattcttaggtacttagttttayctgtggstattgtaaatgggactacattgtaaaatttctttttcagtttgttcactcttggtatatggaaatgctaatgatttttgtttgttgatttcgtatcctgctactttacgaatttgtttattaggtctaatagttttttggtggagtctttaggtttttcaaaatataagatgatatcatctgcaaacaaggataatttgacttcttcttttcccatttggatcccctttatctctttctcttgtctgattgccctagctaagacttccagtactacgttgaataacagtggtgaaagtgggcgctctgtcgtgttcctgattttaggaggaaaggctttcagtttttctccattcagtgtgatactagctgtgagtctgtcgtacgtggcttttattatgttgaggtatattcctttgatagtcagttttttgaggggttttcatcatgaagggatgttaaacatttgtttttatttttcaggacaaattgaaaggatcataggctttttgtccttcattcatatgttgatgatgttgacatgctgtataacattgattgctttgcatatatcgtaacatccttgcatccctgggataaatctcacttggtcatgatgaatgatctttttaatgtgttgttgaattcagtttgctagtattttgttgaggattttccatcaatatttattagtgayattagcttgggttttctttctttctttttkttttaatgtgtctttgtctggttttggtatcaggataatacyggccttatagaatgaacttggaagtattctcttctcctttatttttttttgggaatagtttgagtaggattggtattagttcttcttgaaatgtctggtagaattcaagagtgaagccattgagtcctgggattttctttgctgggagactttttattatgctttgtctacattacttgttattggtctatttgggttttggatttctttatgattcaacctaggtaggtttttatgtgtttaggaatttgtcagtttcctctagattttccaatttattggcatatagttgcttattgtacccaccaatgatcctttgaatttcagtgatatcagttgtaatgtttccttttttatctctgattttatttatttgggtctttttttttttctaacttagatctggtctttattatttcttttctcctactaattttgggtttggtttactcttacttttctagttctttaagatgcattgttaggttatttatttcaagtttttcttttttgatgtagccttacagctatacatttccctcttagtcatgtttttgctgtatctcatgtttctgctgcatgttgtgtatccattaccacttgtttcaagaaaattttcaatttccttcttaatttcttcagtgatccacaggtcattcaggagcatattgtttaattccatgcatttgtatagtttccaaagtttctcttattgatttctagttttagtccattgtagttcaagaagatgcttgatattatttgaatttttttgaatgttttaagagttgttttgtgacctaacatatggtctatccttgagaatgatccacatgttgaggaaaagaatgtgtattctgcagccattggatgaaatgttctgtaaatatccactagattcatttggtctatagtacagattaagtcaatgtttctttgttgattttctgtctggaagatctgtccaatgcagaaagtggggtgttgaagtctccaggtattatcgtattgtggtctgtctctctctttagctctaataatatttgctttacctatctgggtgctccagtattgggtgcttacatatttacaactgttatatcctcttgctgaattgacccctttatcattatatctttgtttcttcttatagtttatgacttgaaatctattttgtctgatataagtatagcaacttctgctcttttttggtttccattggcatggaatatctttttccatctctttattttcagtctacgtgtgtcttcctaagtgaagtgtgttttttgtaacagatcattaggtcttttttttttttaaatcaattcagctactctgtgccttttgattggagatttttgtgcatttacattcaatgttattattgataaagactcactatggtcattttgatattttggttttgtggttgttttgtgatcttctattccttctttccttccttcctgtcttcctcttagtgaaggaaggtaattttctctggtgatatgatttgatttcttgctttttattttatgtatatccattgtatgttttttgatttgagttaccatgagattgcaaatactatctcataactcattattttaagctgataatactgtttgcataaatgaatgggcaaaacaaaaactaatcaaaacccccatcttaactttgtccccctgctttttaacttttttttctatttgtattttattatactgtctatgtcttgaaaagttgttgtagttatttttattggttcatcatttagtgtttctacttaagtgtagtttgtacaccacaataacagtgctataatattctatttttctgtgtacttactattaccagtgagttctgttccttcagatgacttcttattgctcattaatatcctcttctttctgattgaagtactccctttagcatttcttgtaggacaggtcttgtgttgatgaaatccctcagcttctgtttttctgggaaagtcttcacttctccctcatatttgaaggatatttttgctggatatattmcaggttaaaagttttttccttcagcactgtaaatatgtcatgacaccctctcctggcctgtaaggtttctactgaatagtctactgccagatgtattagggctccattgaatgttatttgtttattttctcttgctgcttttaggattctttctttatccttaacctttgggagtttaattattaaatgtcttgaggtagtcttctttggcttaaatctggttggtgttttataaccatcttgtacttagatattaatatttttctctagatttggggagttctctgttattatccttttgcataaactttctaccccatctctttctctgccttctttttaaggccaataactcttagattttccgctttggggctattttctagatcctgtaagtgtscttcattattttatattcttttttcttttgtctctcctgagtgtgtgttttccaatagcttgtcttcaagctcagtaattcttccttcggcatgatcaattctgctattaaaagactctgatgcattcttcagtatgtcattgcattttttcaactccaaaatttctgcttggttctttttgtttggatctgtttgttaaatttatctaacagaatcctaaatttcttctctgtgtcatcttgaatatctttgaatttcctcaacacagctattttgaattccttgtctgaaaagtcacatatctctatttctccaggattggtacctggtaactaacttacttttttttttttttttttggtgagttcatgttttcctggatggtcttgatgcttgacgtctgggcattgaaaagttaggtattgcggtcttcacagtctgggcttatttatagctatcctgttttggaaggcttttcagatattcraaaggacttgggtattgttgtctaagctgtatctgcactgggagcactgcaagcccagtaatgctgagattcttgcagagtcatagaggtactgccttgttggtcaattggtgagtctgattccaggctatgctcttagccagtatattacctgttgatctataagcaggataaagaaagtctgaaatggtagcaaagggaaaatttatttttactgaataagtcaaaaaaataataagtcaggaagccaaaaagaaactgctaaataccccccaccccaaacaaagaaaagcgctacaaatctataataaatattcacagagagataagagaataaacataaaagaaccaaatagtataaaaaaaggaacagtcagaggaaaggaaagttacaataactaaagtgaaatattcacaatttcggaagatagagtcaaggacatttctcaggaaatagaactaagcgacagagtaggaaaaaatgaacaaaaagataaagaactaagagaatccactgggagrcattatagatgactggctggaattacatcagaaaaccaagagaaaacagagagaagatactgttaaagaagtaacacataaaaagtttttagtgcagaaagacataggtctctaaattgaaatttcctgggaaaattgataaaaaaaaaaaaagcattaaagtatatccacataaaatttcatatcaccagagataaagattcaaaaatgttcagagattggaggccaataggtcacasgcaaatgactagaaattcagatgcatcaagattttcaaagcaacataagactctggaggcgatagagacatgacctccctgttctgaaygaaaagggttttcaacaaagcaaactcataatcaagcttgatgatagaattttcagatatgcaagaactaaaaaatatacctttcatatgcttcccrgaaattactagaagatgcaaactctaacagtgatgaggaaaacaagacaaagagctaaggaaagaggttgaacataaaaaaggagtaacaggaagtgtcaggccaagacaatatgtggtccagattggagcaaatggatggatggaggatggaagagtgaatgtctccagaaagggaaataaaattaatttcagatgaagtcagataaatctgggttatttaatgttctgaacatttygaaaataatattcttttgacagatcttgtaatacttgaagaaaattaggaagtatataaaaatcaagyatgcaaaatgagaggcaattatcaatgctgagaaaaacaagttgtattagaaaagtaatcatagcagatgtgggacttgcagtgaacagtatttatgtgatcattaattagtggggaagaaggtatgtttgtggaggggagttaaattctaatcaacatgaggtgactggcagtccctgctaaaaccagtctttcaaaggagtttccaaatcaagactttttccttgtgactagtgaattatttctcccaatccttcgtggaaacaacagattatttggttttccttttgtcctcttgttgtatttctatttttttacaagttaccttggctttctttaaaaaaagattgccttactgaaagtgytttttctttcacttgtacctcatatgcatactatctattttaatccatgaatggttacatttaaggcctaaaatcttaaagttgtgtttctctaatcatgcacattatgaacaatgcagtatctcctgatcccacatacaagggagaaaattagcattcatctcttcccctcccacccatgtcccacgcctggctctcgtgtccaggactctttggtggggcctggggcgtccaagcactcactgtgccctagcaggccttgcctcagcccggcagcaacagcatcgaccacgggcttgtcagagatgcagcatctcaggtccgttcgcatctgctgatctggagcctgcattttaccaaggtccgcggatgcayactgaagcttgggaagcggtgctacagcrggmaggctgttcacttgggttggtgaagatcctagatcttaaagtcaaaggtcaggaagtggaggaaggacagggatctttttagctctcagtcaagaagtctaccttccttccggggtgaaaacgatgagtagcagctgattctttctcaaatatgatgtcatagtttgcagtacacagtgggccatgactattaaatttttgttgtgaatattttaatcattataaattgatcctctttatacacttgaaaactctttacaattaaattttacttttctaaaattaaaatcackacttctgcttttttatttattccaatatatctttgaacatatttaagtattattttgttttttagagagtttacatacagattttgttttttcagttgtaaagttaattttcgtagctgatctattggatgttacattcttcatcctattttgtgcttttggttcttagcccttccttgctgtctaytcagcttttgtccttttaatagacagactctgtttaactacctttatcttctgcattgactttgagggtgtagaccccagttttcctgggatttttaagagtcattactgcaaaattatgattcaacacttcatgtggctttgaaactcttttccctccactatttagacataaccctaggtttagtgctgactgcttttcacaytacactgtcctcctcacttggggactctcactgtgctttacttgctgtgagctggagcacagccccaktcaccttctggatgaaggacagagggatactgcagtcactgcgtccacagtgtttttcttcacatgaccggggtaaaatcacgcccaagatgtttctccccawttctctaaaaggtgctctgttgtctggaatttactcttgcaaaaaatcttagcctcagtattatttgttgttgtattgctttttcccctgtccagacgtttgaaggatttttctttatgttataatttaaagtttttggcaaattgtgcctccacctgagtctgttttcactgattttctttagattgctgcaagtattttctacctgcgtaataagagataatttttcctcctagaacatctcttcgaatcacctctgccattatgattgctattcctgtcgctctgatagttcctcttgggaacactaacttttaactcttttgtgttctatgtcctccaatttaatatcttttctggccttatttttayacacttgtcttttctgagagagcgccttaacgttgcatttataattgatcttgtgcagttgattattctctatacttctatggagattttagttctactacggcattttcagtttgccttgtcctgttcaaaatrgacttctttttatttgagtctaatctcctcttctggatttctgcttctgtttctcagaggccacgtcttcctgaatcctgaggatgtcaaacaagtttctacaagtttcttctggttcatatgccagatgttgttgaggtattcttttcctccgattgtgcacartacttccttccctgtgtgtagagatttttcccatggccccctgtggctgcagtgttgctactgttctcacttttattgaggagagagattgttagagtttgctggttgctcttggcccctctctgccctcttgaccgctgtttyggaagaatccccttctgaatttcgtatgcggagattccagacactgcctcctggtttcactctgatggattgagaaggatttgtcttttcctactggatggagtaaatgtgaatctgtaatccccgatccagacaagtaagagggctgctcttttctcagcctcccctatgaggttttgctgctgctcccagcaatcaatgctccatcaccaaccctgagcactttatgtcagcatgattttggagtttctgacccaaaataactcaagatggaaatcagaarggtgggagggaaaagggagcagcagtagttgtgccagaaaacaacgtcagtgaaataggtgtccgagacccacggtgtgggttattccagaacttgggggcttgaaccaagcagcagtaggagaaagaacggtggattcttgtttgttatcatattagaaaccccagagccactaaatgtgtcaatttctcattccagtattatcagccttctaatttgttgaaatcaacccagtttccagaaatacaagggcagctaatcccagctcactgcctcacagtgagtttatacattttgctttgttttcatagatattagttagaattaaaaaaaaaaaaaacttctagtctgcttgctggtaatggtgaggttaatttttgcccctggatagagtcaaaattatactgggtatggtgtgaaaataaaatacacagagatgttatacgttatgtcaattatgtacatcagcccttttctagatcctgttagcctcctttcagaattcctcctcaaagattttctttatgcacataatatttttcacactgtgctggaactgtgcatgaccttacataagtaatcagcatttcttcttgagaaaagtctgcttttagtgacataaacagattgagaaggaaggagcagttacactcaggatcagtatcgaatagcagaagcgctgaaagccacgcaatggcatcaaccaagataaattgtcattgcttccggaaccctaaatcatcaaattcatatctagttaattttccctgacaaatcatgtttactgagttcttgataacgttttcgctcatcggcagatgacctctagcatgtgtgtactgtaaatttagtcacatgactcctcgctttactcatttatgtatcttcaaaatacagatcaaacaaaattgaaaatcactttaccttggcctgcaaaactccagtgtggtatgctttaattgcagacaacataatcaaaatattacttagcaattccttttctgcctatcagtgtcttccagtggactctgagggagagacccctgagaaggcagtgatcccaacatgaagcattgatttaaaaaaaaaaaaaggatatatgtccgaatattgctgctattctgccagaggaaaagaacaaatagttcctgcggagaatattctgggcctttcttgtttatcagagaaagctacatatcatcctttagaaatgtagcagttsaagtagaatttaatgtattcaaaaatgtgacccatctgagagaagaaattacttttggaaaaggttttaacgtggctcgggacgctacaccctccctgacagcctttaaggagcctgccttcctgcagctgtggatgaggcaagcaagctgctatttaataagccccttttcagagtctcttttctctctgtgttactcgcacatcaggtagcaccgtcctttggtttggtttcactgtctgtcatggtggaaatgtggtgtggtcacttacagatctctacggagacctcaaagatctgagggagagtttcagagttgatttgatgcaagcagtaagagcagaactgtggaaatctagcattttgatcatgatacatttgaatgaatggataaattcgaatgaatgaataaaaatggtgaccttggatacgattaaataatccagactctgggagatgaccctatgttgagctagtttgttcttgttctgatgaaagcacacggcaagagctcacctgagccagtgagggtggggttccccaacctagaagactagctaagcgtcctgtcaatcattttgggaagctgcccatcctggagtggaagatgaggtagaacttggggcggggggagcaggggcctcctcacccctcgaagccatgggcagttgggcctggatccagggggtgaaagtgcctggagcagctctggctgagaaaaaggtagggtctccctcatctgcagaatgagtgttcagaggaggcactgatcctctgcttttaattagtagtagcagtagcagcagtagcaatgcaggacaggtgggcaattctggggctggggaggggatgtgctggtgagggtgagaggggccagccctgccaccttgacttgaggagaggccatcctcttcctgagcctgtaccagtggatgccaggcatgcccatcagggtggctctactggcagcaaggtaagaatggccagagagtgttctggaaccccagaaggctgtcacgtgggacaacctcaggttcttagacaaccagtccaaggggccgtgcaatgttgtgagcaaggtgcatgcagaaaggaaggacaatctcatttcacagacaaagccaatcacagggctaccccagagtcacccagcttacctattgtagattaaaagtttcaggtatttaaaaacattcttcttttcacctatgcagctgggcttcccttccttaaaattatgaatggtactacctcaaayatactcaacataacggtgtttataatttaaaaattagagatgccatttacaaaaaaaagacttggaagttagcagcagcaggtaaagacctctggatgcgtaagttaatgttaatgcttatgtcattactgtgaggcattttaaattagcacaaaccccatggaatttggtttatttatgtggctaagccatagtgaaatattgatgatgggatatatttttggagatttgggttgtctggcctcctaagtcaatttatgaaaattcctgcaaaactggggatcacctcagtctgtcatggtttattgcttaattagcaagttgtcaaaaagcaacaccgtataaactgagtgatgctttttcaccggttcacttactttttatcgggataatgagctgtggaaggacaggtaggatcttgttcccaccgtgttccagcatgtcgtggattccttgccgagcaaaaaactcatagggaaatgtcatttcacaaagcccatcaaaaaacagaggcagataatgatggtaatccagcttctcaatttctacctgaaagtaaagaaagaagagacgccatgtgaaaacagcattyrggcagagcacggcagacaagctatgcagctgtcacccactccagaggggcacgctctttagaacttcaggaagacttccttaacccatccccctaatgacctgaagtatgtcatcatgtcctgaatcaatgagcaatgaggttaaaatcatggacctttagaccttaacagttaaatctcccatccacatacaatgcacattgacagcatattaataatttgctacctttttgttaattcgttaccatttggctcaagtatgatattgaataggattcaagaagcctctagaatgtttgctgaaaagatccacgtaaaaataaaatgaaagaaataaaaacagctgaaaaagattggtgcccaaggttctaagaagaaagctacagaagtgcatgttcatacgttcctgggaggcatatgccttctttggggcaaacaggagagtgagaggtcaagcatgattcctggcttgttcactggagcctggatgacaggtagaacattcagggcatcaagaagaaatggagaggacaaagagtgggctgaacctgggaccactgacacctcaaagtcaaaacatcccaacctccctttgcctgcttcttctgggagcggagacaaatctctttcccacatctccacccatcaccctcagtgtccctccatgtcccctgtccagaccttggcagtagcatccagcagcaccagggaatgggaactaaaactctggggttgagaaaagagattgtgagttgggaatcatctacctgtagaagatttggtcttgcttgagccctccactgtccagggtacctgtggcctgagctactgccagcaaggcggcagagctgaaggtgagagtgtacatggaaatgagcccacagactcagactgcaggtwtaatacatctacacagagcaagggatggggccttcccagcaagaggtgataatttccttggttttcaaatccttatgaatgcacccagcttctagttaccaccttctaatcaagtgaggagcccatcaagacctttgagaaactcccttttacattagtaggagattaacaaattttttattgataaattacatatatacatattccctatgtagagacaaattatacatatatttattccctatatatagtccatacattatatatatattaatatatatttatgggataaaaagtgatattctgattttgtaaccgaaaattgtaataccacttagtgggagatttttgtaccttccagctctctctcagcattctggagtttcacgccacatgcctgcctacccctggatgtgagtaactcgtaatgaacccatcatcttcctgagtgtttactgtgggttggggtgaatcaaatttcctacagttccccaagcagcaggcctgtctacagtctgctcacagacttcccatttacaatgcatgttcaggtagaagctggggatgtagagggagtccagccaatcaaggaagtaagcagggaagaggcaatgtccagatcctctgttggaactggagcatagaaaacaaatccctaatgtaggtttatacagacatcagttttactttactttccttttatatttataaaatttatgttattcagcatacatttatggaatatatattttctcagagatttatgtgcatttggaaatgttttaaaacattattttgtacaatttgaaataattattttttcttaggtcctaaaggcccaatgtttttatggataattttacattgtatactaatttcataataaaaatgtcatctatactatatttttaaaacatttttggtatgttttgctaattcttttagcttattgtcacacttttacaagtgtttcttgtaagcacaaaattaaattttgtattttactatggcctaagatgttgtattttaatacattaagtcattgacatttatggtctcatttaacttctgtcatcttattttttggtcttyggttgttgttttttatttacttttttctttgtattttgtagttttgttatgtacactatgttctatttacttttttgtaatgactttaagctaagacatcctgttcaaacattttattgcagctaccttaaacatttccaaacttaaatttatcttagtgagagataaataaagttaaaagtcttctactaagactgttgacatgtctatttttccttggaattctattttttctttatatgttttggggcaataatactaatatcaacaacagcaacaataataacaccartgtttgtgatgccagacactgttgtgaacactgtgctagttcatttgatcctcaagcgactggaagaagtaggcattattaatatcctaattttcaatatgaggaaattgaaacagagagagatttaataacttgcctaaggtctgcagctagtcagtgctggaattaggtttcaagcccaagcagtctggctatatgacacggcactgcctctcaggctttgttgtttggcacactgaggttcagcattattataacctcctggtaaattgttgaatttacccttatgtccttatcctctttatcattattgatgcagtttgtctgattctaatataatattattattgctataactggtttatttatcacatcttttctatcctgctgctttcttccttcctctgacattagattttaagtgtctctctgaagtaacttacagatttgtttttcccacttttcttttataatgtgccttcaaacaataaatactgagtacctgcataattcctattctcaaaattttgaaaaacaaaagttatgagaaaagagaaaaaagacggagcaattgaaagacaaaagtcaaatgaaagattgagcgagtgagagagattgagaaagagaaaagaaattatctctacatcttcatatcctccaagatcactgaccacagcagttctttcctacaaaaaattatcttctgtttagttctttttttttaacttttttttttttttttgagatggagttttgctcttgttgcccagcctggagggcagtggtgcgatctcggctcactgcaacctctgcctcccgggttcaagcgattctcctgcctcagcctcctgagtagctgggattacaggcacgcaccaacacacccagttaattttgttttttgtttgtttgtttgttttttgagacggagtctcgctctgtcgcccaggctggagtgcagtggtgcgagctcggctcactgcaagctctgcctcccgggttcacgcgattctcccacctcagcctcccgagtagctgggaccacaggtgcctgccaccacgccyrgctaaattttttgtattttgtttagtagagacggggtttcaccgtgttagccaggagggtctcgatctcctgacctcatgatccgctcgccttggcctcccaaagtgctgggattacaggcgtgagccacagcgcctggccttaatttcgtatttttttaagtagagatttttttttttattagagatcacctggccttaggtgatccacccacctcggcctcccaaagtgatgggattacaggcatgaggaaccacggccagccttcattagttcttttyatgacctgtttgtacattatttgcaaatatctgttgtcattgcaaatatgttgccttactattagaacaacaggtagggatcaaacacctcgtctcactgccaccagagacacagatatggcttttgttcgactgattctggaactgtgtaaggagctgctggattctacggtgcccaataggcagctctcacctgacggacaaagagctgcagggcttgtggatggcagttccaaggtggatgtacgtaatcctgcttagaaggctgccactctgattgatgaagagtcaagaaaattctttttcttttgaactgtttatagcttagaggttgggtaaagtataattttgtgaacaaaatttacccttctctctacctgagttaccctaaatttggaaaccatttatgagtatttttatctgatagcaatatatttatttgcataagttcagtaagaatctgttttcttttctaacagggcataattggagaaattggttattttaccaaggcattgactggaatggcatattttcagaattgaccagactgaggaatggaggttgactttataaattctttctaggaaagactggcctagtaccttgtctaaatggttctcttacaaggtttctgacctatggtaagtaaagaatgtcatttactaacaggcctgggaaccttaagatattttgggaattcaagaagagaggaatttgtataggtattacaagcatagtctaatggtgaatccttggcttggctcctagccttgaggcttttaaaaagcagaatccacaatttctcataaaagttccagcaaagacaacttaaaaagagcctaccagtctggacaacatattgagaccctgtctctacaaaaaataaaaaatgagccagagttgtggcacacacctgtggtcccagctatttgggaggctgagatgggaggattgcttgagctcaggaggtccaggctgtagtgagccaagattgcgcaactgcactctagcctgggtgacagagtgagactctgtctggaaaaaaaataaataagcagctcaggctgatcactattcttgccatattttatgcaaataaccaggccaagtataatgagaccaaaatttattttgaaaataaattggtcctattatgatttatccttggcagaaacggggaaactagagaccaaaaaatttggatactagccctcaccattgtttttgagtttttattatttacctacaatttgggctaaatcctgaattatttgctgtctgcaagtctaaagaggaaccaggttttaattttcttcatgatacttttagttggctctttaatggaataggtacttttttgttgttgttctgggatacaaattctcttttgactgtaatccttgagtgcaaattattaatgttatatatctcacgctgttttactcctgagaaaaccgaggtcattgtattctgaagactagaggtgcttcaacagcctgtgaacctccctcattaggaatcccactgggcctgatctattttccattgccaaagcactgctgctaaagtttgacaacatcaagcgctctctctaaggctcagggatggtcatggaagaggagggcgtgagagactgtaagagctgcattagaggggtggagcatggaagccaaagcaactccatcctgggtgctaatctgccatgttggcttctgattaacctcagttccgggaatgcctctgagattttcagtttatctattcctcctcgtataagagcacctacttaccataaatcccaccgtgagggcaaattcatgaccactccttctgaagtgtgtgtacccctccctgacagcacataagtcctgcttctggggggtaatggttcaggatctaccatatcatctcatcactgccagggacacagacatggcttctgtttataagtccctgttaaaagtttcttttctaagcaactagatttgtatgtctctttctttagtctctcagcttcctccaacttaggggtaggttgacacagacctgcccacaatgaaacaatggctgaataatgttctattgaatgcacttaacacatttcatttctccactaattcgcagatggacatttgggttgcttctgccatttggttattgtgaataatgctgctatgaatattactggacaagtttttgtttgaacacctggtttcaattcctttgaatatatacctaggagtgcaaatgctgtgttgtatgggaaactgccaaactgctttccagaatagctgtaccattttatattcccaccagccatgtatgagggctccagtcactccacattctcgtcaacacttgttattttctgtagtcttcattgtggccatgctaatgtgygtgaaatggtatttcctgtggtttagattttcattttcctaacaagtaggatgtggagcatctgatacatgacacaacatgaatgaaccttgaaaacattttcctaagcgaaggaggacagtcacaaaagaccacatactgtacgattccatttctatgaaacgttcggaatagacaaatccaagagacagaaagtggctgcttaagagctgggggaaaggattctgggaagtggctgcttattgggcatggggtttccatgtggggtgatgaaaaagttctggaactagatggtggtcatggtcacacygtatgagagtacttamtgccactgaagtgtacacttaaaaatggtaaaaatggtaagttttatgtgtattttacaatgataaaaatgccaaagaaaaaataaaacaataaaaaacaaataacaacaaaataatagaataacaatttgccattatattttgagacacaaacttttttaacacagtagatacagttctacttcctacaggatgattttttgtatgtaaattccttttacatatcttccagggttcctttttattataataattttgttttcagtggatgaatttggcctaggctttggtaatccctcttatattacgtttatcctcaggcgcttgtttgcgtgtgtgtgcacgtgtgtatatatgtgagtgcatgtgtgtatatgtgtgcgtgtgtgtgcgtgtgtgtgtgcatgtgtgtgtgcacacctggatatgtgtgcatgtgtgtgtcttaataatatatctgacttctctttaagtactttttctgaaaagccactgctccatttccacactatccccagtcacggctccatttccacactgtcccyggtccccgctccatttccacattattcttcatagtaaagtttttcaagagaattctttatcatcactgtccttgcttcctcattcccgttccctctttaacccactccctcaccatttcactgaagttgcttttatcaaggtcaccagtgactttctttgtgtctaatccttgaatctcctttctgttctcctcagcacagcacaattgacctggtgaagttgtacccccaacactggcaggtcaccctaattccctccctccaatccctggcctggcctgacctcgctggttctgagacagccaggggggaggcggtccttggagaaggtccaccctctccatctttcctgcccactgggaggagccacacaggttcacaccatttgccgcagggagtagcctggcccctcctcttcctgtgtggaaactgggatgcgaatggctggtgggaagccccaaaatgggatgaggatggctggtgggaagcaccctagcagggactctggcttagcgagagtccctgtttcccctttttcttcctttttcacccaacaaaaccctgtcttactcattcaaattcaaattgtctgtgagcatgaattttcgtggccatgggacaaaaaaccctgtcttcagccgaactaaggaaaagtcccgcagyagttcctccttagggactcttcgaacgcactgtcttagcccaggctgccttaacaaaataccatggacaaggtggcttgaaaaacacacatgtattttcccacagttctggaggctggaagttggagatcagggtgtcagcataktcgagttctgtggagggagagatcgcttcctggcttgtagacagtcaccttctcaaaatgtcctcacagggcccttcctctgtgtgcatgcggagagatcgctggtctttctcttcttataaagacaatgggcctrctgggttaaggccccaccattatgatctcacttcacgtttattacctccatacaggccccatctccaaatacggtcacgctgggatttgcccaacataatgaattggaggggagcggtggggcacgattcagtccactgcacaccgttctcctctccagacctctcactggcaagtcctttcatctcaatttcagttctgtgaggccgtcctactattgtctatcaccctgtttgatttttttgtagcctcatcatttattcattacagtttcttaagttcttttttttagggagcttgtcattgcctagaagagtgctgggcacacaataggtaggtattcagtaggcatgcattgaattttaattctgaccttttgaatctgccctgtgttaacttccttgagagggctgtcctgctaaggaacaatgaccagatgatgagtggctgtgcctaggatagagggagggcagctgcaccgagggtcggctgtttaacactgactctgtaggtgaaggagtatgtaagtttctataaatttatgtattctacaactttatgtattctgtaaataaaatactatttttctcttattagcattgcagtgattatttacatttcagaaattttatgactattataatagacaagataggcttccgggtgcttgtgttttccctcatttcactagaaatcatttagggtttaattggctattctgagttttttggtagttttaaaattgatatctaatagttgtacatttaaaaaattccctttacttttaaaactctggcaacagttctgttttttacagtatcatcaaatgcaaacatattaaaatctgtccatataaataacaataagaggtccttatttaaaaaaagatactgagaataatttaagattaaagccaaaatttgaagaagagataaatgaggaaatcccttatctatatgtatgtgtgtgtctgtcacrctgtgactgctattcctaagagttcttctcaattgctggctccttttgttaatttagattcacaaatagtcatttttaaggtttatgtgacaacaaaccttatttcagttaaggtatttcagtaaatttttcattcttaggataactagtttatttaacataaaatagtagttttcaaatttaggaatctttctttaaagtttaagaaatccagaattaaaagaaaattgctttcagagggacacagaacaaggaatgttttagacatatcagttaaaattatatgtgaatacctggattacattgatattagctccagaaatgtgaagcgtttttactcataaaatatatctttaaaattcatgttttataactttttaaagatcacatagtacctactatgtgacctttaaatcttacaatgacctttggtcagcagcaataaaattctaacttgacctagcctgtcaaatatttatccccataacaaatgtgtaagacagtgatactatattgaaacatcagaaacacagtgaggttgtattagtccgttttcacattactataaagaaacatctgaggctgggtaatttataaatgaaagaggtttaattgactcacatttctgcatggctggggaggcctcaggaaacttataatcatggtggaaggccaaggagaattcactcactatcagaagaatagcatggggaaaaccacccccatgatccaatcacctcccaccaggttcctccctcgacatgtggagtttacaattcgagatgagatttgggtgggggcacaaagccaaaccacatcagaggttaatgactttcatgaaaaaaactcaaatcagagacttactcttatgctttccatatccttgcttctattagcaattaaaatttcattgaaaatatctgttcttatgactgctgttataattaccaaggatcttgctcagaaacacaaattaatctgaaaaartataattatctattaatatattatgacctcctttagacttattgtgacgtttctaaaataaagacttaacagtgtttctcaacccttgaggcagctattgagttattrcaagaggtcttacaaattagacaggcattaatcactgtctacagaaaatatatataatatattttacaagtagatgtactattatttttcaaatacgtgtgatgcagttgtgatgaataactaaaaataatttctcaccttatattttccagtgatactgaatatacaactaaaatcatgtaatatagcacatgagattcttaatgctaaaattaagactttttaacatgaaaaatgctcttaagggcagaaatgaagcamatttcaggcaagatggcagacaagactgaaacggattcatccatcaactgctacagacttaaaaaacaaaatatgcccaatgcaaagctgagctcaggaaatcctcagatgctagagataaagacaaaatccagttgcagaagtgagttccaggtgatgccaggagaccccaggaagtatcagattaggtcacaaaactaggaataaggttttaatgtcttcagaaaaacagagcatttggtgagagaagggaactaatccgagactcccgcatwcaaccaggacacttgaagggctgcctcacctgtgaaaaagaaactggaaaaatctcttcaaatctgtctgtggaaacagaaagacagcctggtgtttgacaaagctctcggtgggacaaacctcctctgagaaatggaaacctaggaaatcaaaagcccagaaattaagggaaagcattagtctcagataaygaaaaggaaacccttggggcccgggccaaagcaaatgtaaaaacatgaacacttgcataatctcgtacatgggactcacagaaaaygcaacccctaatatagatgagctcgcaatgaaaaattatccaccactgtggcaatgcagtcaccaaaaggaagactcaacagaccaatgagcatagacacgagctgtggaggtaacaactggaaacagaagaataaaatctcaagataaataatttaaaaatacttaacatggaaaaatatttcacttaaaaaatataacttttagaaaaaatatagtatcattaacttaaaaattcagtagctaggttgaacaataaattcaccacaaatgaaaagagaattagagatctggatcacggagctggaagatgaatgcagaggcagcacagggaggtaaagcaatggaaaagatcgcagggagtcccaagacccgggatgctccctcgagtcactcacaggagctccagaggaaaggacagatcatggggaaaggcaatatttgaagcaacaatgactgggaatttttcataattaagaaagatgtaaatattcagagggaaaatgcagatctagacacttttcagaaacactatgaaactccaaagtcaaggaaaagattaaaagcaactagaaacaaaagacagtttacaataaaagatccaaattagatggaaattacatgtctcattaataaaatagaggtcagagaaaagggtaaaaaatgttcaacatgctcaaagaacaaaagttattcatctacaatacaacttagtaaaattatcattcaaaaataaagacaaatcaaatgtatttgactaagactgaagggtatttttttaacccctggatcatcaactttaccaaaggataaaatttattaaaaagtgagttgaacacaggacaaagagatgagatgaaagagctaatagtagataaattgttgaatgaattaagactaaataagcagtgactattatgagttttttaaatcatcaatatggcgggtttataaagcggggctaagatactagaaaggaatagcaaggaagatgagaggaaggtaatctgggtcaaaggtaatatctctgccttgaaagagatgaggataaagttattgataccctttagacttatcaaataattaagcatattaaagtttaagaatacctattctgaaaaataaaatgaactttcaagagaatagagaagagggaatgaaaaaaacagtaccagctttatcttgaaggctgggtaaatatcctcctggtcccaggaaaaaatatggagagaaaaacttacgtagaatggatccaaatatgtaagcaataataaaaagtgtttgtgaattaaattctcttattaaaagagattatcataaaagggaaaatgtccttcagttctgaattagtttataaagtgaacactcaaaatataatgacaatgaaaggtggaaaataaaggtgaagttttaaaaaaaaagyatcttgtaggataaattcctggaagaggaactgttttatcaatgggtatacatattggtcattttgatacatattgccaagtcgtgcttcacagagatggtaccaaattacatttctataaaaaataaatgactacctgtttttctaatgtctgtccaaagagaatgctatcagagtttgatttttaacaatattatagttaaaaatggtatttcagggttgttttatttctcttactatgagaataattaccttttaaagctatttttgaaggtcatttgtatatccttttctgagaattgtattttcttatcttttgccattttttctctactgaggcattggcctatttcaagagatcttttatattagagaaattagtcttgagtgtgataggagtttcaattttttcttttgccatgacaatttaaaaatgtttttgaattcgttaatgttttatagatgctgatttttgagtctcattgggaatatttcccccattgtgtagcataaagaatagaaacagtcagaaaagagcattaataatggtttattctcatacttttatgatttattttctttacatttaaatcactagtctatttgtaacttttcctggtataaaatgtaaggtaagtttccaactgtggattgtttttaggtcatatccagttgtcctattgtatttattgactagttctccagtgattggagatttaaccttattataaatttctatttcttgactttctattctgtttcactggcctgtcttccttatttgtgaacagtatcattttgatctgattatcacgactgtttaaatgattttaatatttggtaggctggtccytttacattactttcctaggtttattattattattaccataatttgcttactttttcatataaagtttacacataaattttacatgtaagtttgactcartggacctayatagaaccttgcattcaacagttagataaaacacattctttacaagcatataaggactattttggaaagctgaataagcactaagccagaaagcaagccttcagaaattccaaagtatctatgtctatgtcatacatgtcacattttctgcagaaagttaaataaaataacaaatcattaactaaaagatagccaaacttttaacacccccatatatttggaaatttaagaacactttaaaatcacccagcgatcaagagaaaaccattatagaaagaacaacacattaggaattgaatcctaatgaaattacttaacctccaaatagtagaaaatttcccctttgtactgactctttttaagaatcgaaaagaggaaaagctacacagctgactgtctgaggccaacataaccttaatacgaaaaccacagagttcaatctcaccgaggccgacataaccttaacactgaaaccatagagttcaatctcactgaaatccaaacaaataggcacattgaatgatggccaaataggccatatcacagaaatgccagaatttttcaacatcatgtttacatttttagattaaaggaagacaaataagataattttaatagatgcagataaaacttttgataaaatttcttcactaaaaaataaaaacgcttagcagaaacctatagcagatcccatacttcatggtgaactttaggattattcccattttggttagaaaggagataagaagaaagttattatttttattcaaccctacgctggaggttctagctaatgtggtaacacaagaaaagtacatgcaaagattggaagggaaaaaamagaactgtttatatttgaggatgatatggctgtctacacagcacaccctgagagtctatagacatgctcaattaaaagctctgtaaaaacattgttgcataaaaaaatcaatgcactaaaaataatagcatttccatacacgattaaaaacaactttgaaaatattttttaaaagttcacaatagcaagagatgaagtaaaacaaacactttaagataataaaattarcaatcactatgtaagaccttatggagacaattacaaaagatgattgacaaatataaacggaagacagaaataattttttatgaataaatgcatatattgattttgcttatggttgggtagactaaaacttagatgggtgatgattctgcccaaattaatcatcatgtctatggctggctgttttactacaaatgctgatggctctgtctagctggaagatattaattactgagtaacaaatctggatttgagaatggagaatcaaattattttatggaataaccttattttaagtttctgtcaaaaaggctaaaagacagctaaaggtcagttgtaagcagatctcaaatttatgcacacttaacctttattatccaggaattgtatgttcccgacggtaacagtcaaagaatgatactttcaagtgtaataaataagaaagaaataatcccttgtttcatagcttctaacattcccactcaacctcttgtcatatagttaaaggaatttcctaaaactttaaaaactgcatttattttaaccatagggagataaaaaggagtaaaatacatattgaaatacattgtcaaagcttctctttccttgatcacatatctgtataatgctaaaaatagtatactttggtcagaggtagagggagaataactgtacttcaggataacaggtgttcataaataacgaatcaagaaatatatgataggcctgaaaagtcttggcagagttttagaaattgagactgttagaaacagattatttgtggctttcaccactggtattaattgtaaaacatggccctattttacaaaaactctccttgaataagataatgtactgcgaattttaatacactcgaccaaataagtagaattaaataggtcaggaaaggattatttcaggtgaagttaatgccaggaggcaattttaagaagaaattgttatgatagtggcactgttgtctcttacatcagcatacaattttgctatgcatatatttttcagagatttgttccaatttgttaaagctctttatactgaggatgctttatatttcttaatcaaattttgctaaagcaaaaaatatatatactgaatagctacaatagttatagcattgtgctaaatgttagggagagatggggccagttagtgggtaggaaaaaaaaaggaaagtgtgttagagaaatataacttatttccttggattcatattttagtatgatcagcttgtcgaaagaatgaatcaatgacactctgtcttcgtggagagcagcctgggtgtggaatcaggcacccccgggttcaaagccatcactggtatgtagtgaaatccaccagttttcaaatgctgtgactggtggaaatgtaacggagctcctctgggcattattagttcatcatttgcaaaatgatacctaattcctggggttattataaggatgaaatgataccatttagcatgtgctaaatgatattaattccctttctattctctgaagaggacaatcatacaatcacaaaaagttaagtaagatttcaagtgattaagtaccaaatgaagggtacataccaaggctacgtggaaaaaagctctggttaagagaaaggagagatcattatgggctggagtcaggaaaatgtttcattgggatggggggactttgatgagccctgtgagatgaggaggggtgagtgttctgggcagaggataccccctgagtgatggcacagaggggagcacagsatagtcaagatacagtggctcgttgttagggttaaggtggcctgagttggaatgaactggcaggtgatatcagggagccaggagggagccctctctgcaggctgagtctggactggacactttaggcatcaagggaaatagagatgattgaataacaatttggtaagtatagtctgaagtgcaggctgacctgggaagatcaacgtataggagtgaacatcttggggtagaatcatcagtttgggccgggcacggtgcctcacacctgtaatcccagcagtttgggaggctgaggcgggtggatcatgaggtcaagagatcgagaccatactggccaacatggtgaaaccccgtctctactaaaaatacaaaaaggcgtggtagcgcacgcctgtagtcccagctactcgggaggctgaggcaggagaatcgcttgaacctgggaggyggaggttgcagtgaccagagatcatgccactgtactccagcctgggggacagagcgagactccatctcaaaaaaaaaaaaaaaaaaagctgggcgcagtagctcacacctgtaatcccagcactttgggaggccaargtgggtggatcaagaggtcaggagatcaagaccatcctggctaacatggtgaaacccatctctactaaaaatataaaaaattagccgggcgtgttgacgggcgcctgtaatcccagctacttgggagsctgaggcaraagaatgggaggatgaggcaggtaactcaaataatagaaataacagagggtttctttgcagttgttcatggcttacattcattgattccctcctgttacccaggcactgttcctagctttctctattcctgtgaggtgggtgtggttgttgccctatctacaggtgagaaggcagaagcccagaggggctgggtggctccctcgtgcccctctgctggccacagaggagggaagacctgagccagtgcccttgccaccctccaggtacctcccccttcctgagaacccacaacacaccttggcaccttccctacacacaccaaaagaygggcaacagagttgctggcatctccccaaaaccttcgcaacggctgctccctccacgcctacctccttgagatactccaggcaccaaaattacctctcctttcttttcactttacccagttaaacagctgaatgctttcattcattggagaggagcaaccagattatctaattatagttatactgcaagatacaaacagcttgtaagctgaaacgttccaaaaggtattttgtttctaaaaagaaatgaaataaaaaccttaatggataaatccatgatgacatttttaacaacagggtcttcccagggctcctcacctgctcatgacacctctcccgctctccccatgttgctctccaggcgaactcacaaagagtgggactcaccgacctgagggtttgccagcacactcgtagcccgcgggactagagtatttgtgagagaggagtgtggtctttgtaagtgacgatgataagtctctcttcataagctagttcaagttcctttgtaaatacttccatcacatttttttaagaatttttatattgacactaaacaactagcatcacaacttgtgtttcataatttatggacctgattgcatatactctatcaggtttttgtagttttaataattgtcagccaggtgctatgattcatgtctgtaattccaacaatttggaaggccaaggcaggaggattgcttgagcccaggaattagaraccagcctgggaaacagggagaacccttctctacaaaaaaatttaaaaatcagacgggcctggtgatatgcacctgtggtcccagctactcaggaggctgaggtgggaggatcgcatgaacccaggagccaaggcttcagtgaaccgtgatcgtgccactgcactccagcctgggtgacagagtgagaccctgtctcaaaaaaaaaaaaaaaagtcatctgtttcccatattataggcaagctgaacatccaacccttattttttcttagtgcaaagctcatgaacaccctgttatcttgcgtgattctctgagctccctgactcccaggtcttcctcttcctgttctctaactgaggacagccctcaaagtttccctcaaggacctccttgctttacccgctcatgctacctatggtctttatccaaatgactctgcaatgtgcctcgccacttctgactcttccaaaacccagaacgtgtatctgaaatctttgggcacatccacttagaggcctcataaactgcatctcaaacagaacttayggcctataatcctggcctccgcacaagctctctgattccgacaatgtccatgtcgttctactgtcccaaatgctggaaacctatagccaaaacacatattccctcgtgttattctccatgttcagttcatcagccagttctggaaagtattcttccattatttcttcacatataattccttctcctgtcattttcagcctgccttgtaggtcaataccaccattcagacccctgtggcttcatacttgaacttctgctatagtctcgaactgatgattttttttttttagacggagtcttgctctgtcacccaggctggagtgcagtggtgcgatctcggctcactgcaagctccgcctcctgggttcaagcagttctcctgcctcagccccccaagtagttgactacaggctcaccaccatgcccacctagtttttgtatttttggtagagatggggttttgtcatgttggccaggttggtctcaaactcctgacctcaaaatgatctgccctcactagcatcccaaaatgctgggtttacaggcgtgagccactgtgtctggctcactgtattctttaaattttactttgtatagaaaaaaattctttttgtatgccaacattttctttcttaaactctcttggtgctcctgtcactttgtttacagtgattgaagaacagaagtcattcgtgaaggacacagcacacacagcccagagagctcgcaggttaaaactgcacatggagcaatgtctgccagccattcagggtacttcaaaataggtcagaatacgtttccagaaagtgacaccttctttttgggtttgcgtataataataaatctaggggataagaacataaaagactggaaacttcttttgtattacaataatgtacttctaaatgcattttgggtacagacaattccatgtttatgcaatgactgtagatacatatataagctgattaaataacaggatgtaaaatttattgataatcacatttatcaactaaaccttgacaagtttttaatgaaaaattattatctgtgtagtagaatctctgctttcatagtttacccgtaggccactcatctaagtgtgcctttttttctctctctctttttttttttttacagcaaacacagtattcacaatcaagttatttagaccttttagattgtatacaaatgacatagaaaaatgtacagccagtccactgggttgtaattttagaaacaaacatctcaagtcataataataaagtagagttttaaaaagttactaggttttctttatttgccataagaaagactgaacttcttagtatgtagtttgaagagtattttctttaactcattgaagcctacagagaaaattcaaatccacagagaataagagggtcattctccagattctcattagacaatttgtggaaatggtgtctctcttctcacagtgaaccctgactsctccatgactgctggagaagaccaagcatcgctatttaggatgctcttttttctgctctttccagctctmaatttctagcatcaccaattccccttgctcctggctctctggactttgtgccctgctgccctttgttgtgatcttccatggccacttacatagagactgctatgccaccacgttccagctgcaatatgtgtggccaggcgcatggctcaagcctgtaatcccagcactttgggaagctgaggtgggcasatcacctgaggtcaggagtttgagaccagcctgaccaacatggagaaaccccrtctctactaaaaatacaaaattagccaggcgtggtggtgcatgcctgttattccagctactcaggaggctgaggcaggagaatcgcttgaacccgggaggcggaagttgcagtgagctgagatcatgccattgcactccagcctgggcaacaaaagcaaaactccaactcaaacaaaacaaaacaaaacaaaacagaatatgtttgcatgtctgtgaagacagggcagtgcttgatttgctacttaaaatcccctgcctcctatgagtcttaatcaagctgctgaatatgtggattattctgtcttcgtttgggagttaataaaatactcgagtatatggttgctgaatacccatttcattgcacaatgaacatggtcaatgcattagtccattcttacactgctataaaatactacttgagactgggtaatttacgaaggaaagagatttaactgactcacagttccacatgactggggaggactcaggaaactagcaatcatggcagaaggctaaggggaagcaaggcgtgtcttacatggtggctggagagagacagcgcagaggaaactgcacttgtaaaccatcaaatctcatgagaactccctcattatcatgagaacagcatgggagaaactggtcccatgatccaatcacctcccaccaggtccctcccttgatgtatggggattattttttatttttatttttttttgagacagagtcttgctctgtcacccaggctggagtgcagtggcacgatctcggttcactgcaagctccgcctcccaggttcacgccattctcctgcctcaccctcccaagtagctgggactacaggcgcccgccaccacgcccagctaattttttgtatttttagtagagacggggtttcaccatgttagctgggatggtctcaatctcctgacctcgtgatccgcccgccttggcctctcaaagtgctgggattacaggcatgagccactgcacccggctgatgtatggggattataatttgagataagatttgggtgaggacacagagccgaaccatattattctgccccggcccctcccaaatctcatgtccttttcacatttcaaaactaatcatgccttatcaacagtcccctaaagtcttaactaaattccagcattaactcaaaagtccaagtccaaagtctcatctgaaaaaaggcaagtaccttccacctatgagcctgtaagataaaaaacaacttagttactttcaagatacaatgggggtacaggcattgggtaaatgttcccattccaaataggagaaattagccaaaacaaaggagccacaggccccatgaaagtctgaaaactggctgggcagtcattagattttaaagctccaaaatctcctttgactccatattttacatccagggcatgctgatgaaagaggtgggctcccatggccttaggcagctccacccctgtgactctgcagggtacacttcctgcatctgctttcacgggctggccttgaatggctgtggcttttccaggcacatggcacaagctgtcagttgatctatttttctggtgcctggagaacagttgccctttcctgacaactccactaggcagtgccccagtggggactctgtatkggggctccaatgccacatttcccttctgcactgccttagcagaaattctccatgagggctctgcccttgcagcagacatctgcctggatatccagatgtttccatacagcctctgaaatctaggcagaggctcccaaacctcaactcttgtcttctgtgcacctgcgggcccaaaaccttgtggaaactgccaatgcttggggctcacacactttgaggcaatggcctgatctgtaccttgtcaccttttagccacagccggagctgaagtagctgggatgcaggatgccatatcctggggccgctcagagcagtggggccctaggcccagcccacgaaactattttccctcctagacctcaaggcctgtgatgggaagggctgccatgaagatctctgacatgtcctggagacattttctccattgtctttgctattaacatttggcatctcattacttatgcacatttctgcagccagcttgagttcctcaccagaagatgggttgttcttttctactacatggtcaggctgcaaattttccaaacttttctgctctggttcccttttaaacataagttccaatatcaaaccatctctttgtgaacacatataactgaatgctttcagaaaaagccaggccacatcttgaatgctttgctgcttagaaatttcttctgccagatgccctaaatcatctctctcaagttcaaagttccacagatctcaagggcaggggcaaaatgctgccagtctctctgctaaagcatagcaagagtgacctttgcttcagttcccaataaattcttcatctccatctgtgaccacctcagcctggacttcattgtccatatcactatcagcattttggtcaaaaccattcaacaagtctctaggaagttccaaactttcccacattttcctctcttcttctgagtcctccaaactgtttgaatctctgcctgttttccagttccaaagtcacttccatattttcaggttatctttatagcagtaccccactctgctggtaccaattttctgyattagtttgttctcacactgctataaagatactacttgaggctgggtaatttatgaaggaaagaggtttaattgactcacagttctccatcactgggaaggcctcaggaaacttacaatcatggtggaagctgaagggggagcaaggcacatcttacttggcagcaggagagagagagtgcaggggaaactgccacttttaaaccataaaatctcaataaaccatcaaatctcgtgagaactccttctctattatgagaatagcacggggtaaactgccctcatgatccaatcatcttccaccaggtccctccctcgacacacagggataacagtttgagttgagatttgagtggggacatagatctaaaccatatcagttaactaggatattttatatgcaaactcataaaatatttcatttctattcaggactagtagtataacaggcacctgaaacacacaattttatggaattgtaaacctaaagtcatgtaactgtgttctatgtgtttcctattcccataggatatgcctttgcacccagctcagagagcccttcctgtcctctctagggagaattaaaccctctgtaacagcartgcctgttgcgtagagatctatgagggcatttattatgcttatgtatttgtttatattctgtcaccctcactaacttgtgagccctggatggcatattccatccattcttttttgctctataacatttcataccaattcatgagacagaggccacctcatatttgttgacttaattaaccaatgagccagttctcaaatgacctctggatagcagtctctctcctctctggctcattcttcaggttgcagccagacactcccttctaaaaatactttgtccatgtcactcatctaccaaaggcccttcactggctgtgtgcagggtctatcctcaacgcttcactgtgttgtactccgttttccagaatctgtccccattttctttccagcttcacattctaacatttcaccctcacatcttcagttccaaatacaccaaatatttgctagatgtgtcctgctcttctgtatgcctggagtacttctccagtttttccattttgatgttcatctttttattctttatgaaatcatactgcatcctttccacataatagtggttaaggtgtacatgttggagcctaagtccaaatcctgccccagcctctgccacaaattagtgataggaccttgggcaactcacctcagtctcctcattaaaatggaaatgataacagtacatacatcagctgcctatggtaaataatgtattagttaattcatgtaaaccatctagaacactgcctggtacttgctaatcattattattgccactttactataaaagcattagaagtagtatattataattacatgaataatcattaagtgggtacccaaatatttacctattcagtaaatcttcctttgtcttcctagttggagtagggaagccrgagggagtgcctcccagacaggaaggggcagcagaggcaggagagacagggtgagtggagagcaagcggccagcagtacagtcccagaccctcccctccagggtggaaactgtgtgtgtgtgtgcatgcatgtgcacatgcgtctgtgctgtaggtaaccggagacgactgagggaaatcctggggtgcccgagtatgttgcgagaggatagttgttccctgctgtactttgtttctcagggcatgggccgaagaagtttcaggtcacagcagagcctgacagtgaccagctcaaagccagggaaaggatggcagatgcagctcaggagcactggtgtgagctgagctttgggagtcagccagcacccacaaacctgcaacagtcagcaggtgctatgaatgctaagagaacagaccaaagacaggttctaaccatggcaacctcaagaaggtatacaatgaggaggcccacagccaagggccaggtgaagaggaccttggagctcagccgaacatttgtaggagtgagaagagaggacaacgtgaggcagattgcagacactctgctctgcatcagaagccaactaagcgtctgctgacacccaggtgatgtcaactggggagagaagggagtaagggaagtgaagccctgagaccctcggacgggcttcagatgcctccttctcttctgccactcccagatttcatgagtggagatgcaatctccaaagcaagaagagaacagttacggatgacaaagagggttacagtgttttgcacattgaggcatttgttcccaacaccacatataggcacatgtacacacatgcatgcacacacacacttgtttacaattcgcctctctcgttaggtctatctttctttatttctgctttatatctggcccagaacttagcatggctcagggtctgtcacagagacctgggtgaatggatggatggatggatggatggatggatggatggatggatggatggatagctggatggataggtggatggatggatggatggataaataaaagagtaaataaattgctctttagttaattcactccaccctctctggatcaagtgtcctctactttagtgtgtggaaatttctgcaaaacacatcaagcaagtgttggtttcagacctcctggctttagtcatctgggataacaagtcattttgtgtgactttaaatccctcatttcaatccccttttgattcacaagtgagaaccagcatcccatttagggtaaaatgactcgcccaaaggcaggaggtgattgaattgcccactcatcaatcctaacttatttaggctcattgttctttgccaactgaaaggggcctttgatttcatttaggctcctgcactttcarttcatgaaatgtgtcaaacaaggcgcagcttattagttttattagatctggcctcattccagggttatgtgttatgatccacaatatgcagcctagcagtttccagaatgcggctgtgagtcagattcagtactgtctgtactcacagtgtggctctttataaggcctggaactatggaaaatgagagagctaaataattccctaatgccaatttctgatagtctatatagttttaacatatagagagataaaataagttttaaaaatccacaaaataagtttgcatgcttcaagtggttaaaccttcagtcttgcaacatactattagcattagcaattaatttgagcagatcaattcagcagatctgagcagactgacttagcaaattaaaatattagtcatgtcattacattttgattagaaataaggcaataccaaaagttattaaagttaaaatcatcgatgagagtagaaaccaagtatttcctttcattgttcccagtggtgtactggcaaatgtgtaactgtcagaggcgtttgaaccagagcaactccatcttgaataggagctgggtaaaatgaggctgagacctactgggctgcattcccaggcggttaaggcattctttgttttttttktttttttttttttgagacagagtctcactcttgtcacccaggctggagtgcaatggcatgatctcggctcacctccacctcccgagttcaagtgattctcctgcctcagcctcccaagtagctaggattacaggcacacaccaccatgcctggctcatttttgtattattattattttttgacatggagtcttactctgtcgcccaggctggagtgcagtggcatgatctaggctcactgcaacttccgcctcccaagttcaagtgattctcctgcctcagcctcccaagtagctggattacaggcacctgccaccgtacctggctaatttttgtatttttagtagagacggaatttcaccatgttggccaggctgatctcgatctcctgacctcgtgatctgcctgccttggcctcccaaagtgctgagattataggcatgagccaccgtgcccagcctaatttttgtatttctagtagagacagggttccaccatgttggccaggctggtctggaactcctgaccttaggtgatctacctgccacagcckyccaaagtgctgagtttatgggcatgagccactgtgcccggcccagttaaggcattctaagtcatgggatgagatagaaggtcaacacaagatacaggtcataaacaccttgctgataaaacagactgcagtaaagaagccggctaaaacccaccaaaaccaagatggcgatgagagtgacctctggtcatactcactgctacactcccaccagcaccatgacagtttacaagtaccatggcaacatcaggaagttaccctatatggtttgaaagggggaggcatgaataatccacgccttgttagcatatcatcaagaaataaccacaaaaatgggcaaccaacagccctcacggctgctctgtcaatggagtagcgattctttattcctttactttcttaataaacttgcttttgctttgcactgtggactcactctgaattctttcttgcgygaggtccaagaaccctctcttggggtctggattaggaccccttccctgtaacatttttctggctaccayaaagggacccaaaggctaactaggtaagtggtggtgtctggtgacatctttctggtgaacatggaagggacgatgctgaggagatcccccaacccaaaggaaagagactatggcactgattggcggccttcaggtaagtggggtgcatatagccaggtaaagaatgggattgaattagaggcccaacttaggggagttagagtctctcttaagaatgagtgggttagaggcccctcttcataaaaggcacggatgcttgaccaaccttgggttagaagcccaatttaggagggttagagtgccttctaagattyaggggtttagaggcccctcttggtaaagtccctctcattaaagtccctctcagctaagaacgggtttggtactacaggatgttaactgctattctctttggaataatctgccttgctctttgctaatagctgtgagtgacagaattaggcatgtacgggattgtgggacatggggagctttttcttccctaaaaggggaaacttgagagctgatgagactgctggaaaagatccctttgctactgacaagcagctgcctgaacttttcaatgttgctgcaatgggtgggtctttctctggcctccctgagcgccttgccttcccaccctgctgcaggcaatgcttttccgctgtttctctctctgtgcaaactggttgaatgaatggtaaaaatcactgtttatctcctctgtaaagtttgattaatggaaaaaaggatttgtgaggctagtcttaagctgtagccaatctggtgtgctttatgtgtctttctktattgttctgtcayaatgaggggtccctagggatagaacatgggcttaggacacctgtaagactgctgttcaaggtgacccagcaaactggtcagttctaaactttgctacaggtccctgaaaaaacactggatgaggtttccctcttgtcttctatgtccttgggggcttgaccttgtaaccatgtggccatgctttctcttttcacaatggtggcctgggttcaggattcaattcctggcttggaaaatgagtcctctatcttttatctttctatgtatttatatgtattctgtgtatgatgtttataaatgaaagagctttaattaattggtttaataataagcacttaaatcaaatattttgtcagaaaagtaaaaagtgtaatgccttttatttagttcatgtgacttaagtaatctttgggaaatagagttttaaagattattcataaaataaaaatatcttcagaactataaatatttggtctacattatgcagatcaaatattaagtttactaaatgctttaaggttatacactgtttctttgacttttgaaaactgttccatttattttggagcattagattctaggtaaggcctgagacatgtgaagttaaacgctggagagagtcagaccttatctgcacttctgtctgggtcctaggccccacatctaatacataaataaaattgcttactaaccaggtttttcatcaaaagtaaaagctgctaagagttaacaggataacatgtatttgagactagtgaagacacagttctatacacaaggtgtataagaaaagtgaaatgtgtttttggtaaaagattataaaaaggcatggaaatgtaatttttttggcctagattaaaggattaatggattgttttaagttaggatgaagctgaaggcttaagcaagttatggaaggtttgtgaaaaattaattgtaagagagtctgcattgactaaaattaaagtggcatttttcagcttttccataaactaaacattggaataaaagcataataggtttttcttagagcaaaaacctgcttatgatctgctctttcacaaaaatttgtaaagggttataaaaggtttataagaatcttaccttatggtcaaactgaataagattggatatatttatctataaggtttactaagaattgggtctgacatcaataatgcactaatgcaacagtgacatttggcttatttggtataaaagtcacacaggaagcactgtcaaatataaaatgattggttttctttgggctgtatttgtataaatgttattggtatgtcttctaaaattataaaaaactcttataattctgatatgacttagtgtacattatcagtaataattataattgtgttgaattattgtatgccacaaaggtaaccaaatttctttgttaatcgtgtttttgactgtggctgttctaacatcttttgtcatccacaaacaattgtcttattttgatcatcttccaaaggtggtttgtaatcagctatagggctttgacaggtgctcttgaatgcaagtttctgctaactttggaaattatgacattagaatagaggaaaaaactttcagaactctcatagagagctgaaatgttcatgaatatcaaacagaagttaactgcatgaactaaactaatgaaagtctaaagtaatattttttaactttttgcttaaaatgctgctgatcctttgttttgcttttcagagtcaagaaaacttttgagctatttacagctttttagcaattaagtaaactatactcctgtaaacaaaatctggagcatatttgtttctctctatctgatttctccagaagttggaaactatttgtgaatattcttaatttatggcaatacagttatttgcataagtgcaataagaatctgttttctttgcaacatgacacaattggagaaactggttattttaccagggctttgactggaatagtttgcattcgtttaaggagtcaaacttgacttgtagagccaataaaagctgtttggaaaactggcctcataccttgcctattatacagtccctgtataaggtttctgacctgtggtaagtaaagaatgtcactttctaacaggtccaggagccccaagttatcttgggatctcagaaaaaggaayttacccaactcagaggtatttgagggtagaaacccatggctgggctcagctttaaaaaagtcttatctaagatttcttctatggaatagagttccatcaaagccaatttaaaaagagcttatgtaaaaaataattttccttgttgtactttatacaaataatcaggccaagtataataaagcaaatttgtcttgctgatttgtctttagtaaaaatgggaaactgcaaacaaaaaagttatgttgtaagaactatggtacacttcttattagattctagtctcatcagttgtttttaagtttgtttttgcaatttargctaaccgtgcttattcctgcaaaccaaccagtgatctctgactgctgctcagaagaaacaagagggatgggtaatgtaaaaatctaaatcagtgttctaattctgggcatgtactggaatgatctagcaaccccctaccagcttggttccaacagttgcctagttcatggaaagccttctaatttagtttacttgggataattttacttatttggctttattgttgtagaatatattgctgctgtactctttgagtaagaatgcagaataagcttactcaacattttcttaaactgagtacttattaatcttccagatatcacctcttattggaactcaagagtcatgaatggcccttgccatactgatgctttctgactgagctcctctctaccctgaacacaagagaccctagaagttaggcaggaatatcattgcgcctattcagcttgaagaagctactgggctgcattcctagatggttcaggcattctaagtcacaggatgagataggaggtcagcacaagatacaagtcataaagaccttgctgataaaacaggttgcagtaaagaagctggctaaaacctaccaaaaccaagatggcgatgaaagtgacctctggtcgtcctcactgctacattcccaccagtgccacgacagtttacaaatgccatggcaacatcaggagttaccctatatggtctgaaagggggaggcatgaatartccaccmcttgtataccatatcatcaagaaataaccataaaaatgggcaacaagcagccctcagggctactctgtctatggagtagccattcttttattcctgtactttcttaataaacttacttttgttttgcactgtggactcaccctgaattctttcttgtgtgagatccaagaaccctctcttggggtctkgaaggggacccctttcctgtgacataacaactggctctgggaaggggagctctgatgagcggtagctgctgatttttgtggtataaatttcaagcctccaacttgaaatcactaggaagagatgtgtcaatcagctctcataagctggaagaaactttatgttggaacttactgtatctcgatagaattttggctaattctatatatctagagaaatctatttctcatataaaaaggtatgcatatgtatgtatcatagaagtggactggccatgctcatccacaaggtgagtgaaacagtctccttcctgcccaggtaaggcacaggtatagtttcatatgccagtgatgcccttgtgactctgatggtacatttcacatcagaacaagactttatctccttcactcagtggagtaaaaagaacagaatataaaaggaaatataaaaatacaaaccatgaaatagataaaaaggtttatttcattgatgttactggaagtaattttcctcctcattgtatgaagtttctggtatctatgatttatatgaaccttttttcctttcaccctctcttgttcacaattacttttctcctgctcctcatttactcctggaaggcctgaaagctatgcccaacaagtacctatgcagttgtattaatcagcttgttcagcagcaagaatcaggaagtccctagagcagctctacagctggttggatgactgagtggttcagcaatggcatcaagtaccctctgctcygagacattccccatgtagtctgcagagggtctgcagctccccttccaatcacagaatggttgcaggggctccaggaatcacagctagacatgacaacatccagaagcaaaaaaagggacgaaactttccttttgtctcaagaggtagaaaagcttctcagaaacaatccctctcctttccaccactgagttgaaagttccttccaaattgatgcaatccacatggctggcaacgcagatttgtttagcacaacactatctttatcccctggaggaaagggagaagtgtgctgggtaaggccactgaaaatgtctgccacagatggtaacctagagtaattaaaaaggtagccaggccatgaggtgctcagagaggctggcttgaagctgttggggttcatctcctatggctgctgtaacaacttacaccaaacttagtatattaaaacaacacaagtgtatctgataattctgaagtcacaagtctgagatgggtctcgcaggctgacatcaaggtggtagcagagctgcactggttcaggctggttctggttctggaggtttaggggagaatgtgtctccttatcttttcggcctccaggagctgcctgcattccttggggcatgtccccttgctccatctacaaagcacaccactcaacctctgcctccaccgttacatctcctctctctaactgagacctccttgcctcctctttgtaaggactagagattgtgctcctgttgagcccacctggctaatccaggctaatcaccccatctcaagacctgttaacgtaatcgcatctgccatgtcccttttgctgtgtaggacggcatgttcacaggctccaggattaggatgtgaatgtgtttggggggcattttcctgccctccccagttgggggttgtaaaatgatacttccaacaaatttataagaaaattgttatattacttcaaaagcaagacttggaattagagtgacaaaactaggcacaagaaaaataattgagatcattgagattagcctgcacacagtcctgataagatttagagtttcgtattaagtaaagcactaccaatgtctttatattattgatgtcatttttgatcatttaaactttatatatgaaaaaacgaatatttaaatatttgttttttgaaatatatttttcatatttcagtgaatcatatttaatatgtatttgtatggagccagttttactcattagcagaacagaaagcagtggtgccacctgagatccagaagcaagcccttgtggatggctatctctgtcctacagrgctgcatgatcttaaaggttgattgtgttagaacctgaatttgacactacccatccatggaggtgcaaaatgatcaaaatctaactttggaaggtgtgagttatgctcttgaatgcccaaagagtgtcactaggtacctggagaccttctgtaattttgatacagcagcttctaagcagaaaaaaagacaggcacagagcctataacagatgatcttataggatacatttctttcagtcatgtaggatttaacttttttatacttataatttcctggcttattggaatgggttagagactagatagctgtttataaaacttacttccatttcacttggggttcacccaaatgaaccacctctgccggcctcttttggggttagtatgcatgaccatgtggctggcatctagagcaccatgggagggaggaagtgactcacgacttctctcaaggctggcgtgccctttcccttccctggcttgtgcagtgctgcacagagatctgggaagccagtgctgaaggtggttggtgggggacagtgtgggagagtcctggccccttattaccactggaaaagagmtgctctccaatcagaaacacccattttcatgggcgcatgaatgagaaataggctctgcttattctatgcagatgaagragctgcaccctgttgggtgccacttcctccccattctgttttatcatctcttgactggccatgaaagctgcaaaagagcctttatrgaagtgcttctgtattgctctctgccgaacctgacgtgatgtcttctggggttaaagccaggcaggcccctctgtatctgtggggttgggttattatatcctgtagctctgagtgtaggggagaattaaggggctggtgttctaaaacaccataataagatttttttctattcatgtgaggctaaaagtgtacattgagaatcaccttggaaatgctcccataacctagacaaagrgacattaaatgaattctagaaattcagttgacatttggaaacagcaattttaagagagaaatgtttccagattttagccaatacttttcaatttacttgcatcattaaatatagcataattttcagtgtaatgaacgcaatattgtacagaaattagatctgctcagtattaaaagatgaaaaaatcaagagcagtcagacgaaccttgaggaaaaaaacgttctgcaaaccccagataaatgcagaatgcctgcaagcagggtttgtctgaaaaaatacacgcaaccagagtcacactctatttccagcccagatcaaaagtaaatttctcatcctataattatgtgcattttcattcaaatccacagtagatgtttaaaagatgcaggcacctttcagccatccctggtgggcctatcatttgtcttgagtgctccttttgcagcaagcacaggaggatgctatttttatccttccatgttcatatggagcatatccacgttgctcagaactgatgaacaataacctggctgccccagggcttccaatatgaatacaatcccaaaagacaccctgacaagaagacttttcctgggaagaagcttctggatcaccctaatttgctacggcacctcttctgtaaccagtccctctgtgcctgggcacatggcccttttctgaagtttccagctatgaaacgccttatttagtcattcaacaaaatatttgctaagtgctcccacgtgccacaaactagatgctcttggcacaggatgggcataatccctccctcaaggayctgacagtaaaatggagaacacaagttaatagattcttgcatgagagtgaggtcttatgggggaacctgggaggtgaccttagcggactccttgatgcttctcctaccaacatgtatttaaggacacagcactatagtaacagtgttttgtaaacatattttctcacatttctttcctaatctagcatacatctagctattatgcattttcttgctttttattattagaaatgccatagatcagtgtataaaattattctaccaaagcaatttaataattagaaaggtcacatatattcaatagtcatagttaaactgcaccaaaataatttttgggaaaacataaataagtgtgaaatatgcagggaagaagaaagatttccttgacatttgtctgaatcaaaagacattgactagctaaatgcatataatttttccctctgattctaatttctgaattcttacacaaggctttcagtgagataaacttttatgttgttcccttttatcaaattgatttcttataaaaggctgtagtttaatggttagtttaatgagactttagtttaatggttactatagtcttatagtataggttgaactggggcaatgtgatgtgcccaactttgttccttttacttagatttgctttggctattcgggctctttttttggttccctataaattttagaatagtttaactatagctttagctaaattttatagaatagctttattttatgtatatttacagctaaagctttagaacagctttaaccaaagcctcattaattgcctaaactggacactcatctgcatttgccaacctttgtgctcttaacttgtgcacctctgtacatggtcctgggcctgccccctggcttccagctcagctctgaggctgcgtggaaagaactgcaggccccagaatcctgttgggaaccacagcccctcagcaccttctggttcttttccatgcaaatcaaagacaaggcttcaaacttgaaattcaaaaggaaaataaatcctaactatgctgggtttaatatttgcagccaatctccttctgcattttcctctcacaattgcacaacaaggtggtttgcttaaaacagtggtttgtatgaaacatcaaagaatggcccacctcgtttgttagctgtatttctaggtatttcattttcttcacggtgactggaagtgagattgtgctcttgatatcactctcagcctgcgtgttgctggygtatagaaatgctactgatttttgtacattgggtttgcatcctgaaactttactaaagttgtttatcaattctaggggccttttagcagagtctttatgatttttgtaggtatagaatcatatcgttagcaaagagagatagtttgacttcttcttttcctatttggatggcttttaattctttgtcttgcctgattgctctggctaggacttccaatactctgttgaataggatttgtaagagtgggcattcttgtcttgttcacttctcaaggagaatggtttgagcttttgcccattcagtatgatgtgggctatgggtttgtcatagatggctcttattattttgagcaatgttccttcaatgcctagtctgttgaaggtttttatcatggagggatgtcagattttattgaaagctttttctgcatctattgagataaccatatctcaataaaggctttttgcttttgattctatttatgtgctgaatcacatttattgatttgtatatgttgaaccagccctgcatcccagaaataaagcctacttgatcatggtgtattaactttttgatgtgccgctggattcaatgtactagcattttgttgaggaattttgtgtctatgttcatgagggatatttgtctgatgttttcttgaggtgaaagatctctacaaggagaactataagacactgctgaggtggcacaaataaaaaaaaatctcatgttcatggattggaggaatcaatattgtaaaaatggtcatactgtccaaatcaatttacagttcaatgatattcctattaaactttaatgtcattcttcacagaatcagaaaaaaaatctaaaattcatatggaaccaagaaagagcctgaatagccaaagygcttctaagcaaaaagaatataggtggaggcaccatattgcccagctttaaaccatactgtaagcctatagtaaccataacagcatggtactggtacaaaaatatacacatagatcaatggaacagaagagagaactcataaataaagctgcataccctacaaccatctgatattcaacaaggccaatgaaaacaagcaatggggaaaggactatctattcaataaataatgctgggataaccggctagtcatatgctagctagaagattgaatctggacccctatctttcaccatatacaaaaattaattcaaaatagattaaagatttaaatgtaagatcttaaactataaaaatcctggaaggcaatctaggaaatactcttcttgacactggctgtggcaaagcatttttggctaagtccccaaaagcaagtgcaacaaaaacaaaaatagacaagtggtacctaattaaactaaagagattttgcacagcaaaagaaactaccaatagattaaacaagcaaactatagaatgggagagaatatttgtaaacmatgcattcaacaaaatgcagaatctctagggaacttaaacaattgaacaagcaaaaaagaaacagccccatttaaaaatgggcaaaaaacatgaacagacacttctcaaaagaagacatataagcagccaacaaacttacaaaaaattgctcatcatcactagtcatcagagaaatgcaaatcaaaaccacaatgagacacaatcttacacagttggaatgacaattattaaaaagtcaaaaaacaacagatcctggtgaggctgcagagaaaagcgaacacttatacactgttggtgggaatgtaaattagtctagccactgtgaaaagcagtctggagatttctcaaagaacttaaagcagagcgatcatttgacccaacaatcccattcctgtgtatatacccaaaagaaaataaattgttctaccaaaaaaaccacatacacttgcatactcatcactgcactattcacaatgacaaagacatggagtcaaccccggtgcccatcaacagtggagtggataaagaaaatgtggtacatattcactatgaaatactacacagctataatgaagaatgaaatcatgtcctttgcagcaacgtaaatagagctggaggtcattatcctaagcaaattaacacaggaacagaaaaccaaatactgcatgttctcactgataagtgggagctaagcactgagcacacgtggacatgaacaaggaaacaagagacactgaggactactggagggtggaaggaggggggtgggttaaaaaactacccatcgggtattatgctcatggccagggtgacgggattcctactcccagccccagcatcatgcaatattctcaggtaccaaatctgcgtatgtaccacctgtatctaaataaaagttgagatttaaaagaagacaattgcccaagaaaaggaacatggctgggagagctaaataggcatgttaacatttgcattttgtgaaaataaggtctacatgcattgcaattctccagtaagtcaaagtaaaaatatgaaaaaaaattaggaaatgttgctgagcatggtggcccatcagaactgggatactcacaaaaattgctcctttctgctcttaataggatggaaatctcaaagaaagagaagcaggaaattatttaagccaattcaatgttaacatattataaataaatcatgatccaggacaaatcgaaggaaatttcactattcctaaatctcagacttgccacagatttttaaaatgttgaatactgtgaggaaaatggcaaataatccacataactgtgggttcagtgctacagttaatttcattacatgtaataactgatgactcactggagcaggtaattaaaattggcatgtcgcctgcttagatggatttcggtgtttcctgggacactcctgttagtgagaagcaaatgcctcgaagctgctcctcgtcggaactccagttcctcacgaaccacattcccaccaaggggtccctagctgctgctctcttccggttgaatccttggactctcaccctgaggtgactgcttttatctcggcagccttcagcagtaagagaagcacacatttcagacagtgtgactgtgaggtagcaaagagctcagccagagacactgatgttctcttcctacacggcaattattacatcatgtgtttagctgtttttagagtacagcragggcagggactaaggctgccttatttctcatgaaactcccaattcaacaggtactgtatattattgagcacatagtaggtgctcaataaatccctgttgaaagtagaaatgagtcagtgggtttcagccccaccttccttcagatggtctgagtgcacttgccccactgtggcagcagcaggtgtgtgtctggctggccaagtgaatgtgtgtggccgaagaccactggcagcttcggagactgcctcccagcagggggtccgtggtcggctgtgcatcactacttttgaaaagtcagaattctcaaaagaagaaatcaaatattttgggatattaaaattgatctttataagagaatgttatcataaaattatgaaaagtaaacacattattctgatgcttaactcggaataacagggagcaggctcccctgaggaaacgacagtgcctcccttgaggcaggaagggcatcccaggcaaaggcaggggaccatgatggaaaccatggtgaatggtggccttggggaactgcagaattcgggacagctgaagctgggtctgaaggtggggcaacagcgagagatgaggctggacttcakggaaggagccaggtcaggagggaggctgtcaggagcttagagttcatcagaaaggaaatggaaagacgctaattgtgagaataagaaatgggatctgtttcaagaatgaacgatcaggttgcggtgggagccatgagctgggaagagacaagcctggagcgagacaaacatctcctgcccagcattgctcagttaggaaggtggcttaaccttacagggtcagtaggatgggaaggcacagacattcacgagacatttaggaaacagaaggaaatggttgaaataaaggatttaaacatgagagtgaggaagtgtccacggccaaggacaactcctggcttctatcttgggtactgtgtgcacagtgctgtcgatcaacccagatgggggccaacatgggagagggcagctctaggaggggcaggcagagtgggagctgcgaggttatgattgcatcatggacacactgagctttgcagtggctactgtgcacacagaagtggagtgctggtgcccgggaggtgtctggaggtgtgactttggaacttgggagagaatctgggctaaagtgatggctcaccatggagagtgttttggggagaaagaagaggtccaaggcccatccactgggctccacctgcccaggacrggcaggcacagggacacagcctctgaagagcaagataaggaggagatcgtgtcatgaagccatggagggaggtgcaggcagagggtgctgaggccgtgggggcagcaaccaggctttggagacaacagcaagagttaattgtagacattttgctgattgatggtggcagggctgttagaggtactgggcaataaagagcaggctacagctcttccttccaaatgagacatttttagaacagttataacactaagctcagactgcaaagtatcagtggagagcaatggacctttcagaatgaaacacatagaawggaggaaaaaaaagattttctcggtgatctgtcattccttagtaaataaaagtgaaaatatgacaaaattaagaaagattgctgtgtgtcgtcgcagggaaatagcagcaccatgatgcgaacgctgctgctggactcaggcagccgctctgtggaatactcaccgctcaaaccggtctgggtccctttctatttgtttgcaaccaaaaggacttttaacaaagcataacagcttttgcttcttaaactacttgcaaaaatcagrttgggaggggtctctgcgtgtttggttttatttttattgtttttatgagggtggcaaagaatggaggatagttcaacagcaattctaagtttgcttgttttttaataactggttcacaactccatatgtcataggattttttcctctgttccctgtaactgacaaggtgaccggtgtattcacattagaaatactctcacattcatatacaagttgtgctaattatcaaaactgttttaattaagttctgtaacagctggcctgtgctcttggcagtcagccttaagatcacaccattcctggattggtagagactgaaagtattatgttttctttacattgttaccctgacagtttaaatgaagggcaacttgtctgtgagtaattatttcctgtaattaggatcttctaaggattcctgtttttgccaatacgaagacatctcgccaaagacatgggaaatgactgtggtcttcactttgctttagttgaagaggctgagctttcatttatcttggaaaaattaagacttgatatttgttatctgctgcttttagcctgggagtctgtttctataggcgaaagggggagaattaaggaaataagaaagcaatattgctttttaatctctccaaatcccctcattaacacagacaggtaaagcaactaggatagcaaaaccaaaacctatatacagaagaactacatcgaaattgtgtgcaaggtacactcatggtccttaaaatataaggcaatggggacagacctctgaccactaagacccatgtgaccacagcaacggtgctagaggcagcagaggagagtagccagccatctcctgattccagaatgggaacgtcaccaacagatgccatatttgaagctgggagaggttgtgcacgctccagttcacgggtggtgacgaggtctgaaaaggatcttaagcctaaaatcccccatttcccttctagtacaaatctctccactgaggaaagcaaagggataaaatccaaatcgagcggagctgcccaggtccagaggagtaaaagaaagagaaaatccagctaaaaggagggaaagacagaagagaaggcagatcctagaaatatgaggtcattttaaaaaccactttgtagaggcaatagaagaggaggctctggagctgtgaaccagaaaagttatcttgaccaatcctcccttctaaaagagtaggcagatagaaaaagagtgttgtcaaatcccttacaaaattattattttaaaaaggagagaataagaaatatcataatgtctctacagacaataaaagcctgctagcaagacatgcccctcaatagaagaacttgcaagatactgcttcaaaacaagatcacatattttttaaatgatagaagacattaaaaacatagaacttaatgaaagaacttaaaatgcaaaataaatatcaggaaatgatgcctaaattggaaggaacaaaagacaaagtaatcataacagacaacagtttaagaaacacaggagacaaaaaagaggattttttaaaaattgaaaatcaaaagagtgatgaagtgttttagagaaaatgacagatgaagataggcagaagagactcaacatgcatatagccccaaacaagaagctcaaagcaacggaacagaatagtgctgacatattaaactcaagacaactccctccccaaaagactggacactacctactaaaaggataggccgtattactggagaatttaatcctgaaagaccaacactggggcatattttagtaaagttactgaccttcactgaaaataaaaataaaatctgggcraaattaccaattcactcataaaggttgtcatcaggctttttgacaataatactttctaccagaagaaattgggcaacttgaggaaaaaaaatttgagccaaagattttatactcagccataataactttccaatatgaagtctcaaacaaattgttaagaaacaacttaacaaatgagggaatactggtctcatgaaaacttcttgaggattctactagaggaaaagattcagaaaaccaaactatctggtgaggcattgccttaagcattgatggtgaaggttaggtatatatttacttatgaaactaggaagaagtgacagttacaaagaagcaaggagggtaagtatggctataatgctttggtagtgtagctacagtagtaaaaatgaggggtaggagagtaggaaaacatgtaaaaagtagaatgtttgctgatcgcattatgcctactaaataaaagtaaaggaatattactccaaatcagatgtagtggaaggagggaagggggaacatttagcattcctaaaagygtgcagaaaatgctaacatttttctaagagaaagggataaaaataaacacacacacatacacacacagtgacataaacacactggccctctcaagaatgtatttgactggagtaaatggatgccatgtatagcaaatcatgggaaggtgcctgaatttgagtcttactcatacactaaatatagtgtcacataaaaatggagaggcaaatagagattttaaaagtgaatgtgaaaaaagaaaaaccctcactaataaaatatttattaggttgaatagaaaaagataaaatgtaaaaatgtaaaatgtaagaatttttaagagtagtaactctctaaattacatattgtcctctgcttcagaagaatatctctgcatttatgtccatctctgtccgtctgtctgtctgtctctctctctcaatcaagattacatcaactttctgcaacaaccacctggatacaatgtattttcatttttttctatttctctgcattcactttttatactcacgtgaaaaggacccagagtatgccttacaagagacaagtgtggaattattaatagtttctctctctcttttggttaatttgcttttaagctcctgttaataacaactatgaattgaagaaggctgcaaaagagattcktaatatttttgtgactttgtaaaagggtacttcacgatgacctatgtcatcatcaacccttagaacctgtagattttgtaaatgatgttgctaatagctttgttagcatgtaatgtaagtgtagtaaaaatccgattatatactctgaagtcaatatttccttgccttggagctgtatctccccccacgtttatatttatcactatgtacacattttcatgtatgcaattatgtacaaaatagctcagtcatgacttgtgattagcttattcttttatacaatgttttccatcttattttacagtttattcaagtgatggacttgaccgagtctatctaaggaaaagttaactgaaagtagccattcaaagaaagaacacagctctccttcatgagtgtatttctagacaatacaaattttaaatatattttaggatcacatatattttctgattttaattttgtatattacattttacatgaaataatatgaaatatattttgaccttatcttactaattttatgaagcactgtccaaataatagaagagaaaaagacagacctaaataagtaaaattagttcacattacccagtatatataaatatattacaatttataataatatcaaattccaatatattggactcctaattttacatttgttgaaatcaaactgaataactactgtagagttcaatgacaaaagctttgatattctagtttccctgtcaaatatatgaaagatgaaaatgctctcatcctgtaactttcctgtgcttgcatatcataaaaaaamttactagctcatttagattcatttcgaccccatattcatctttggaaccattaattaatgggaagccagacgaaatattttttcaagggttatacaaaaccattaccattacaaaaatacttgcagttctataaatagatctgtcatcaattttctaaattaacrggctgaacctagtggcagatttgaggaataaaaaaaaaaaaaatcttgactctggaattgttcctttcctcagtgatttcttaatctgctaaaattaaacacacagaatttttgtatttttcccagagtagatctttcccatcagaytatatcttgtccatccctctttaaaaaattatatcttgcccatccctctttaaaaatcttttaaaaagctagtcaggcagggagaacccaactcacactgtcacatttgaaacaggcaatacaagttaactgttcagaaagacgactgtgccccttgaaatgcgatgctagcctggtgatagggcagcctgccggtggctttgagaacacctcgtcttgtctccagaccttcctagattatcacctaatgcctgcaacaaaatgatgctcatcatttgtatcttatttacttaataaaaggggaagacagaaattcagagaaaaagaaaataaacacaaggtattacacaggtcataccctctctctttgcttctaattcagccaagtaaatgttcataaaaacttattatgattttaataacaattaaaatgtaatttctagtcactcaaatacattgaagataacactccttttaaaatagtgcctacacaacagacagaaataaaaggcatccaaatagggaaggaagtcaaactttcgctctttgtggttttctataccttgaaagccctaaagacaccaccaaaaagctcctggaactgataaactatttcagcagagtttcaggatacaaaatcaatgtataaaaatcagtagcatttctatacaccaataacattcaaacagagcaaaatgaagaacacaatcccatttacaatagccacatacagaaaatacctaggaatacatctgacaaaggaggtgcaagatctctacaagcagaactacaaaatactgctagaaaaatgatagatgacacaaatgaatgaaaaacattctgtgctcatggattagaagcagaattggtatcattaaaatgaccatactgtctaaagcaatccccagattcaacactattcttatcaaactacaaatgtcgtttttcacagaattggaaacaaaaccattctaaaattcatatagaaccagaaatgaggccgaatagccaaagcaatcctaaacaaaaagaacaaacccagaggcatcccattatctgacctcaaactatactgcaaggctatagtaacaaaaacagcatgctactggtacaaagctggacacacagaccaatggaacacaatagagaacccagaaataaaaccacacacctacagctatctaatctttgatgaagttgacaaaaataagcaacaaatagacgacttcctatttaataaatagtgctggaatagcttgctagtcatatgcagaagaataaaactggacccttacttttcactatacaaaaaaattaactcaagatgaattgagaatttaaatataagacctcaagctataagaatcctagaagaaaatgtaggaaatgtcattttggacatgggccttgggaaagaatttatgactaagtcctcaaaagcaattgcaacaaaaacaaaaactgacaaatggatctaattaaactaaggagcttctgcacagcaaaagaaactatcagcagagtaaacagacagcctacagaatggaagaagatatttgcaaactatgaatctgacaaaggtctactatttagaacctataacgaacttaaacaattaagcaaaaaacaagtaaacccattaaaatgggtaaaatacatgaacagacacttctcaaaagaagatacacaagcagccaacaaacctgaaaaaatgctcatgtcagtaattattagagaaatgcaaatcaaaaccacgagataccatctcataccagtcagaatggctattattaaraagtaaaaaaaaaaaatacatgttggcaagactgcagaaaaaagggaacacttatacactgttggtgagaatgtaaattagttcagccactgtggaaaacagtttggagatttttccaagaatttaaaacagaactaccattcaaccaagcaatcccattaatgggcacatatccaaaagaaaacaaatcattttaccaacaagacacatacagtcacatgcttattgcagcacttttcacaatagcaaagacatggaatcaacctagttgcccatcagtggtgaattggataaagaaaatgtggtacatatacaccatagactactttgcagccataaaaaagaatgaaatcatgtcctttgcagcaacatctatgcagctggagaccactatcttaagcgaattcacgcacaaacagaaaactaaacactgcatattctcacttgttaaaaatatttgagagggatgtttttcaaaatattgaaaaattttaaggaagatgttcctatgtgacgtatattacaaaatttaactaagactatgactaacagtgacaaaaatggttcaagtaattttatcacatcttataatttttcatcaggtatgcttctatcatgttattttcaaattaaccaaaagccaagatttggtcaagtaaaaaaaaaaaaaaacctcaaaaactaattttaaagcaattatatttgtcaattccataaagtaaaattacttttacccttaatgaatatttttcattttatcagcaattatttaaaagtgaatatgtaaaatacattatcttgatttataatttttaaatagtgtgcaaagttagatgtgatggatttttatactaatgcagcaccagaaacacttatttccacacccacgagtttctttcagagtctaacattcagatgtgcacagctcctcaaaatctgaattccttccactgcatgacctcagtgatcatttttagaaggacatccaaaacataactgatttgactatatctgagggtaacttcagaagggaaagacaatccacattgtcgaacagagcataatttacttctaagttcatcaggcgtacaggtaatactgactattgatattcttaatcatgttattattgcaatacaaatattctttatatgccacagtgaaattattatgcaagttctaatggcagcaaaacttttacactccattggcgtagtgctaacttatgagtatggctaccaaaataaataaataaataaataaataaataaactttaagtcaaattaccatccaggtttttgtctaaggtggccgtccttatccaaaagaaatctaatgtaaatcacaaacaccaaccacacatataattttaaattttctcaaagccaaagtaaaaagtaaaaacaaacaggaaaacataatattaataatatattttatttaacttaatatatccaaaatgttaccatttcaacattatcaatataaatattattaatgagatgttttgcattatttcatctgaagtcttcaaaatcttgtattttacaatttgggttaacctcatttcaagtgcttattaaccatgtatagatattggctactgttttggaagttcagctatagagagttacacagaccgtgaaagctttggatcattaaatgaacacttactgagtactcgctctacacctgtagtgtgttgtgcgttcaaaagggtgcaaaggtgaagcggagatggtgcctgcactcaagtatttacacttctgtcagggaaatgaatgggtagtcccataactagagaatgataaccatactgtttcagtcctttctccagtaaagttagaacattatagggtgtaaataggttcacagcctggcacagctccagagggtgcatgaacattgaatgtagccactggagctgggctctgcccagtcggtcagacagatgacaatgagaaagcacctgccagggctatgcgtcacagcagccctggtgtgcagcagattcagatctgttgtttaaaatcgtatatacacttatggatatattagtggtcaatttccatattgattttcctactttcttactagcttttctttgtgttccttgttatttgctgatcttggctgttcaggtcacttttccaaatctgttcacttcaagatccattggctcttactgaatggtgaaaagcaagactttgtcttctggctttgcagatgctgagtttccccctgaatgaatgtgaaatgtcataataacaattgcattcatatttctgttttggctattgaaaaaacatatctaacttattttcttttggaccttaggattagaataaaaggggtacaatatgttaattaggacaacaaatcttaggcatgtaaatatcaagaagtgtaagaacttgctccttgtcctcatgaaacacatctatttgtggatgttagggtggaacttttttcctacccctggtgtttccttccgtgtgacaggagctcagttagtgtgacacctgttctttcaggaggcatccagaaaaaggcactgtgatcacaggagatacagcttcatgcctgccattgcccctgaagaccttccagtgggacaagaagtgggggtagaagacagtgacatggatgctcctgaccctgtgtgggctcaggctaatgtgtatgtttgtgtctttgtttttagcaacaaagtttaaaaagtaaaaagaaataaaatattttaaaaataaagagcttatagaataaggatgtaaagaaaaaatattttgtacagctgtataatgtgtttgtgttttaagctgtttttactaaagagtcaaaagttaaaaaattggaaagtttataaagtaaaaaacttacagtgagctaaggttaattttttactgaagaaaactattttgtataaatggagtgtagcctaagtgcacagtgtctatgaggtccctggtagtgtacagtgataccctaggccctcacaatcacttaccactcactgactcactcagagccacttccagtcctgtaagccttatggcaaatgccctatataggtgtaccattttttatcttttatactacattttcactgcaccttttctatgtttagatacacaaatacttaccattgtgttacaattgtctacagtattcaggacgatcacttgctgtaggggtttatttcctgggggcaatcggctacaccgcagggcctaggtgtgtagtggggttgtcccgtccaggtgtgtgtaagtgcactacctgcacagtgacaaaatcatctaacaacacatttcttagagggtatcccagtcattaagtgtcgcatgactgcagcaggaggaaggtctccactcctgataaatcttccatgacaggaagcccaccctcccagccccttttcttcctcttctctaccccttactcactgctttccaggggaggtgagctaattcacctgattgataaatctggcacagcttctcccttttccacctgagagcacctatgtgcagaaaagagtttcctctgctcctctgggccgcacatctcactgcagcagatcctcctaagggagcccggacccggctcagcaaccctgcagtgcctgccccactgagtaactctggaggggcccgcgctcagtcactgcacagcctctcgggttattgtttacttttgtctcctccagttggaatacaggctccaggagaacacacctttatatccgtgtcattccctggggtctccttctgcccagcaccgtgcctgatacattgagtgtttctcgttgagtgaccgaatttgcaatttattcagaatcctggtggatgctatttatgaagctcccagagacccacacttggaagataaaacatagcaagactcgtctaacaatgactgaaaaggtgtcatttggcagactctggctacatgatgaaataaaggtaggataacagttgctaggactacaggaggaggagggctaaatgaggtggggcaggcagggcccgtctataaaggagccaggggctgcactgatggatgagtaggattggacatgaagtgggagataattgcatttaggcccattctcctacccactcctcacaggtagcatcatttatatgtcagcacactaataaaagtcatcagcatgacgtcctcaattctccctggtgcttctgagggaatgcgatacaaaatttttttaaaaatggattttggtttgtaaaatgctacataaatcagaatctagcgttttgctttatttatctctgcaaaacaacaattaaagaacagttcatatcatctagcacagcaagacagatttgattatagtggatcactttacagtcgtttggttttcaaatgtactttatgggccctgtactgtagcatgttgctaagggaatcgcagttttatttttactagatgaaatactattgggaccttagatcttcaaaatgattttgaatccaaaacattaacaaggccacaaagtttagcatcaattctcatttcctttgaatctgcacattttaatgttttctgcctacacaggaccagatatatacacataaacacaaacatataaatgtatgaagatatgagtatttaatcaatgaaaggaatgcaaatctcataaaaaatgaaattttataacaacaataaagcttatatttaaagtgtttatcagccttttaagtgtaagtttaaaattctattgccagcttcagaagtgtaagatttacacagcttccagaggtgtaaataactccatcccagctggttaatcaccgatagaatatgccactacacacctaattagcttattgttcatcactgtaaggatgcagtagtggctagctgtgctaataattttcataatttggattgccaaagaaatcatgtttagattaaaaatcctggaaaggatctatgcaggaaagtaaaccaaatctttttctaaagaccatgggaagatctaagtgatttctgaaaactattgtctttattgctattgaaatcattaagtgtaatgaaccatgttaatgtaacgttgaatttgagatgctaacaggataaattgaagtgatgggaagttttayattttcaattctgagctctctttcctttaatatggcatatttttattttatggaataatatatagagtgaaagctttgcacaggatgaaaaactttgagctatcttagactttattctaactctgccactcattatttatggtcacatgaaatctcaatggatgacctgttttattaatgaattagcctcaataaggtrtaaagaattaagtcaatggcttagattttgccagttatctggattttgttgttgttgtcacatggacccagtatattggtcatacacattttagtctgtttcttagaatttactgaactaaacagcattatattcagagtaattttgcccagtacctaaacaaaaataatcaaagtctgttggatctggaaaggatcttagaaagcaaattgtcacctcccttttgtaccaacagataaagaaacagaaaccagctcaggtaatgtgcttagctcaagcctaaacaactcatggctgaaagagctaaagctcattgaagtttcacctcaggaggtcaggagtgctaagcttcaatcacaggagatgccaacatttatcctcaggacatgacatgtatggatgttctgtttagtagattagaagctcctttcacgttacccaattcaaacatttctcaggtcccaggtcagaacttragagccttcacgaagggaaaggaatacatagtcctcttaccatgtgaggtgctgagccgctatctcggatggcgagaataaagttcctggtggcccaggctctcgtagaaagctttccgttgggcttgattaaatcgctttggccaaattttcttaaaacttgacacaaacgatcctttgtctaatgattactctgtgggcctctcaaattggagaaaggaagggatctcctactgagaggatttgttatagatgaccctcttttcactctgtgagtttagagaatctggaaaacacacgctggtcacaacaagatcccacatggatttggatgtgtgcctcgtttacaaattcagagtcaattagctgtgattttactggggaaattctgttgttaggttggctttgatttcggaagacattatggctggaaaatatgtgctgagaaagtgtctcacagaagtccctgtggcgatctgtctttgagggcctgagcaatactcccttgtgtcttagtgtgtgcgtgagagagagtgagcatgagtgtgcatttgcgttagggggaactatggaaaaacttggactctaaaaggataaaataacattgagggcagctcaaggaacagcttaaaatttagcaaagtcccttcattttctctaatgtgcttctagagtttgtaaatccagtacaacaacaataagaatattctatgtagtgcccaggtgggtcagataattgacatttaggaaktcttgagagaggggacttaaaatgaaaccaagtacgcagtggaaggctcagctgaggtcacactgtgaggatgctgctcttctatgacctgggaccaaaatgcccagtgtccagtgagaaggccgctctgttctagctgggtggactgggaagaactctcaggaaaatccagttccatctagagcycagagatcccacctctgaccaaaatggagcaagagcgacctgattaattgttatgcctgaaacaactaaaaaacaggtaaaagagataaaatagtttctcaaggcactggacatctgacaatggaagcagtcacccctaagaagcaggacacaaatgggggaagggtgtcactgcccagctcactgcctggagaaagtctgcagtcagtatagcaaaaaggggatcccagcagagtccagtggtctcccaagctgaggagacagagtagggtgtctcactttcaaaagggagcacaaaataaagacatttcatacatacaaaggaatttataaccagccaatctgcacttcaagaaatatgaaaggaagttatttaaggagaaggaaaatgacaccagatgaaagtctggagctacayaaaggaatgaagagcatcagaaatgtcaactatatgggaaaatagaaaaattttttcttattgtttaagtctccaaaagataattgttaaaagtaaaagtaataatgtattgtaggatctataatatatagaagtaaaagctataatacagcacaaaggttaagagggaaaatggaaaaatgttccatgtttttatactatatataaaatggtataatctcttttgacattctagtgtggtaagttaaaaatatgtrctgcaaactttaagacaaccactaaaattacacaacaaaaatttgaaacaaatacatgaaatacaagggaatcataaaaaatacttaacccaacagaagattttaacaaaaggaaaaacatggaaccaggacacatgggacaaataaaaatacaaaataacacatttatgaaacaaccacatcataatcataatagaagcaattaatcaaaaggcagacattgccagattgtataaaagagaagccaacattataagctgcctccgagaaacatactttaaatataaaggcacaaataggttaaaattaaaaaatgaaaaaagataaaataatgctaacattattgaaaagaaagctggaatggctaaattaatgtcaacaaagtagttttcagagtacagaaatttaccacgaataaaaaaggtcattttatattgataagggggtcaatttatcaagaggacataataattctaaagagttatgcacctaataacagagctccaaaatatatgaagaaaaactaatagaattgcaaaaagaattaaaaaatctataactatagtcagatatttcaatgccattctctcaataactgatagaacaartatacaaaaaaatcagtaaacatatagaaaaattggacattatctatcaattgatctaaatgatattgtcaacttattgacctaaattgacatttatagaacactataacccacagtatcacacatgtatcttctttacacccagaacatttacgaaaatagaacatattcgtgttcataagactcaataaatgtaaaagaattttggataccccatttaccctgatgtgattattacacattgtatgcccrtatcaaaatatctcatgtaacccatatatatacwtatatatatatgggwtatatatatatatatgggtttatatatatgtatgttttatattatatataatatattatatataataatatataatatatatgggttttgtttctatatattatatattatatatataaacaaaacccatatatagttatatatatgttatacatagttatatatgttatatataacatatataatgtatataacatataaatgttatacacagaacatgtataactgttatgaacaatgttatacacataacatgtataactgttatayatgttatatatatacatgttatatatataacacgtataactacgttgtatatatataacacgtataactatgttgtatatatataacacgtataactatgttgtatatatataacacgtataactatgttgtakatatataacatgtataactaygttttatatatatataaaatttcagagctttcattgcatagttttctaatatttgaacatatatactaggtacccataaaaattaaaaatagagataaacaaatacatttgtaaacaaataaatttaatataattcaagttacacaaggtaagctatctgaccacatgaaattaaatgagcattagtaacaggaaaatccctaaatagatggaaaataaacaaaacccatgtgtcaaagaacaaataagaagaaaaatttttaagtattttaactgagtgaagagtaaacatatcaaaatttgtgggccactactaaagtaataattagaaggaaacagcactaaaatccctattagaaaagaagaagaaaggtctgaagtcaatgacctcaggttcaaccttaagaaatgagtaaaagaatagcaaatgcaaaccaaagtaatcagaacaaagaaaataataaatatctgagtggaaattagtaaaatataaaatagaagaataataaggaaaaatcaatgaaacctaaaactttttctttgagaaggtaaatactattaataaacctctggcaaaaatgatcacaaaaaagagagaagacacaaattaccacttagaggaatgagaggggtgataccactacagattccacattaaaagtataataagagaagttattaagaactttatgacaattaatacagcttacatgacatggacaaatttcttgaaacaaacaagctattcaagcatagtcaaaaagaaatagatgacctgaatatccctatatactcatttatttttcawataaagctggcattcttcatcttaatttaaaataagaagactgaaataaagataggcaagtagtttgagcaagaccttgtagttagtaaatggtaggatcagattttgcctctccgttttcatctctatactgctgctctgaatgaatgaacgaacaaataagtattttcattagaaaatagtttaaatcccatacatagattaaatttgcagatatgtgtgtgtgtgtgtgtgtatatatatatacacacacacacacacacacacacactagaactttgtatacatttgatatggttaggcttcatgtccccacccaaatctcatcttgaattgtaatgctcatagtccccataatccccacatgtcaagggagagatcaggtgggggtaactgaatcatgggggtggtttcccccatgctgttctcctgatagtgagtgagttctcatgagaactgatggttttataaggcgctcttcccccttcccttggcacttctccttcctgctgccttgtgaagaaggtgtcttgcttccccttcaccttccaccatgattgtaagattcctgaggccaaccccagcatgttgaactatgagtcaattaaacatctttcttttataaattacccagtctcaggcagttctttacagcagtatgaaaacaaactaatamaatattatagctaatatactttatatataatgatatatatgttcatatacatatttgaaatatatatttattatagctaatattctgtatatataataatatatatgttcaaatattagaaaactatgcaatgaaagctctgaaattttaaaakcttttcatgagtttgtttgggaaagtaaagactaactgtggtttacattattggaagagaattttttttgtaaattctaattcaagatcaatgaactctgaaagagattgatatggtcattatctttttaagcatgagttaatgatccagttggaatgattagccaactattaagcaagtccaagtggaaagagcatgcatagtgcgatcawgtggatctaatttgaatctctgttctgctctttttagctggggaagattacttaatcattgtaagctttggtcatgtcatctataagaatgggggtgcaatgctatcttaaataattatcgagaggattaaggctaatgtatttaaatcccctaacctggtggcaggcagagagaagaagggcaataaatgacagatattgttatcatgattactattgttggtgttggacttcatttccttataagcccatcctacctccagctgttgataagccaaaaaattcctggggagaagatgggaagagtttaagaataattaaaactgaaaatgaaaagagagagaataattaaaaacaatatttggcaagaagtggatatagaaaaaagggaagtttgagttggaaatgtttcctttctccttttatctcctgctgtctatactttcccagatttttccattttattttttttctgacttgattctggtattgcaaacaggctcaatttcctcttcccttcctcacagatatttgtaaagcaagggtttaacattcaaatgcttacaggaattatgcaagtaaagtgaattattgaagcaagctttatggtattctttccccacacatggttcatttgcatattaatcagcaagagatgattatcccatttccaaatgaaaatttgctctctttcattttttctgacaacacgtacttatccaggcaatctggggccatagaagtattcacctactttaagagaagtaataatgcaaagaagataataaacatcgattggcactagactgccatgttggagttagcagcagctggtgagaatgaagaaaactaggcaagacatgccatctagaaggggtgggtgttacttaaccacagacattcattgacacataagaatatgggtctagtgttgccagaaattgcagtatgccaaagaagccagaaatttggacatgaaaattctcaatatttgagagtctcaaaaaataattgcacaggtttatcaaacacatctgaggacagcatccagcctttaggactcagggttatggtcctgctgcagaggagtcaaggttctctgaggtctggcagtcactaataggtagacctatctcagaaatagagtttgaatgcaagaaaacactttcacacacagaaagtagccatttctagtctcttgattatctacagtaatcttttcctctagtcatttgtcaataaacagaacttccaccaactacttaaccaaactgttttgcaaaacgtgaagacatttctttcattaactaaatgattaactgattcattcatttattcagtgactactttttgggtgtatatcatgatcaaggcactgtrggcaatgccaagataattaaggtatagttgctcttttcttaatcatttctgctctttttttaacctgaaaaagatagttttgaaattactctgttgtttggttcaaatgatttttcttcaccttctatttgtatatatagcattagaaggcattttgaaggtcaagtggaaggaaggctttaaagataaacagatgagtctgactgaccgtcaatcaagaaattgtgctacgagaaaccttatctagcaatgaacgaatgctgtgatggtcagcaaattggaactgattcctgaactgccacagttacatgcaacacacaggcaccagtattactttgctgtcaactagagaggcctagaatgtgttatatagatcaacctaagtaacattttaatgaraagttcttaagattcttacctccaaagaaatgtgtacaatattctgtcgttctgaaaaatttgccttcactcagttagagcagactgagtaaaaaatgttctcaatacttttaatattatagccagggtgatttcatttmatttacaacttgctgcagtgaagaaagcaggttccctaactctttaaacacattattttatgcataatagggtaattatattagatgggtacactatcagtggacttcttggatgagtgaattttctggggctaaacaaatgccaaatgtatataataatgttctgtcttggcacattaggctggaatttaattaccttgtataaaaattatagcaaaatcttatcagcgtaacttctatattttattgtgtgaataagtgaatgctgtctacagcttaagccccaaaacccacaaacaagatcatataatgaaatcaaattccaccaagaaccaaatagagtgaagacaattccctaaagtaacaattataccgtataaatgagaaaggatatcatgttcttagaaaagctgctatttccagtgtacaagatagagacttgagtcatatcagaagttacccacagagacctgtggttttctctttctctgttctctttgatttggcctgaaggctttcaaacctattctgctttctgtttaccggctgccactcccacttcattataaaaaactcttggctcaccctggttcttatgggacgttctctggagctaggactgggagatacataaayatgaaagttgtgtgtacagtggagagagcaggtttattggatcctagagcactgatctccccrtggccagtagcaccactcaaaagctctttggagaattgtggtgtctgctattctcctcstggagacccatttcctccttgttcagatttcattaactctttggacagtgcatcaaataggttattgaacagttcacaacccacccatttcagagtcttcagcttacactgcagcatacaaaggactcagctgtgtggttgtgccaaggtccttgggagccatgcacacctgtaacccatccccaaggcctcgcaagtgccaccacctctgcagacagggctctttcggccttcccggggcagactcttgcctctccttcaaaatcatggccatcagcttctcaggaggtttttgcctcagcagctatctgaggctgggctaagagctccctaagtgtttcaggagcccctactattcaggcctgccttggctcataggtaatttcacattttcctaattctctcctctctaaaccataaactccccaagggtagagactgcatctttcattgttgtgtcttccttttctaacacagagcctgcagcataggagtgttcaatatcaagcctcagatagataaatgctgtgtactgtgatatgaaatgacgatcacgtgaatttccatttgttgagttcctgctgggccatgtgtgtcatccccagtcctcatggcaccctgcgatgtacccattttacacatgaagcaagttaagatgcatgcccaaggccacacagggagagaatgccagagctacagtttaaatccagatcagtttctctgcaaaggctcccaacatgatgctataaggatgccaccacactctcttctgtttggagcgacagggacccctttggaccacacaggacccactggtatggggagtgtgatgggagtgcaatgggggttccctcactcgaaagcccaggaagtgatctccaacagtgttctcagagggtgacttctgggcaagtctgtccagcgcgaaaacagaaaatgcagcaagaagtttttgaccctccgagtaccctgcaccacaacctgcgggagggcactatctcagggactaggcactgcccactgacagatgaagcctgattgcatttagagactgtcctccaggtcttcaagagggaggaaaagtgaatctggcctggatggcctagactaaaatgactcagttgactgctacctcggatgtgtaacccaggacaaggatcttaatgatcagactaatctacagagaaccctgctgatggctcactcttttgcaatccattgaaacgaatccaaccataggatgttacaagtacatccagttggaggtttctggtacaattacaaactgtaaaattattaccattgtaggcatttgtgtttgtaattatgtttcataattaatgttccaaagtaatatgttaggttctcacctccatttgcagttttctaaatgaaggatttcacactaaagactgcaaaataccaggcgcaggccatgaatcaccaggattaatgatatttcactcggaaattttgaaaggctgaggctaaagtaaaactcacaagaaaatgagtcatgtatagtggattagaccttgcctgggaagaacagacttcatgtaataaatataatttttataattaaaatgttttactatgtagaatgctaatcccctttaagaaaggaattctatgtgtcactaaaatgttaaggaaatayatagaaggccaagccagtcttgtttctgaattttttgtgtgtgtttaatccaatttaaattggttgagggtctgaagagttaggtgggcagcaactatccaatcttgtattgagcttctactaagagcagggctctggcatacatctgtctaatgcaggctatgattaaggtacctaaaactcacaggccagtaaacarcttgcacataacaggtgctgaaaaatgtctgctgaattagcaaaggtaagttaaataaattgtaccattctatacactcagtgaggaccagagctaggatttgcattctgaaacgtaatagttctaatgagaggaacgaagatgccctgactgcttcctaccaataagaatggggcttccagcaatctcttgatatcctcttatttatgtttatttctgcccataattatttgggtatttctagtcataatgtttttggactcattgcacaagtaatttaaaatgtcacttttttttcatattctttctgccaatatgaatgtctgtccagtagggaatagtgcaagttctttcctattcaggtgtgagaaacagcagactggtgctgtgactgctggccatgccctgcagaaggaatacaaagtacagttggcagccaggtcgatggaaattcccacatctagggctttgtccactaaggaaagagtgatcactcaataagaggggttgtgataactggctaaacatttttgaagaaaagggttagattccctaattgacttcacatgtcagaatcaattctaaatgacatttggtatcatataacatataggatggaaatacaaataataaaaacatttttaatgtaatcttggggtaagagggatctttctaagcatgcttctagagcagaaataataaagtcaaagtggtcagatttgactatgaaattgtactgcatataaaaatatacccacaatatgagagaaaacatttcatatgcttaacaaagaatgaattctcataaagaaaagaacaccatgctagagggaagaatggacaaagacttctacrttcatcaacatgacatactgagtagtttacaagcaacttctctcttaaaatttttgttaaagatgcagaaacattgcagaacaaaataacaaatacctgctcacattaatcctttaaaaagtaagggccagaaaggaagaggaagcaggaaagtcatgccaggtgatggagaccatgggcctcctgaaggctttctcagtcctggagatcctgagttgcatacggcatgaggactggagacaagtcctcagatccacatcaagtacgaagttggagttaagattcctgcttaaagctaggactcctagaggacagcacccttcaggaaaaggtgggttagaaaatcgttcacctgggtgggaggttgcaataatgttagtaacaacattgacagcctgyccctattatgacgcactaccagcggaacagagttccatgtgctccatatattaacccatttcatcttcacaattctttacggtaggtactattattatcccaatctaactcctgagaaaactaaagccagagaggctaagtaacttgtttaaggacatactgttatgacgtgtacaattcaggcagtctggctctgagaaaggagggagtgtatctcctggcaaggaattagcatccagactacaaaaagaactcctccaagtcaataagaaaaagataaacaactcaagagaaattgggcataatattcaggcatttcactgaagagaagacatatagtgtcaagttaatatagcaaaagatgtccaatgttacaaacacagattaaaagtctgacaatgtcaagtattggctagcaggaggaacatgggaactcccattcctggctgattagaatggaaactgaaatcaccactttgaagaataatctagtgagtttatctgaaggtctctcttctttaccactgcgttgctttcaagacctatgtcaaattgtcacctcttttatgaagtctgttatgaatccttgggcccaccttgacattgaatttttccaatttccagcattattctgctattcattggaagacatgattcgctgccgtctgtcagtagttttcatctgttacttaagggccaaggtgatgtggttttgtaatttttcattcctagaatctaagaaggaggtaaataagtgttgctggtttgactayaaaaaggactaatataagcaaataaaccatactttggctttcttactttttcattagcatatgtcagatgcattccgacaatccaattatagtcagcacaacatatcttagggcaaacaaatctttagggtttttgccttatgtagatttgctctatattttcttgaaattaaaattgagcatgacatattttctgaagaaaagtaagaaaatggattactgtacattaatgtcaagttttatctttatcaaaccaattttaaacactatgttcattcattgaacatcacaaaatgacaaaggcctaaggctctaattgacttttggtaaacaaatgactgaatcattaaaatgttttagtttatyttataaaatctagtactaaacagttattaagagagacaacataatgtctccctggagtttaatgactacccatgacttatgccactataggattctccagtctacattttaaccctgattacttagcatatattctttctatttttctaaaaaactctagttttaagagtaatgtgtgctcttggtagaaaagaatttgaaaaacaagagaagaaagagtagagtgcccataatgttactaacaagagttgagacagttactgttaatactttgaaatgtgattagtctagacttatttatataatattgtataaggccaaagtcttactgtgtgtataaattccacatgctatttttaaaatttggcatgagtacttcattttgttaatatattattttaaattgttatataatattccattgaatggattcatcataatttaattagccattcccctagtttggtggaatgtttcatttttctcagtttctgttttctctagctctaacctagagcatctttgtgtataatgrttttgggggggtctattttggatcaaagcacaaacgaattttctatatttgatttgaaggatgtgaacatattactaaattacttttatcacctccattatgggacttgaaagtgatgattttattgtatttttgccagtaatgacccctttttaaataacagctttaagatatcattgacacataaacattgtatatatttagggtatacagcttaatgtcttgatatatgtgtacaytgtgaaatgatcaccacaatcaacctaataaacatgtccattatctcacataattatctctgtgcatgtgtgtggtgtgtgtgtgcatgcacacacacgagtggtgagaagatttaatttattctcttagcaaattacaagtatacaaatatgaagtattgtaactaycatcaccatactgtatattagatctccagaaattattcttcttgcatagctaaaactttgtaccctttgaccaacatcayatgatccagcaatcaatcccaattctgggtatatattcaaaggaattgaaatcaggatcacgaagagatatctatcctcccatgttcattgtggcattattcacaatagccaagatatggaaacaatttaaatgtctttcaacaaatggatgggtaaagaatatgtagtatatacacacaacaggatattactcaggcttaaaaataaggaagtactaggagccaagatggccgaataggaacagctccggtctacagctcccagcgtgagcgacgcagaagacgggtgatttctgcatttccatcggaggtaccgggttcatctcactagggagtgccagacagtgggcgcaggccagtgggtgcacgcaccaggcgcgagccgaagcagggcaaggcattgcctcacgtgggaagcgcaaggggtcagggagttcgctttctgagtcaaagaraggggtgacggacgcacctggaaaatcgggtcactcccacccgaatactgcgcttttcagaccggcttaaaaaacggcgcaccacgagactatatcccacacctggctctgagggtcctacgcccatggaatctcgctgattgctagcacagcagtctgagatcaaactgcaaggcggcagcraggctgggggaggggcgcccgccattgcccaggcttgcttaggtaaacaaagcagccgggaagctcgaactgggtggagcccaccacagctcaaggaggcctgcctgcctctgtaggctccacctctgggggcagggcacagacaaacaaaaagacagcagtaacctctgcagacttaaatgtccctgtctgacagctttgaagagagcagtggttctcccagcacgcagctggagatctgagaacgggcggactgcctcctcaagtgggtccctgacccctgacccctgagcagcctaactgggaggcaccccccagcaggggcacactgacacctcactcggcagggtattccaacagacctgcagctgagggtgctgtctgttagaaggaaaactaacaaacagaaaggacatccacaccgaaaacccatctgtacatcaccatcatcaaagaccaaaagtagataaaaccacaaagatggggaaaaaacagaacagaaaaacgggaaactctaaaacgcagagcgcctctcctcctccaaaggaacgcagttccttaccagcaacggaacaaagctggatggagaatgactttgacgagctgagagaagaaggcttcagacgatcaaattactctgagctacgggaggacattcaaactaaaggcaaagaagttgaaaactttgaaaaaaatttagaagaatgtataactagaataaccaatacagagaagtgcttaaaggagctgatggagctaaaaccaaggctcgagaactacgtgaagaatgcagaagcctcaagagccgatgcgatcaactggaagaaagggtatcagcaatggaagatgaaatgaatgaaatgaagcgagaagggaaggttagagaaaaaagaataaaaagaaatgagcaaagcctccaagaaatatgggactatgtgaaaagaccaaatctacgtctgattggtgtacctgaaagtgatgcggagaatggaaccaagttggaaaacactctacaggatattatccaggagaactttcccaatctagcaaggcaggccaacgttcagattcaggaaatacagagaacgccacaaagatactcctcgagaagagcaactccaagacacataattgtcagattcaccaaagttgaaatgaaggaaaaaatgttaagggcagccagagagaaaggtcgggttaccctcaaagggaagcccatcagactaacagcggatctctcggcagaaacactacaagccagaagagagtgggggccaatattcaacattcttaaagaaaagaattttcaacccagaatttcatatccagccaaactaagcttcataagtgaaggagaaataaaatactttacagacaagcaaatgctgagagattttgtcaccaccaggcctgccctaaaagagctcctgaaggaagcgctaaacatggaaaggaacaaccggtaccagctgctgcaaaatcatgccaaaatgtaaagaccatcgagactaggaagaaactgcatcaactaacgagcaaaatcaccagctaacatcataatgacaggatcaaattcacacataacaatattaactttaagtgtaaatggactaaatgctccaattaaaagacacagactggcaagttggataaagagtcaagacccatcagtgtgctgtattcaggaaacccatctcacgtgcagagacacacataggctcaaaataaaaggatggaggaagatctaccaagcaaatggaaaacaaaaaaaggcaggggttgcaatcctagtctctgataaaacagactttaaaccaacaaagatcaaaagagacaaagaaggccattacataatggtaaagggatcaattcaaccagaggagctaactatcctaaatatatatgcacccaatacaggagcacccagattcataaagcaagtcctgagtgacctacaaagagacttagactcccacacattaataatgggagactttaacaccccactgtcaacattagacagatcaatgagacagaaagtcaacaaggatacccaggaattgaactcagctctgtaccaagtggacctaatagacatctacagaactctccaccccaaatcaacagaatatacattcttttcagcaccacaccacacctattctaaaattgaccacatacttggaagtaaagctctcctcagcaaatgtaaaagaacagaaattataacaaactatctctcagaccacagtgcaatcaaactagaactcaggattaagaatctcactcaaagccgctcaactacatggaaactgaacaacctgctcctgaatgactactgggtacataacgaaatgaaggcagaaataaagatgttctttgaaaccaacgagaacaaagacacaacataccagaatctctgggacgcattcaaagcagtgtgtagagggaaatttatagcactgaatgcccacaagagaaagcaggaaagatccaaaattgacaccctaacatcacaattaaaagaactagaaaagcaagagcaaacacattcaaaagctagcagaaggcaagaaataactaaaatcagagcagaactgaaggaaatagagacacaaaaaacccttcaaaaaatcaatgaatccaggagctggttttttgaaaggatcaacaaaattgatagaccgctagcaagactactaagaaaaaaagagagaagaatcaaatagacacaataaaaaatgataaaggggatatcaccactgatcccacagaaatacaaactaccatcagagaatactacaaacacctctacgcaaataaactagaaaatctagaagaaatggatacattcctcgacacatacactctcccaagattaaaccaggaagaagttgaatctctgaatagaccaataacaggagctgaaattggggcaataatcaatagtttaccaaccaaaaagagtccaggaccagatggattcacagccgaattctaccagaggtacaaggaggaactggtaccattccttctgaaactattccaatcaatagaaaaagagggaatcctccctaactcattttatgaggccagcatcattctgataccaaagccgggcagagacacaaccaaaaaagagaattttagaccaatatccttgatgaacattgatgcaaaaatcctcaataaaatactggcaaaccgaatccagcagcacctcaaaaagcttatccaccatgatcaagtgggcttcatccctgggatgaaaggctggttcaatatacgcaaatcaataaatgtaatccagcatataaacagagccaaagacaaaaaccacatgattatctcaatagatgcagaaaaggcctttgacaaaattcaacaacccttcatgctaaaaactctcaataaattaggtattgatgggacatatttcaaaataataagagctatctatgacaaacccacagccaatatcatactgaatgggcaaaaactggaagcattccctttgaaaactggcacaagacagggatgccctctctcaccacgcctattcaacatagtgttggaagttctggccagggcaatcaggcaggagaaggaaataaagggtattcaattaggaaaagaggaagtcaaattgtccctgtttgcagacgacatgattgtttatctagaaaaccccatcgtctcagcccaaaatctccttaagctgataagcaacttcagcaaagtctcaggatacaaaatcaatgtacaaaaatcacaagcattcttatacaccagcaacagacaaacagagagccaaatcatgagtgaactcccattcacaattgcttcaaagagaataaaatacctaggaatccaacttacaagggatgtgaaggacctcttcaaggagaactacaaaccactgctcaaggaaataaaagaggatacaaacaaatggaagaacattccatgctcatgggtaggaagaatcaatatcgtgaaaatggccatactgcccaaggtaatttacagattcaatgccatccccatcaagctaccaatgactttcttcacagaattggaaaaaactactttaaagttcatatggaaccaaaaaagagcccgcatcgccaagtcaatcctaagccaaaagaacaaagctggaggcatcacactacctgacttcaaactatactacaaggctacagtaaccaaaacagcatggtactggtaccaaaacagagatatagatcaatggaacagaacagagccctcagaaataacgccgcatacctacaactatctgatctttgacaaacctgagaaaaacaagcaatggggaaaggattccctatttaataaatggtgctgggaaaactggctagccatatgtagaaagctgaaactggatcccttccttacaccttatacaaaaatcaattcaagatggattaaagatttaaacgttagacctaaaaccataaaaaccctagaagaaaacctaggcattaccattcaggacataggcatgggcaaggacttcatgtccaaaacaccaaaarcaatggcaaggaaagccaaaattgacaaatgggatctaattaaactaaagagcttctgcacagcaaaagaaactaccatcagagtgaacaggcaacctacaacatgggagaaaattttcgcaacctactcatctgacaaagggctaatatccagaatctacaatgaactcaaacaaatttacaagaaaaaaacaaacaaccccatcaaaaagtgggcgaaggacatgaacagacacttctcaaaagaagacatttatgcagccaaaaaacacatgaaaaaatgctcatcatcactggccatcagagaaatgcaaatcaaaaccactctgagatatcatctcacaccagttagaatggcaatcattaaaaagtcaggaaacaacaggtgctggagaggatgtggagaaataggaacacttttacactgttggtgggattgtaaactagttcaaccattgtggaagtcagtgtggcgattctcagggatctagaactagaaataccatttgacccagccatcccattactgggtatatacccaaatgactataaatcatgctgctataaagacacatgcacacgtatgtttattgcagcattattcacaatagcaaagacttggaaccaacccaaatgtccaacaatgataggctggattaagaaaatgtggcacatatacaccatggaatactatgcagccataaaaaatgatgagttcatgtcctttgtagggacatggatgaaattggaaatcatcattctcagtaaactatcgcaagaacaaaaaaccaaacaccgcatattctcactcataggtgggaattgaacaatgagatcacatggacacatgaaggggaacatcacactctggggactgtggtggggtcgggggagcggggagggatagcattgggagatatacctaaggctagatgacgagttagtgggtgcagcgcaccagcatggcacatgtatacatatgtaactaacctgcacaatgtgcacatgtaccctaaaacttaaagtataataaaaaaaaagaaaagaaaaaaaaaaaaaaggaagtactgaacacagtcagccctccatatctgcgggttttcaatctgtggattcaatccaaggattgaaaatattcataaaaatggatttgttgtgtctgtactgaatatgaacagacatttttttggttatgatttcctaaacaacacaatgtaacaaatatttgcatagcatttacattgtattaggtattataagtaatctcaagatggtttaaagtatacaggaggatgtgtgtaggttatatgcaaatactatgtcatttcatgtcaggtacttgagcatccatggtttttggcatctgaaaggggtcctggaacaaaccttccaccactactgaggcatgaccgtacttttatctccatctgccattatgatacatctgtcaggtatcctcaggatccttccaaataaacacattcaatatcaaacttaggaagtttcctcttctgaccctgtttctcctcctgcagttgctgttgtgacctagagcatcagtatctaaccagctgtagaagtcagagctgtagtgtcctttttgccttaggtctttcttatgcttatgtyyatgagaacaatgttccacctgaaatcttaatctgcccccttctctacattctcactgccattgcttggttcatgtcttgccagagtagtagcactggacgtgtctattcttgattgggctatttaaaaagtatattgaattttttcgtcgcataactaatacatgcttagagaaatgtattgaacattgtaatgtagaaagaaaaccaatagtttcaccagtcagtagctcctgcctatttgcccccacaaaattttgtaaaactactgtaatcaaaccatactcatagttttcagttttgctttttcttttactataacctgttattgttctcatattattaagaactctttgtaaacttttaaattcatagtgttttcttaattttccattaagagattgcaccatagtttatataaccattccctttcttgtttggcattttaatgaatatgctgcacataaaactgtttcaatagattcagttgtttccttagcataaactctcagaaacaggattacctcattaaagtctatgaacattttaaaatttaccaatttccaacgattctacatagaatggctacataatagctttctgtagaacatagctgatcctatccaaaacaacttccctttccaaaacagctatgtggctgttttcatacccaataaatgaaatctgaactcctcaacttgctcttctaaggcttgccccatgcatatccatctgtccggcttcattgctactgtctcctcaactcaagcgtcccagctttcacctatgctgaacctgcatctattgctctctctacctcgattgacccttctcctctttattcagttaaatctctgctccaatcccactctgtgtccctagtgaaattcacaacattcttcctcaatttaaaagtaattgctcctggactcagagaggaagatggcagatagaagacagggctaacatgcagctcccacttggatggagagaaaagcatgtggagactcataccatggacttttgctccaagaaccacctcaagaatgtaccaggaaaaccaaaagaattcacagatcccttgaaagaaatggcatgccactgcaaattccatgagacgggtgcaaaactggtgttctcttgaatgtgccaccacctgggtggaggccaaccaactcaggacattacagcaactcatgacataataaccctgctccaaggaaggagaaaacaacagctaattccactgcctgcagcatcctggataaccagaggtcctgggtctgtccatgggacaacttcactgctagcataatcagcatttgagaaagtcagcacaataaacatatctacaaacaaggactctcacagagtctatctacttcaatcccctgccacctccaccagagcaggtgttgtgtattagtctgttctcatgttgctaataaagacacacctaagactgggtaatttataaagaaaaagaggtttaatggactcatagttccgcctggctgaggaagcttcataatcatggcggaaggtgaaggaggagcaaaggcttgtcttacatggcagcaggcaagagagtgtatgtagggaaattgccctttagaaaaccatcagatctcgtgggacttattcactgtcatgagaacagcatgggaaaaacccaccccygtgattcaattacctccctcccatgacatgtggagattatgggagctacaattcaagatgagatttgggtggggacatagccaaaccatatcatgctggtatccatggctgggagacctgaagcttgcagacatttcccagcaccagcctggagcctggtagctccacagagtggctagacccagaagagcaataacaatcaatgcaatctggctctcagaaagcctcaaccttaggggaagtgggaacacaacacatcaagggatcaactcatgggacaaaagaatctgaagagcagacttgagttccagatttttccactgaagtagtctacccaaagaagaagaaatcagaaaagacattctggtaatatgacaaaacaggctctataacaccaccaaaaggccagactaactcttcagcaattaatgcaaaccaagaagaaatatctggattgccaaataaaaaattcagaaggtttattattaagctactcaaagagataccagagaaagttgaaagccaactttaaaaaattgaaaaaaaatwcaggataagaatgaaaaattatccagggaaacagatatcataaagaaaaaacaatcacaacttctggaaataaaagacacacttaaagaaatatgaaatgcactggaaattgtcgacaatagactacaacaagcagaaaaaacaacttcagagttaaaagacaaggctttcgaattaatccaatcagacaaaaacaaagacaaaaaataaagtcctatctaattatcatatttttgttgcatttgcttcaaggttcttggtcatgaagtctttgcttaacccaatatctagaagggtttctccaatattatcttctagaatttttatggttttaggtcttagatttaagtctttgatctatcttgagttgatttttgtataaggtgagagatgggaatccagcttcatttttctacatgtggcttgccaatattcccagcaccatttgttgaacagggtgtcctttccccactttatgtttttgtttgctttgtctaagatcagtaggctgtaagtatttggctttatttctgggttctctattctgttccatcagtctatgtrccttttttataccagtacaatgctgttttggtgactatggccttatagtatagtttgaggttaagtaatgtgaggccttcagatttgttctttttgcttagtcctgctttggctatgtgggatcttttttggttctatatgaattttgggatttttttctagttctgtaaagaatgatggtggtattttgatgaaaattgcattgaatttgtaaattacttttggcagtatggtcattttcacaacattgattctacccatccatgagcatgggatgtgtttccatttgcttgtgtcaactatgatttctttcagcagtgttttgtagttttccttgtagaggttttttatatccttggttaggtacattcctaagtattttattttattttatttttgcagctattgtgaaaggggttgagttcttgatttgattctcagatttgtcactgttggtgtatagcagagctactgacttgtgtacattaattttgcatcctgaagctttgctgaattcatttaccagttctaggagctttatggatgagtctttagggttttctaggtatacaatcatattatcaggaaacagcaacagtttgacttcctctttaccattttgaatgcccttgatttctttttcttgtctgattgctctggctaggaataccagcactatgttgaatagcagtggtgaaagtggacatccttgtcttgttccagttctcaggaggaagctttcaaattttccccattcagtataatgttggctgtgggattgtcatacatggcttttattaygttaagatatgtctgttctatactgattttggtgagggttttaatcatagagggatgctggattttgtcaaaaagctttttctgcatctattgagatgatcatgtgatttttgtttttaattccgtttatgtggtttatcacagttactgacttatgtacgttaaaccatccctgcatccctcrtatggaacccacttgatcatggtggattatctttttcatatgctgttggattcatttcactagtagtttgttgaggattttcgtgtctatgttcatcagggatattggtctgtagttttcgtttttttaaatgtccttccctggttttggtattagggtggtactggcttcatagaatgactgaaaggaggattccctcttctctatcttttggaatagtgtcaatatgattggtaccaattcttctttgtatgtcggatagaattcagctgtaaatccatctgtttgtgaactttttttggtgacagtttttaaatgaccatttcaatctcactgcttgttattggcctgttcagagattctattccttccttaagcttctgcacagcaaaacaartaatcagcacagttaacagacaacccacagagtgggaagaaatcttcacaatctatacatccaacaaaggatgaatatccagaatccacaactcaaacaaatcagcaagaaaaaaaaaaaccaatcgcatcaaaaagtgggctaaggacatgaatagacaattctcaaaagaagatatacaaatggaaaaccaagcatatgaaaaattgctcaaaatcactaatattgtggaaatgcaaatcaaaaccacaatacaataccacctcactcctgcaagaatggccataataaaaaaatactagatgttggcatggatgtggtgaaaagggaacacattacactgttgatgggaatgtaaactagtacaaccactatgaaaaacagtgtggagattcctcaaagaactaaaagtagatctgccatttgatccagaaatcccactactaggtatctayccaaaggaaaagaagttatacaaaaaagatacttgcacatgcatgttgacagcagcacaatttgcaattgtaaaaatatggaaccagcccatatgcccattaaatcaaggggttgataaagaaaatgtggtatgcatataccatgaaatactacttggccataaacaggaatgaaataatggcattcactgcaacctggatggaattggagactattattctaggagaagtaattcaggaatggaagaccaagcatagtatgttctcattcaaatgtgggaggtaagctatgaggatgcaaaggcataagaatgataattggactttggaaactcaggggaaatggtgggggtggtgaagaataaaagactacacattggacactgtgtacactgctcaggtgatgggtgcaccaaaatctcataagtcaccactaaagaaattattcatgtaaccaaacaccacccrtttcccaaaaacctattgaaataaaaaaaatttttaaagaaaaaagaattttaaaaatgaacaaaacctccaataaatttgggattatgttaaacaggtaaacctaagaataattggtattcctgaggatgaagagaaatttaaaagcttggaaaacgtatttgagggaacaattaagaaaaccttccttggcctcacttcagttctagacatccaattacaagaagttcaaagaacagctgaaaaatttgtcacaaaaaagttgtcacctaggyacacagtcatcaggttacctaaagtcaagacaaaggaaataatcttaagagctgtgaagcgaaagcataggtaacctctaagggaaaaactatcagaytaacaacagacttcttagcagaaaccctacaagccagaagggattggggtcctatctttagcctcctcaaacaaaataattatcagccaagaatatcgtatccagcaaaactgattcctaaatgaaagagagataaagtctttttcagacaaacaaatgctgagagaattcaccactaccaatccagcattataagaaatggtaaaaggagttctaaatcttgaaacaaaaccttgaaataccccaaaatagaacctcctgaagcataaatctcacagggcctataaaacactaacacaatggaaaaaaaaataaggtatttaggcaacaattagcatgatgaataaaacagtacctcacatctcaatattaacagtgaatgtaaatggcctaaatgctccacttaaaagatacagaatggcagaatggataaaaatccactaaccaagtatctgctgtcttcaagagactcacctaatgcataagcactcacataaactcctagagaaaggagtgcaaaatgatattccatgcaaatgkaaaccaaaagcaagcaggaggagctattcttaggtcagacaagacagactttaaggcaacaacagttaaaaaagagaaagagggacatcatataatgataaaaggatccgttcaacaggaaaatatcacaatccaaaatatatatacacctaacactggaactcccaaatttctaaacaattattactagacttaagaaatgagatatatggcaacaccataatagtaggagacttcaatactccactgaatgcactagacatgtcaccaagacagacagtcaacaaagaaacaatggacttaaactatatcttataacaaatggacttaacagatatttatagaacattctacccaacaactgcagaatatacattctattcatcagcacatggaacattctccaagatagaccatatgataggccacaaaacaagtctcaatacatttaagaaaatcaaaatttatatcaagtactctctcaggccacagtggaataaaactggaaattaactccaaaaggaaccctcaaaaccatacaaatacatggaaattaaataatctgctcctgaatgatctttgggtcaacaatgaaatcaagattaaaatttaaaaattctttgaactgaatgataatagtgacacaacttatgaaaaccactgagatacagcaaaagtgttgccaagaggaaaattcatagcatgaaatgcctacgtcgcaaagtctaaaagagcacaaatagacaatttaacatcacacctcaaggaactagagaaacaaacacaaaaaccaaacccaaacccagcagaagaaaagaaatgacaaagatcacagcagaactacatgaaattgaaacaaaaagaaaacaatataaaagataaatgaaacaaaaagctggttctttgtaaagatgaacaaaactgatagacaattcacaaggttaaccaagaagaaaagaagacagaagatccagataagctcaattggaaacaaaatgggagatattgtaaccgataccagagaaatacaaaagattgtttaaagctactgtagacacctttaygcacacaaattagaaaatctggaggagatagataaattcctggaaatatacaaccctcctagattaaatcaagaagaaatagaaaccgtgaacagaccaataacaagtaacaatagtaacaatattgaaacactaacagaaaaaawttgtcaaccaaaaaaaaaaaaaaaaawtccaggaccagatggattcacagctgacattcaaaaaagaattggtaccaatcttactggaccaagctgagaatcagcttaagaactcaacccctttcacaacagctccaaaataaataaaataaaatacttaggaatatatctaatcaaggacatgaaagacttctaaaagaaaactacaaaacactgctgaaagaaatcatagatgacacaaacaaatggaaacacatcccatgttcatggatggatagaatcaatattgtgaaaatgaccatactgccaaaagcaacttacaaattcaatgaaattcccatcaaaataccaccatctttctttacagaactagaaaaaaaatcctaaaattcatatggaaccaaaaaagagcccacatagccaaagcaagcaagactaagcaaaaagcacaaatctggaggcatcacgttacctgacttcaaactatattataaggccatagtcatgaaaacagcatgtatatgtgtgtgcrtgtgtgtgtatatatacatatatatatcacattttctttatccaatcattggttgatgggaatttaggctggttctatatttttgccattgtaaatatatatatatatatgttttatacataaaaatatataaatatattatagatatacaccatggaatactactcagccatcaaaaggaatgaaataayggcatttgcagcaaccyggatagaattggagagtattmttccaagtgaagtaattcaggaatggaaaaccaaacatcgtatgttatcactcataagtgggagtcaagctatgaggacacaaaggcatgagaatgatataatggacactggggactcagtgggaggtttgggagggggtgagggataaaggactacacattgggtacagtagacactgctcgggtgatgggtgcacccaaatctcagaaatcacctctaaagaacttttccatgcaaccaaacaccacctgttccccaaaaattattgaaataaaaaaaragaaagtaatggctcccattcctgcttcctgttacgatgacacttaacttgtattgtagtaattaccatagtttcctgtagtatagtttattacagataaatttaatgagattcttaaaggcggggccatacattgccaatatttatatcaggcamatatgaaatatcttccacataagtgatggaaggtcgagaacatcagatcctaaatgagcaaattatccttctgcatttagctttgtctctgtaggttgagtagataaaacagtatttccctgttgctactccataggatgtttcttaaatggagaatattaatgtaaaaacatacttggaaattctaagcaaaaaagccaacaaatgccaaaaacaagagtattattgtaattctccaattctgccatatttatctgcttctgaaccttacttaatcctggtagaaaaacatcatggtagcasctaattaacattttttcttaatatatggcaagaaagacatgagatctcaactgcccctactgaaaagccagaggaataaacattttcacatttatttttaagagactaggtaaaacaatggtgaactgactgaagagtattaggcatacatttatgacctgggcctaatgacatgagatctgtatgcagtgtaattaaaaacttatgctagtaattattacactgaaaatgtgtgtgtgtgcgtgtgtgtgtgtgtgtgtatgtgtgtgtttcacataattgtgatgagaactagtactgggaaaaccttgaaccttctaaagagtatgaattagctgaacaaagaagctaacatatcgaccatttattaaattccaccattaaactacatatctttctaaaactcgcaggcctttcttctttctaaatataaatttttgcagtttagtattcatttctgttaatttctaagtttcattttttttctggactgaatattatttaccaactttaggccctaaaagctctgagggagaatttttaatacctgtgaatttattttatttaagtaaacttccgaattactattaaatagaaagcacattaaactttcattagtctatctttagtattctttgctgcatatattatttattctgacaggaaaataagtcaaaaggtgattttagctcaaagtaaagctaaaaaaatcagataaattataaaattataccaacatttcaagtgtgtaagagatacaattttatcaaataatttaaacataattgtaatttattagcaccactcaaaagggggcttcacaacatagtctggacaaggattttttggataagatctccaagatacacacaacaaaagcgaaagtagacaaatgagattacattgaactgaaaagcttcttctgcacagccaagaagacactcaacaaagtgaagagacaacctacagaatgagagaaaatatgtacaaatgatgcatctgacaaggagttaatatccagaatataaatgaactcaacgcagtgcaagaaaaataatccaataaagaaatgggcaaaagatccaaatagacttcttcagagaagaagacatacaaatggccatcaggtagatgamaaaatsctcaacatgtctaataatcagggaaatgcaagtcaaaaccacagtgagatgtcacctcaccccaggaggaagggagtggcaagcttaacagaagagtaaaggcatcttggactggcaaagtggggttgaattagctttaaagctttaattctgaaataaacatattcgtcctaagaaagcaggtcattataaagacaggttattatcaaaacaatgagaagaggacctatataacgaatatatgttttgcacttatttacaattgcttttaattaaataattaactaggagactggagaacagggattcagcaaacctatacaattctatgcaatttatggatttgagaactcagctacctttatccgggaaaagtgtttcatccaattcttctaaggatgagtcacccttaaaaatgttaaaaatcaatgttctagaggaaattgcttagttcaacaaagcatttcattatttggtgggtttaaatttttattatttttcttttcttattaaataatatagtctgtgtttaatttgtcatgctctattataatcactattttccttcaactctggagaatgtcatttctagacttctctttgtctggagtttctacagttttttttagaagggcaagaataaaatgctgaataaaataagtctaacaatacagagttatatgaagaaaaagttaatatcctgtgcatatccccttcacccatccccaacaactgggagtgtatttgttcatacattttaatcctcacaccatatagaattatgtctacaatgtgtgtgtgtgtgtatgtgtgtgtgagagagacagacagacaggcagacagagatagagagacagagatagagccagagagagatgtatttctttttctaaaataaaactggtattctaaacaaaagtacatgttaccctacacattgtgttttttcttgtaaacagtgcattatgggcatctttctaagtcagtaaacacaaatttaatctgttcttttaaatatctataaaacacaatattttcttatagaaatatactataatttcttcagccatattctaagtaatgagcattcatgctgtttatagtttgggggctatttatgctgttataaacatttttttttttttgagatggagtctcactctgtcacccaggctggagtacagtggtgcaatcttggttcactgcaacctccggctcccgggttcaagtgattctcctgcctcagcctcccaagtagctgggattacaggcgcctgccaacatgcctggctaatttttgtatttttagtagagatggggtttccccatgttggccaggctggtcttgaactcctgaccttagatgatctgcctccctcggcctcccaaagtgctgggattacagacgtgagccactgtgcctggccataaacatctttatacatatgtcagtgcttttatttttataagattaaaaaataaggtagttttggggtgtttaaaaataagcagatactgagttttaataaacatagtaatgtaactcttttaaaaagttttaacacttcatattcccaactgcagtataactgagtatccccattgtgctgtactcatacccagaaatactattctaaatatttaataataagctaggcaggaacattcaagtgccacaaattaatcctctaattattgctcttgaagttggaagggtttggtcagtcggagaagggtgggatggggttcgaggagaaaaaaaaggggctcagggtggcgaatatttatgaagtggaacattagtattttattggtgatacttagcttaccaggtaaatatcaatacagccgttgctaggacttattgctggttttttttttttaatttgaaattttaataaaagaaaatggtatcttgtttatatgtttaattttcactttcttaacttttagttcagaagaaggacttttacatgacaatttatattcatttatctattacctgttaagacttttccatttgtatttacgctatggatctttttattgtcattataaaggagctatttgtatgttagtgatattatttatcaaatgtttacaaatattttctttgagtctatccttcaactcatatctatatttaaagtatttttagctgtacaaaattttaaatatttatataataaacaatttattaacctgcaataccattatatttgttcttacttaacaaatatttctcatttactcaagtcctgcaagtttctcgctatatttttcttaggacttgtacastgttgttatttttgtggtattttaccctgytttcatttccaattggttatcaatactataaagaaaaccactttcattttgcgtatttttttatattcatgcaccctactttcatttttatttgatacttctaataatagtatttagaatttagaatatcttgattttgttgttgtgtgacataattatataacaaaataatttttcttcttttcaatatttgtcatccattgtgtgtgtgatagtatatttctataagaaaatattgttttatagatatttattacattagttagattctctaaaagaagttaaacgataaaaatgaaaccaggcatatgtacctcgttccaaatttcagtggctatgacttgaatacttaatctggataccacactgctgttccatctctacatctatacaccagagttatcttattatctttctgtacagcctgctgttcctcctgtgtctcttgacagcactgcctccaactcattcattataagaacctggagggtatcagcaactacctttcttcccccctcaactccagtcctttatccagtcctgttagttaaagatttctatctccctcccacctttccatccatgatagggtcacttcgttcggccctcataatggctagactgttccacacctgccagcatcattcagctgcagtccactctttgaatggtttccaaagttattttgtcaaaactcaaaatcgttttccttctctatttaaatctcaaacttacaatttaagttttaaaacacgctactcagtgcctctgttattctggagccaaacatcccttytcgccttgtctggtgtctcttgcttccatttctcactactcacggcctccgggtttcaggatttctcaaacatacactttattctgttcatcttcgtgtttgtttgtttttgctaagccttccctgccctgcccacctccatgaatttctgctcttgtctcaaatcccgtctcacacccagccctttccagcacattctgtcaatcgcctcactggatgtgcaaattccgagggggcaggtttgtaacttttcatctttgtatttacagtgcagtactcggtatggtaggacttgagcagtatttgtggaaggaagggagggagggagagagggaggaagggaggaaggaaggcaagaaggaaaaagggagaaaagggagagaagaagggagggagagaagaaggacctgctaaagattttatttgaatttttttctaaaaccagagctaaatcaatttaaagtgttgaggtaattaaaactaatttcgaatagatataaaaattaaagttgtgaagcagaattgggtaactaagagaaaaaatgattatgccatatgtcagcaaacttatcttcagtgaaaagtgttgtagagagaaaaaaatggaaaagctaaagtaaaacatgacaaatgaacagagtgctttatgctttgtaaacactttattgcattaaagtgtgaaacaaaacacaaagagcagatatcctgtacaaggaatttgtggtaaagagcagatgattaattttcttgtcgcattctctagtacttattgcaatactatcttgtattttaagacatgtttttgatttagcaagttgtaatacatactaatcatttgccatatatcagggccagtttatatttacaatattgtcttttaattagtactgtctatgataattaagcttagatcatggtagcaatttacatgacggtggctgggtcccttgcacagcttgagttaccatctattggcttatgtattttcagcctctcagccaacatggacttcctgtctggataccttggtaggcattgtccagacaagaaggcagagagaacacaacaaaacaagctcagattattgcagggattctcttgaaattcctccacattcacatattttccataaagttctcagcaaaagtcagaaaagtcagatggagtaccacagtcagatcttgagtactgtagagagagctcactgctgtaagagtcaatcatagcaagccgtggcaaaagagccattgctactgagccctaattcacaggacagtgactcagaccacggatttggagaaggattgccaggttcaagccccactcatcactaacgagttataagaaaggcaagtgacgaatctttctatgattcagttttatcatctgtaacgtggagataataatatctcccggataagattattcatgattaaatataaagctcttaacaatacactaagcatgatatgtgttagcaattattaatatcatcatcattatttaaggaaacaatgcatgtcaataggaaacaggaaaaaggcagaaaattctatgtaacaaatcatatttttatttggggaacctatttagtaaatattttcagtggtatataatggagatacaacagatcccaggaaaagactggttacaggatgagtcattttgaatgaagtaggtgagactacaattcttaaagtactataaagaaatataagcaagtaatttgtgatgacagtaatgttaactttcaagtacaatattttgtatattggctttcttaaagtggaatctcattgatacattgctgtattttgcccaatttacttgggcattacatcttgaattttcgtgaaaagcatattcctttttggaattttaaaaatgaaaatggcttgctattaattatattgttgcactacttttgtttattacagaggtggcatatggtggcagccgccctccatctgcaatgagaaaggacagctgtgttgaaactgaaatacttgagcgagccccgtcaatgcaggcaactttctcttttgcttcaagctctggcaagtcagcagggcccttttcttctattttataattattacgttacttgcaataaattcttctccagaactttccaytaacatttcaaatgaaaaagggtacctgagaaaatttagaaaataatcacaaaggagtgtttaaacactgtgggtaaatttatagctttggggcttgtttccttgtctttattttttctgaaatctattctctcctgacagtaagaagcttgtagggttcatttaaccccttctgtctaaataataggacccccatagttatttttattattctgcaaaagatctatctctgtaatagcgtgcgcacgcatacacacacacacacatacacacacactactcttaaggttttatgcaaagcaggacaatttatttctagcacttttttagttcttctttattgaaacaatgacttagtacaacataaatatgctgaataagctcaaaaaaggttgaaaattgtggaatatctaatttggggagaaaaaactggtagaagggaatctcaaaaaagaagacttagaactttaaagacaaaatgacatttaagtaaaagaattgccttgcttgctacagagcaagagtgggagtcaccaacctgacattcagtgctaaaggttaggggtgagtgggagtccctgagagaggtcctaccagcaagggctgcagtcacagctgaaggtgatcatgcatgaaatggagccaggcctcgcattagatggaaagatcgcattacacttgcaacagactttcacatcgtctggctttcaagtcagcagtgtgaactggttagggcaaaccgccttttactaattttacagacaagggactgaggccagagaggggcagtgactcctctgctgcctcatgactggtcagtgctggggccaagttgaggactgatgttggacttatgctgtgtttcaactaagtcccactcaaaatccatagcaatcaccaacatcagcatcactttaccgtactaggaacaaagcttagttgtccatgttctacatttttttctttactgatgttacagttttaaaagtaagtttctccatgatagagaactcttgtaacctatctcttattcctgagatcatagcttcttcaaaagtatgacatggtggataaaacatttttaaaacctgctttataacagggattcctaaatgccataatgaacatttaaatctaaagaatcattatagaagatatcatttttttagaattctcatctatcagagcacattgtttactcttatagggtgttagacatacaagaccagtacactgtggaagacgtagagcagacaattcttcagccctccgtatgatcacagtctaaaatccattgaaaggcagcttgagatgtccagattcacagatgtgttatgggatcttctcgtctttcaatatgggagactcatgctttcacttcaatgagtgctgtgcatgtggaactgggggatgagggaacttctactgatatatccaatctgcaggtgccgggatgcactgagattgtctgttcaggttatgatttataacagagatgaagctcggtcaatgtggttgcaagaataggtaattcaacactgttcttaatagagagggcactgcttatttagatcatagtcgactatgggggttttgaccacgataaaaaaaagccaactgaaagaagaaaaattccagaagaatctgtgaaacagacgcaatcagatgactgaagtaggcaatctttagagactgctacatgtgcgagtcagatggcagaggaataactggccttaagaagcttcgatccttgactggtccataggagtcagaggatgtctattattttataatgaatcactgcagggtggaaaacatctcaaacatcactcaagccgatctctttgtcttatagataagggaagccaggtcttgaagatttgagactcgccaaagtcttaaaacctgtgacaggcagaggtagggctgcatgctgggtttcagatctctgacccagtgttctgccctctgccatctgaccatcctcatgcggaggtcagagcgctcatgaccacatgcgtcacagagtgagacaggccttagagcctgagatccaggtgtctcctgagaaaactgcgagcgccgtggtgacagagtggacgaagagacacaaggaaggaggagaacaggcggcgccaaacagacgctgagtcctctttataggggcctcaaggatgcaggaacactcagggaaaggaagagctgcctctgcaacctaatgaaagctgcggcccggcagggcttgatcgcagagatccttgtgcttcccccatccctaggggtatttgttaggaaagaatggttagtttgtgtttttcacaatattaaaaaccttattccataagatttactttagagacaggttgctttccttttgactcacattttctagtaaaatatttaccccatggaatttggggagcgattctggaggcggatgcacacgttccgtgactgtgtaatcctagaagaggcgatgatgagggcactgggatctctgactctgcagtggtttttgttttatgttgtagataaattctttgtgttcagacactgactggtttcctcccaaggtgtttaggaagctccgtaagtgctcacttacagatcttcataatgccgctgtggttgtaagaggctgacacatttgatcagtgctggctctatatctataaaaactgacttcstggattacacaggttgacaatatggtccatgatccatattttgtaaatggaagaactggagcccagatasagaaaatgacacaaggctccacaaatcaatatcagggcctctcggaacagagcttagctcctttgactcrttgtctgattctttattttgctaccttccctctctaaaacgcttgtcaagtgcaacttgcagataaaaagccttcacccagaatgctctgtgacagtgaagagaggtcagtctttacaatctgaatttgtattatggaagctgtcactataacgtgaaattgcaaaacagccgtggagactggatctaacctatccgttttaagaaccaagtgaagatgaccacatctcgtttttagtatggggacgttaaaaatggaatgtatttacacaacccatggccactgaaacaattgttgagttgcagtacaagcctgccccttgctgattacttcagtcaggatacgtggctcaggtgacggggcaatgccagtattagattttgctttatgttgtaatttttacctgtttgggatctgaattgtgatgagaagtatttcattcctttgatttacagtgttgagagcaaggattaatggtaggcaactttaatttagctctctcaacaactttcaagagataaagggctgtgaagatacaacgggatgttctaggattgcttccaaagttgttttgagcagacaactaatgagaagcattttcttaatctgatatctatttggcacgattattcttgggtgaggaagggtgaaagtgggtgggggaagagaggttgggaaactgtataaacattattgtgcttgttcactacataggaaagcagctggtttcttcatcgatagccgggattcttgccaaacgagaagagggggaccaggtggtccccggcacattcaatgcagtcagcttctgcaagatgagctctccgggagaacctaagtatattcccacagcagctccgaaatcgatgcgctccccagacaccctcctcagactgtgctcattctttccttcaggaagagactccttagctccacgtggcatttcaagccatttctggggataggtggcatctgcacagcctgggggattttagagctggaattttggtgattatctgctctcatttcttttgcttcaggtgaagaaactgaggcccatttcaccaacaatgcaactcacatgagaaggcactatttgcatgtcatggcagcagacagagtgaaaaagccactgtcaaacttcacgtccaactgattttatagaaatgtgctaggcatgaacctctactgcacccggcctatcagcacttttcattcgaccattcattcatttactccaaggtgctgtgtgtaagccagcttcctgtgctcagagagctcacatgcaacaaacatgcagataaacagtggcaattggcggcaaatgcatgaaaggagatactttctgctacatgaataacactcatcataataaattacaactgagaggataaagcagggagggaaatggtctcagccaactttacaaaaggagtcaagtagaacgtcttgaagatagtgacatttaagctgagacctaagtcacgggaaagagcaaaccacaccatgccgaggccctccaggaggaaacagtcagggttttaaggaaaggaaagaatatcaaaatggacagaacttgggagcaaggggcagacaggggccaggaagagagattagggttttaaaataagtgcaatggtaagtccttgcagtggagtgatacaatctgagtgacatttgaaggtcayttttgcttcttgtggctatggaatagtggggggagrtgggtggcaagagagacagtggagcgacaagggggttggttgyagtatttcaggcaagagatgatggggtagcaatggacagaagagatgatggggtagcagtggacaggagagagagagggcaggaatttgatgtatgtttggagatgataacatcaaaggttctcaccaatcccttgaaacgggaggatgaggtgaaatggaggaaatagaagtaactctccgttttctgtcttgaacctgagcagtaatawacagcagtcagcagtaagtaccattattytgacattcctaagatgaaaatctataccaagtactacataagtgaatacaattagttaccggacctctattagtgtctaacttaaaattagggaaaaagtaagacataggtaagactccagtctgttwctttttttttttttttttttttgtgatagagtctcgctctgttccccaggctggagggcagtggygcgatctcggctcactgcaaccttcgcytcctgggttcaagcgattctcctgcctcagcctcctgagtagctgggattacaggcgcccgccaccacgcccagctaatttttgtatttttagtacagacggggtttcgccatgttggccaggctgatctcgtactcctgaccttgtgatccacccacctcagcctcccaaagtgctrggattacaggcgtgacccaccgcgcccagcctatcaatttgctgtgaagattttgctttatgcatgacttcagactctcactttcttttctttgaatattatatacctatgttctattatttgattgcaagtcgggtaataatttttttccacctacatggttccttcattactaggcttctgtcacgctggaacatcagtaattttgacacgtccaagaaagcaggaagttaactcagaaatgtgtatcattcctactgctttaagtttggtttgacagtaaaacatatgcctttcaaaaggaaatgctgttttgttcttgctttgagattcctgaaaggattgcacgatctagccacaaatgtctcattaactctcacaatatttcagtgagaaagacagatacagatttttttgtttgacaatattcttgcagaaggagttatataacaatcccattataatttcawaaaataaattttaggctaatgtacacaygcatatcttkaattttgaacaaccaatgctattttctgaaggtaaaaccagatgtttactttcataataacctggagwagtgatagagacccaatttatttggtgttctaacacagtggaagagagaaactytctgaggagtatagaaacagacatacaacccatcagagattcattcacctacttaattaattatggcagtctggaatacagcttggcagaggaaaagataggtagtgtgtaactcactatgtaagtaatccacagtttgatgttagctgaacaaaaatattcttyaggaatatttgtgaatagcatccaatttttaaggtgaggaaatatagaatattttaaaatataaacaatgatttagctttcaaaatttgcatttatatttcattctgattttaatttatgaacgttttgtttgatagactcatttttgaagaacatatttgtgctgttaagtaaaatcacattttrtgatgtaaaataatatcattaaaaaagagaaagttcaatcctagcackttgggaggccaagatgggcggatcatgaggtcaggagattgagaccatcccggctaacatggtgaaaccccgtctctacaaaaaatacaaaaaaattagccgggcgtggtggcaggcrcctgtagtcccagctacttgggaggctgaggcaggagaatggcgtgaaaccgggaggcggagcttgcagtgagccgagatcgcaacactgcactccagcctgggccactgagtgagactccatcttcaaaaaaaaaaaaaagagaaagttcaataatgttctaccaaaatctattgatcaaaattctaaatataactaagatatgaagaccacacagtagatgtgacatagatttcatatctattacactaaaccttatgaaattaggtagacaatctacagaacagtttaacttttaataacacactttcagatttctataggaaataaaagtgtaagaattcagaaatctgacgtatcacagaccagacacatttgatacctgaaaggtttttttttttcagttttagtaataaaatcacttccagatgtattctaggaaaatatctgcttcttcatttcaaaccccaaatagaaagcatctgttattaaggcaagcattaatttctataataatacacatcatgtgctacttttgagcattatcagtttaaaacacttagtatgataaaacgtgtaataagggggaaaaggaaaccataaataatgtcaaggttaagtgtaattattacagaggctaggtgtaagttgccctgaagctgtacggttttatatttatttatctaatcactgtgtaatatccatataattttgatgtaattacacaaatttctcttccttatgagccagaaagagactatattccaataaagtaccatttgtcatttagyttaccagttttcttactaattaaagcaattcacaaaaccttacaagagaccatcaagtaacaaaatatataaaaatacatgtcggggccgggtgcgggggctcacgcctgtaatcccagcactttgggagggggaggtgggtggatcacgaggtcaggagatcgagaccatcctggctaacacggtgaaacctcgtctctactaaaaatacaaaaaattagccgggcatggtggagggcgcctgtagtcccagctgctcatgagactgaggcaggagaatggcatgaacccgggaggcggagcttgcagtgagccgagatcacaccactgcactccagcctgggcaacagagtgagactccgcctcaaaaaaaaaaaaaaaatacatgtcattccctccattaacatctttgtatccagcactgtagattgatggagtgactattgtgtgtcagcacttaggataccatgtcaacaaaacagaaataacagacccctggggatgatgacatcacgcaaatggtcatgaataacctacttctaattgaaagagaagcaaaatccaatgaacggaaggcaccaagtgccatggggcatacaaggtggcgctgaacctactctgggtcacatgaggcttctctgataaagatgtcttaggaaataagattagttacttgtttctagatctttattttcttgcaccatatccctaataaattccttctcaacagtgtccaggcaagcatttattcgttcaacaaatactaaacacctgcttagccaggccctgtcttttcctgtagagaaacaaatctccaaacctacatcaactcatccttcaacttgcttcactcctgaaaccatccacattggtgtatcggagctgcacgatattcctctcagttgacttggatgcatttcgtctcccatcccaaaccttctgcacaatctcaagccctctagtccagctttagcctccttattctcatcagctgcttttgcttcctacttcaaaatacaatgagaagaagaggtcagtgggtgaaaactcactttgattttttctaccaaatttacatctttatctgaatccaggcctgtcattggctgtgagtttccatgaattccatcttctaaagcatcactataatccattccttactcttcttcccctcaccaatttcttagccaaggcccagtggtctgaatgattgtgttccttcaaacttcacatgtttaaatcttaacccctatgtgatggtgttaggaagcagtgcctttgggaggtcattaggtcatgaggattaagcccttcatgaatgggattagtccccttacaaaagaggcccaaaacagatccctcaccatttctactatgtgaagacagatagaaggcaccatcttgaaccagaaagcagtctttgctagacactgaatctgacagtgccttaacgttggacttcccagatcctgagctatgagaaataaatttctattgcttataaatatctagtttacagtattttttatagcaaccaaatggactaagacaacaggcaggccttacctctgacccgagactttaatgacttattttctggtgtctctgccatcagtcttctactatctatccttcaagactctggccaagaggtacttgtaaatgcaattatgttcatattatactcctgctttaacaatccttcttggctccccacagggataaagtataatcactgatgcaacccttcgtccatgtgtctactcgcaccctacccaactccagctgtgagtccttaaggcacttccatcttcacagccacagccccactgggcatgcttccagataacagctcagcgagttccaatgtcctacatcacactctctagaggagacagcagcagatacataactacagtacaaagtgatgtcgttacattcagatgttcaaagctcttggagaatttcccagaggaagcctccttgaaaagatgccaccctccctaaataccagttcctgttgtttatctttctaaacccataattctgatcctgggggtcagtgacttagtgagtcacttcctaatcttagctcaggattttccttcaaaaactgccttctctttgctcattccttatgctggcggccaggttactttcctgcataaggcattgatcatggcttccttcttccaagagctcacttggagcctcctaacgcattcatgtccaggttaaagttctcttctagattgctgtgtgcagttaacttgtctggagattctcagatgtccagaacatctgttgatcattccaagcccttccttccagccttcataggccatatcctacttctggaatgctgcccctcaggacttcgaatcttctctttcttactaaagcagttcctaaaatcacatctttagtgaaaatgccaataatgaagataaaagaaggcctttatgatttcattaacttactatttttgtaattgttactttccataaaaatagttcaaaaagtcatcagagtttactctgtgatgaaaattttactgagcattatctcattttaccttyagaraagctcacttgttttatagacaagaagagtaagttttaatgatattaagtaatttgccctaagttatctagtttgtaaatggcagagctgaaatgtgaaatcagggctgactctacattcaggatttcagccactgtaatccattatctgcttctgctttcacggtgttgtattccagcattactagtaccctactcaacttctgttatggttatttgtttattcattttcaaaccaattcattaaataagtatttactgatttccagctcctcctggcaagacatctcactagtctttatgggctgacaaagatgtattaggcaagagtcttctgcccaagggaataacaatctaggttraaatagtgctagaaaggtgattgtttctgtagcttcaacccatgatctaactgatatattgcaattgcaatgaaatagaatagcaaaataaaaatggtgaaaatatgcaggcctggatagagttctgttgatactgaacaacctcctgatactggtgaattgggaggtcagtaacaattattttatacatataaaataattttatatgtataaaattataaatttataaaagtatatgtaaaatgtatatataaaatgtgcaataaatttataattataaatttatactttttatgtttaaatacattttatatttaaataaatgtataattacaaatttacacattgtattacacaataatgtgtaaataaatacacattatttgtatttatagatatttatatagacacaaatagacatactatatattaaaatgttaattctgggtacttctgttttattctatgtcattatatacacatgattttgaactgaaaatttcatataataaatttgtgacccatgagagttttatcagcaccttataaatacatcacataacaagagattagaaatcccaaactttgatatttgcctacttgaaatgtgaacagcttttaatgtctaatataatcacatcttggaaaaatcttttgttatgtagagttagtcattaataactacattccttaaacaaaggaaatcttttatactttaaattactctacctgccttcacctgcccaaacaagcatctttggtagtttttataagcaattaattatggaaaaccttgccttccttttcataactaagtttttagttattctgatttttatcctatactttcctagacatcttcatcttattatagcaaaacaagtatcattagaactaatatagatctataaatgtagaatgtggtccctcaaagtgaccctagaggtcttctaatcaaagtcccctaattatgagatgaagaacacaagatccaagtcaatttgctttcataacaacctgaacagaggcacgttcatcgtcaggaatacagttcagagaagctgctatctaccttgttcttcagtcactatccattgtcttccaacctcccagcacacatttgtagcatgtgacctgtcttagctcaggctgctggaacaaaattccatagactagtggcttaaacaacaggcatttatttcttacagttctggaggctgcaaagtccaagatcaagatgctggcagatgtggttcctgatgagggctctcttcctggcttgatgacagctgccttctccctgtgtcctcacctggtggtaagagagctcaggtctctcttcttcttcccataagaacacaaatcccaycatgggggccccactttcatgacctcagctaaacctaattaccccaaaacrcaccacttccaaatgctatcacattggggtttggggcttcaaggtgtgaatctgggggcatttaattcagcccataacatggcccaatcacatcaactacaccttcagaggaaacagtggagtcaacaactttctcagaaaaacaaatgcactcattcacttcagaaacatgtattacatgctaataactgttagtcactggagtacaagcatgagtaagacatagtctctgcctccagtggggcttagagcctggtaaagggcattaggcatagagatggacaaaaatccctaacctggtacagaggcagagagaagagtttcccaaggtaaggtggaggcccataagtgtcagaggttaaatgaggtagggccagaaaagggttcagagaagagggggcacttgacctgagcctagacagaagagcaggctggttttcatcacacacactagagaaaaaaggaaattcaaggaggaacaaaagtttagcagtgatgcaaatgatggttgattaaggaaccacaagaaatatataattggagcactaaccgtttactaaggagaaagagtgtgagcaaagacagagaggtaggtaggggccagctcacagacagcctcaggtgctccaagaaggaagaatcactaaagcattttacatatgggaatacatgcctctgctcacagcttagatgcatcatcctggcttggggtatggatctgattagaaggacactagactaaaggcaggactctagggaagcgggtagaaatgaagatggtggaggagaaggtggacactaggactgactcatcgattccagtcctaagtgactgggcagaaggtggtgccaccattcaaaatgaggaaatgagaagatcagatgtggagtggagtgtggtagactcagaggtggtgaagaaaaaggagaggatgaagactttggtactagattagttgcgtttgtaatccaggtgcctggtcaaccactggattacaaaagtcatgatgcaggaggagatggatctgcagctctgatagaaatacaaggttggagttatagatagacacatgatagtagaaactccagactgtgtttaataacaaggtcaacttcacctgctgtcatgctgtgacacccttggagtgaggctggatactttgcagttgcaagtgagacaatcaggatttgggggaatcttattcttcctctagacagcttccttaacaatcttaacagtcagcattttcatggaaacccctgaaactgtgaaagtaacagggatgacacaatatgtcagtaaggttatgagcagctttcacatgggctactgatgcaaaccttgcagtgacttccttcttgcctcgtttgagtacatctatgtgctgtgtcatgaataggttcacagggctatgagtgacagcaaaaattcaaacagcaaggtaagtatgcaatcctcatctggccaaaaagttattctayctctcatggccacaatatttgattctggcatgggcacatgacctaaaycaggttaacgcattacagtcttaactttggctcttaactaytgggaaagagaaaatgttttcctgatggtgctgttaaactagctgagaatgaagccaacaccaaagaaaatacatctgaataatgaaaaacaggctgaatgttctgacattgtttgtgtctctggatctagctgggtctgaagcaatatccttttaaattatgttagccaatgccctctcttttattttaattctacttttattttagatatagggggtacatgtgcagatttgctacgtgaatatattgcatccaggtagtgaacatagtacccaataggtagttttttaacccgcacgcttctcccttcctccctcctctagtagtctgcagtatcagttgtccccatgtttacgtccatatgtgctcaatgtttagctctcacttataaaagagaatgtgcagtatttggttttctgttcctgcgttaatttgcttaggataatggcctccagctgcatccatgttgctgcaaaggaaatagtttcattctttttaaggctgtgtagtattccgtggtgtatatgtaccacattttctttatccaatccattgttgatgggcacctaggttgatgtgtgtctttggtattgtcaatagtgcagcaataaacagatgagtacatgtgtctttttgttataataatctattttcctttcggtatatacccagtaatgggattgttgggtcaaatggtagctctgttttaagttctttgagaaatctccaaactgctttccacagtgaatgaactaatttacattcccaccaacagtgttataagctttcttttttctccacagcttcaccagcatccgttgttttttgagtttttaataacagacattctgacaggtgtgagatggtacctcattgtggtttgatttgcatttctctgatgattagtgatgatgagcatttttcatatgtttgttggctgcttgtatgtcttcttttgagaagtttctgtttatgtcctttgcccgctttttaatggggttatttgttttawgctcattcaattgtttaagttccttatagattctgggtattagacctttgttatgactgagtgcatatatacagarttcttttttctgtcatactgctggcacattcatatgtccaggatccaaccacattccaccatctgtaccatctgcaccytggtccaagccagaaccatctctctcctggatgaatgcacttatgtcccaaattgcctcctttttcctacacttgctcctctccaatttcttctmaactcaggagcccaagggatccttcaaaaatgtaagtcagatcatgttattccaatgctgaaaccctagactgcctcgccttatcactcagagtaaaagccaaagtccttaccatggtctgtatagcctaaagcttctggccccataaccatgctggccattgccccagcagtgactccatgctggggacactgacctccttgttctttgcagaaaataccagacccacccctccatgcacggcaggtctcctccacagagtgcgtgtggtggaccttcatctctttcaggtcttcacttaaatgtcgccttctcagcaagctcaccctgacccctctagttatacaagttcccatccccggccctactccttatcccccttcccagatccatcttttaacaattattgtcttccaatacacccgctataatatccatgtgttggccaggcacggtggctaacacctgtaatcccagagctttggtaggctaaggcaggaggattgcttgaggataggaattcaagactagccttgtcaacataatgagaaccccatctccactacaaaaaaaaaaaaaagttagccaggcatggtgtcgtgcacctgtagtctcagctactccggaggctgaggcaggattgcttgagtcaggagttctaggattcagggagccatgatcacaccactacattccagcctgggtgatggagtgagatttcatctctctctctctctctctctctctctctctctctctctctctctctctctctctatatatatatatatatatatatatatatatatatgctctatatatgctctatatatacactctatatatgctctatatgctatatatatgtgtgtgtatatgtatatttatgtgtatgtgtatatatatacacacacacacacacacacgcatatgtgtacccatttttattgtctgcctccacatacctgaatctaagctccataaacaaaggatcctaagtgttttgattgctgctttatccttagtgtcaagtcaatgtccaacatattataaatacttgataaatatttgtcaagtgaataaattaatgttaaaagcaaagcatacttttacacatggataaatggaacagatgctacaactaaaatgaccaccataggtcaggtaattaagaggagctaccaaatatgattgatttagaagtctaaagacataaaaatatgtctggtatgcttgggaatctcagtttcaagaattgtatatgagccattgtgtgcaacagtctgtcatacaaacgagataggctgtaaaaaatccttatctgagctattttaaaaatgggtttttaaatgaatatttaaatattaatatagaatatgaatatttgaaattcattatttttcataaaatagagttaatcttaaggctggcatagttttccaaaccttttgccagctagatttgcaaagcactacctccaaagctccaaacgtttcataagccacactggtctaattaatggctctttgtttttagtaatttattttcttttgcttaaagttctgaaggatggctaggtgatgcatgtagtcaaacatcttattattctcaggatttcaatggctttcccttctcactaaagcataagcatgttttatatcattagtgaaaaaatgttaatacctttaaacatgaaattcaagtatcatcgatagaaattccaactaaatttcatctagccttgctttgcacccaaagtaacatacctggcctgtctctccagcaaatggctgagagtctatgtccagcttatttctatttgtgtctctaggtactggggttggggctagatatatgtyctttatggagttttaaaattcaagttagatttcctaactcagattaaattcgagttctgggcttcttaattttaaaaggaaaaccattccaaatgatccttttttatatgmatgtgagacaaaaaaaaagtaaacagtgaaataaaaataaaacaaacaaaatgttcctttgccctaggaaacgcacaggctcttccatggacgtcgttgtctacatgcactcagaatggtcttagacatactgccttaggcttcctacaatacagctctagcaaaactaggctgtcccgagccccttgtaatagaattgactacctttatcccaagaaggtgtggaaaacaccaaaactctgcatgtggtgtgtgcccaggcagactttgaggggtccgtgctgtgagacctaaagttcttatgagattgtccaaaacaaaaaaacatgtcagcagggcctgtggtggttccatgagtgctaaatgtgttcaggacaggatcaagcgtgctttctttatcgaggagcagaaaatcattgtgaaagtgttgacagcataagcacttcaaaagtgttgaagctgtgaaagtgttgaaggcataagctgggccccacacatccattctccaggtgaggaccctgagaccagggaggctaagcccaaattcattttctagtgagtctcagacatgaggctggagctcaagtctgtctcactctactgcctacctctaaatcactagttcttatgtttgcttggttttttttttttaaacgctttactgacaaaaaggtaagtatttgtgtttctaaaaagatcaggtgagatttacccactacctacattaaaaatgcagtaaacgtcatgaatgatacaaagaaatatactccaacttgaacaccccagaaaactgataataggttacactgtgtccctcccctccagaaaaagccaagttgaactcttaacccccagggcctcgtgatgtgagcttgtttgcagatgtagtcaagttgactggaggtctttagacaggtcctaacctagtatgactgatgtccttccaaacagaggaggttggaaacagagacacatccaggggagggctgtgtgaggagacacagggagaaggccatgcggctgcaggagcaatgctgccccaagccaaggactgactgagaccaccagaagctggaagaggcgaggagggattctgccccgcagagttcagagggagcacggccctgccaacactctcatctgagacttctggcctccagagctttgagacagccaatttctgctgttttgagcctccctttcttgtggtactgtgtcacagcagccctgggaaacaaataacataacattgacctgaccaacatttattaatatccaggtaaagcggggcaaagctgctgatcgtggtgaagctgattaagggtaatttgacaacttaaactacttaaaaggaaactgtcaccgtagactaacagcaaaacctgctgacaaaagaaaataatctccaccttttggggctcttgatgcatcaggatgcaagtctgtggctggtctctggggtttctgactttctctaaaaccgaatgctcttgttctctttgatcctcagttttgcaccagtaaatattcccgactatttaactggcaccgccttgcacttgatcttccaccttaacacgagtcatggttgctttggagagtagactcagtgcaagcaacagggtatgtgcttgccctggggagcaaagagaaaacagcaggagaaaagcctccaggctcctgtgcttcccaccatgtccagaggctcctctcccaccaccaccatgtcgccaggctsctcccacctgccaatggagcccagctgtccccccaggcatgtgtacacgtacaaggctgttgccagccccggagaaagaagtccaaaaaggaaatggaagcagtacggaaaggacctggggtgtgattcaggctgggccccacacatccatttccagtgccagacctgggcccttggacaccaagactgtaacaccccagctgctgcygactaggatcagaagggccttcagcctcctttctgccaaacaaagagaatatcaaaacgttgaggcaggatcagtatcatcaataaatcatacgctatttctatgtctcccctgaaaacacaaatggaacattaaaacagattttgggctgggcgtggtggctcacacctgtaatcccagcactttgggaggccaaggtgggtggataacgaggtcaggagttcaagaccagcctggccaacatgggcaaacccggtatctactaaaaatacaaaaaattagccgggtgtggtggcaggtgcctgtaatcccagctactcgggaggctgaggcaggagaattgcttgaacccgggaggcagagcttgcagtgagccaagaccacaccactgcactccagcttgggcaacagagagagactccgtctcaaaaaaacaaaaacaaaaacaaacaacaacaacaacaacaaaaatagatttcaaaaccattaggggaatttgaaatgcttcccctctctcctgcttatgaaccctacccacctcacctggtcagcccgctctccccttttgctttttcttcttccttttctttctctcttcatctcacttgcctgcaggttcccttcttgtaagtgtgagcaactacagacaatgtcaaaataatttaatttcaaacccaggtacgttaacatgaaacagggagtaatggttatgtctacataatatctgatatacgtctagttacccagcagtagcagatgctgttggtctgcaactggtttgtcacgatggattaattaccatcctaagctcattttgctagtattctcagctactaatatcaggctaatacttaatttataaaaaggtaaaaccagctgacaggaataatcaacactgatctctaaaaagtactatatgaaccaatgtacagagtgaagagacaaaaaaatacacttgctataacactgcatttatttgcttactctttttgtttccctatactcaccaaaagctacttgacatgaggttttcattcatcagtacagtttcttcaaccagcacatgtctagtacacagtaagcctcaaaacttattcggttaatgaatgaatgctaataaggtggagaaaaaaatcactccaaattaattagtgggaagtgtaattgcagctctggacaccagaaatactgatacaatgataataatattttaggctaaagggttgtgcagtaaaaaaataatgtttaaatatttagagcaaccaattctaaattgagaacctttaggccattaaaaaaaaaaaagcaactcaggaaattttgtaactgtttttctagtctgtaagtctaagtgagggaagctaaagacaaacttatatacattacccatgtttttcatgttgaacatgaaggtcagggatttcaaaacacctgcttcattattttcacagctaaataaccaaagcatcattctgttttctaatgtaactaaaaattaattggaaatacattaaactagacaattgctttgagctgcttagtagcaacacatacaaactgaaacatttcatcagtctctgaagtggtagatgatactctaacatacaataagaatgcacactttgtaaagatgatattacttttaaataagcctatccacaggcaaaacaattattttacattgttttatttactactcaattagcaaataaaaactatgtggaaaatattgaggttataggtatttcattatatattagaattttgtaaaaataaaaaattggtattctacattaatattccatcttgatagttaatagatttttaaaaggcagtattgataagttcatatagtatttttcatttctgcttttttgcaaaaccaaaccacagcctaaatgtacactctgaagtctacagagttagagaaaaagtgaatttacatttaagaacagaatatgccactgttctttcttgtgttatcatggatgcttaacatttgctagtggaacaataagagagagaaatgggggtgggagaaagtgtgggggggttagggagagagagcgggaggacagcaagctctgtcagtcaagtactatggcagttctagacagttccaaggaaaaatctctgctatctcatatgttagcttgatagtcagtcagagaataatctcaaggtcatgtgaaccctaacatttttggaagcaattaatcttacattttctacttttactagataaaatgtattgctttgttcatgttgcctttcagaaaaaaaggttgattttatttaataatcattagtttacagtattatcttctaagttttcttccagagactgatctacatacattaaaagaagttttctatgtcatttaaataactgaattaataagcttgaacattgcaagtagctgtcgttcagttaaagcttaataaaaattttaaaatattaaataatacagattgctaaagctataccttttatatatttctgtttgaactcctccttaactaccgtgactacagagcctaaaagtcaatgaatatgattgattaaatataggttataaggagagtaaaattttaatgcagttatgacacttgtggttctttaaattaaagcaacacactcccctgaattcccaggtttcaccacacaaaatatttaaaaaatagctaaataataggtagataaatgcaatgaatttttgtacgccaaagaatgtacacagactacagccatggagatttttttatatatttgaaatacagatatttcttatcactgctagagacaaattatttagcaagaaaaattcacatatttatcagtagatataaaaccatatcacatgcaaaaacgtcgaagctagaggtagcccaagagaagaaaataaatcatttggtgccatttgagctgcaaaacctgattcaattatgagcccaggagcagagctggaagccattctctacctcttcccagactaaggatgatgcatgctacttcccatggccctttcgtgtaactgagccctcactaaacagggctatctcctttaaagatgtgatacaatttagtgtggttgttagttcaattctgggactctcctgagccaagactatcaatcacgccaaactgtggaattattcatacagttcagtattctggactgctgctcacaagagactgaagagatacgatcaagctcatttaatttagacttgaggctggacgtgaacctcactccctgtggaacagtactatttatctattgaaccacccaattccttaggttttgttgaagtggtttctgatggaagattcttttaggctattttacattaaagaggaaagggttataatatgaaaatttagtaatctatatacaacaaggggttcctaagttttaatacctagctgctgaaaggcaaaaaaactagatgtaaataggttcagactatttcatgacctacaatagtgtgctgtgtaatgtttttaaagttccatttttcctttagcactgtcttataagaagagactgggttagcaactaaataaataatttcttacaataaacggagggaagagctaatttactagaagatgagtctctctctttcatgacggagaggtagagataaaggatcattacccctgtcatttcagtttcagctacgtaggaactattgacatttttgtttaaggacaaatctcatttctgtgcttgagaaatgcacagagcatttctctcctaagattcagcagcagaaacctggaaagcagaagggaattcttggaggcacaagcaaagctgatgggttaagaccaggaaagctatgttggctgctagaggaagctcccagctctcttgctagtgctcccctccccagtaagactacaacgagagcaaaaaactgaacagactggcccttttaaaaaaccatcagctgaaagaaatactgaattgccatccctggaatgtttgcaccctgtaactgatgaaatctttaaaataaaaagaaattaaaacataaaccgttaaagtatgcccccagctgawagacaaaacagactctgcatggccaactgaggtgctcaaagtaaatacagaaacaggcagcaatagctgtgagagggagtggtcaggtactctgttctcagaaagatgttgtggacgtatcacaggacctccctttctacaatgaagccaaaccagttcctatgtttggtgataaaacagactgtggctgagaatccctccccgccaactgctgtttgaaagaaatatctgacagagaattctggtttggggcttggaggccaatcaatcagagccttcctgcctgtgtcaatctgggctcagctgtatcaaccaatcagggctcagctatattgatcagtcatagctcagctgtgctgaccaataagaactaagcgagtttcaatctttcatttgcataaatagacttgatagaaaacctgggagggaacttttgctataaagcccaaaccctttctttattctgtagaacatcattgcattacaacaaaagctgtgtctccccagtttgcaaactgttcactggaacaaagttgctttcctcctacttccttttcagggaactttcattcatgaaacaaataatacccaacttacagggaaaatacacacccacaaaccatctgtgttacatacaagattcaatttcacctgaagagggtaaaatccttcatctcatattcagagacaaattaaacactccgtctgttttaaattttttatattaattaaaagctgtactgcagtccccaatctttgttcacttgtttcactaagtgctagaacaagcttattttcatcaactggtttatcttgtccactctgtctaggcttttctttttaactattagccctttctacactgaaagagctttttcaatgtttatattgaatttttcccatatacattttacaagtttaaaatatcagtttgtattgaattcaggaacaattagatatttgtagtattttttcctttaattcatttaccaagaaaaatagacttgaaaggattaatatgctttaaatactgaaacaaattttgaatcatgaacgtatatccaaaaccatattttaatttggagatgagaaggcatgaaattcactgtacaaaatatgatctgttcaactacttttattattaattaattaatttatttattgagatggagtcttgctctgtagcccaggctggagtgcagtggcatgatcttggctcactgcaagctccgcctcccgggttcatgccattctcctgcctcagcctcccaagtagctgggaatacaggcgctcgccaccacgcccggctaattttttttttcttttttgtatttttagtagagacggggtttcaccgtgttagtcaggatggtctcgatctcctgacctcacgatccacccgtctcggcctcccaaagtgctgggattataggcgtgagccaccgtgcccagcctgttygactacttttaataattactgcatcatatcagtaaaagttaatacataaaaatcaaaatgttcaaagaaaaaatggaaacaaaaacttagaaaaagataatttttttcacaaggattcataatgtgatttcttaattttttaaaaaacactaaaaattatttaaaaacaggtgtaaaatatgtamcattgcaaaatcaaaacttctttcaggatcawagttgttcagagtttttatgtttcatctaatgcaatttcccttagagacatttgccagtctttcagttccacatcctaggagagaggcccagaaaccatgcagacagcatctgttaaaaggctaaaaatctaagcagaaattaagacattttagtacctggtaaacacctgccagttcagccctcttcagagctgggccctaggagtaagagaaattggaaatacaacaaaccctcacaaaacttaaatcacagcctccaagaatctgacttagtttctgccctcactctatttttcactcaaaagtatgtatcactggggaaataaaatgtcattaaattttttcatacacagtttatttattttctttttaaaacttgacacataatatgtgtacctatttatcaggcacttgtgatcaagctagggtatttatagtatctagcacctcagagatacatcatttctatgagttgagagtatttcaactgctcccttctagctcctttgagatatacaatacaccgttattaactatagtcaccctactctgctattgaacattacactgtattcttcctgtgtaattgtacagacccattaaacaaccccttcattcctgcccaactacctgcacatccttcccagtctctggtatctataattctactctttacctccataaaaccaacattttttaagctcccacatatgagggagaacatgcactattaatttttctgtgactggcttatttcacttaacataatgacctcctagtcctccatgttgctgcaaatgacatgatttcaatttttttaaggctgaatagtattccactgtattccatgtatatgtactacatttttaaaatgcattcatatactgaggaataattaggctgattcatagctgttgtgagtagtgctgcaataaagatggggtgcagatatctttttgatatactgatttccttttttttggataaacaccgagtagtaaaattgccatatcatatggcagttctgtttttaaaattttgagtcatttccatactgttttccatactggctataataatttacattcccacatgctcaccggcatttattttttgacattttgataatggtctttttcactggagtaagatgatatttttattgtggttttgatttgcatttccccaatacttagtgacgttgagcatttttatatacttcttggccatttgtttgtccttttttgaggaatgttcatttggattttttgcccattttaaaattggattattagggttttttgctgttgacttgtgagtttcttgcatgttctaaatattagttctttgtcagatgaatagtttgcaaatattttctctcatttttaaggctgtctcttcattctgttgattgtgtcctttgctgtgtagaaggttttagtttgatatagtccaatttgtctatttttggttttttgcctatggttttaaggtcttagccataaaatcgtttcctagaccaatctcctgaagcattgccccttctgttttcttctagtttttagtttcaggtcttacatttaagtgttcaattcattctggattggtttttatatatggtgagaaataagggtctagtttcgttcttctgaacacggatccagttttcccagcacaatttgatgaggagtgtgttttccccctatgtatgttgttggcacctatgtcaaaaatcatctggttgtaaacacatagatttatttctgcattctctattctgttccactggtctatgagtctgtgtttatatcaataccatcctgttctggttactaaagctttgtagtttattttgaagtcaggtagtgtgatgcctccagcttggttctttttgctcaggattgcttcggctattcaggctctttttcagttccatacacattttataattatattttctttctgtgaaaaatgacattggtattttgatagggatttcattcaatttgtagattgctttgggtaataaggtcattttaacaatattawttattccaatccatgagcatgggtgacctttgtttgtgtcctctttaattttttaaatcagtgttatgtagttttctttgtagaggtgtttcacctccttggttaaatttatctctagattttatttatttatttttgtagctattgtaaatggattaccttcttgatttctttctcagttagtttattattggtgaatrgaaacactgctgatgtttgcatgttgattttgtatcctgcaactttactgaatttattatcagatctaggagatttttggtggaatctttgggtgtatatatatatatatatatatatatatatatatatatgattatatatatatatgattatatatatgattatatatgagtatatatatatgattatatatatatgattatatatgagtatatatatgattatatatatagattatatatatatgagtatatatatgattatatatatattatatatgattatatatatgattatatatattttatatatatgattttatgtatgattatatatgattatatattatatatgattatatatatgattatatatgattacattatatatatgtaatcattatatatatgattatatgtattatatatgattatatatattatatgattatatgtatgattatatatggttatatatagattatatatgatatatgtttatatatctatattatatatagatatacatacacacccacacacatacatgtcatctggaaagagggatgatttggcttcttctcccatttggatgtcttttatttctttctcttgcctgacgatctggctacgactttcagtagcatgttgaataggagtggtgagagtggtatccttgtcctgttctcaaggggaatgcttccagcttttgcccatttagtatgatgttagctgtgtgtttgtcatatatggcctttattattttaaggtatgttccttctatgcctactttcccagaaatttttaacataaaaagttgttgaattttatccaatgcttcttctacatctattgagatgatcatatggtttttgtccttcactctgttgatttgatgtatcatgtttattgatttgcatatgttgaaccatcctttcatccccgggataaatcccacttgatatggtatattatctttttgatatgcagttgaatttggtttgctagtattttgttggggatttttgtgtctatgttcatccggtctgtagttttcttttttgttccatctttgactggttttggaataaacgtaatgctggcttcttagaatgagttaatgagaattctctcctctttgattttttggaatagtttgagaattggtgttagttcttctttgtaaattttgtagaatttggcagtaaagcctcaggtgcagaactttgctttgttgggagacttttttttactgtttcaatctaatcttattaccagtctgttcaggttttgtatttctttctgattcaatttttgtagcctgtatgtgtccaggaatttttctatttcctctaggttttccagtttgtaagtgtataattgttcataatagtttctgatgatcttttgcattttggtggttatcagttgtaatgtctccattttcatttctgattttatttgaggttttcttttcatttttttttccttggttactctagctagtggtttattgattttgttgatctttaaaacaatgttttgatgatcctttttttgtctctattttatttagttctgctctggcctttattatttctttccttctactagtttggggtttggcttgttcttgactttctatttccttgagatacatcattagattgtttacttgaaatctatttttttgacacaggcatttatcactayaaactttcctttgaacagtgcttttgctgtatcccatagcttttggtatgttgcattttgactttcatttgtttcaagatattttttaatttcctccttaacttcttccatgacccagtggtcattcaggaacatgttgtttaatttccatgtgtttgaagagtttccattgttattgatttctagttcatcattactgatttctagtttgatttcattgtggtctaagaaaatacttgacatgatttcaatttttaaaaaatttgttgagacttgttttgaggtttaacatatgaactatcctggagaatgttccatgtgctgatgagaagaatgtgtattctgcagctgtcagttcaaatattctataaataccaaaggtccttttggtctaaactgcagtttaaattcaatgtttctctgttgattttctgtctatacaatttgtctaatgctgagactggggtgttgaaaccctcaactattattgtactggactctaactctccctttaaaactaatacttgctttacatatctgagtgttctgttggtgggtgcacatatgtttaaaattgttacccctcttgttgaattgatccctttattattatataataaccttcattttttgctgttttttatttaaagcttattttatctgatataagtatagctacttctgcccgtttttggtttccatttgcatggaatatttttttccatcacttactggcagtctatatgtgtctttacaggtgagattagtttcttgtaggcaacatacagttgggttatgtattttatccattcagtcagtctataacttttaagtgaaaagtttaatcagtttacattcaaggttatcattgatatgtgaaggcttattgctgtcactttattaattgatttctgcttgttttctatatctttttttttctctgttaatgtttagcattgttgtttggtggctttctgtagtggtaacatttcagtcttctatttatttttacccataggttttacactttctatttggggatcagtaaatgtccttcatctgtatgtctaaatatctttctaaacttgggaggttttcagctattatttggctaaataagttttctatccctttttttgtttgtttttttcttcaccttctggtacaccaaaatttcaaatatttggacactttatggtgtcttatatgtcagaaagtccttgttcatttttttaatcctttttccttttttttgtctgactgggttatctcaaaagacctgtctcccgattttgaaattgtttcttctgtttgatctagtctactgttaaagctttcaaacatattttaaaatttcattcaataaattgttcagttccagaatttctgtttgatgctttttataatatctatctctttggtaaacatcttattcatatcctgaattgcttttctgatttatatgtattatttatctgttttctttcacatctcacagaattcctttcaaataactattttaaattcttttcccaggatttcataaattttgttttctttggaatgtgttgctagaaaattattgtatttcttttgaggtgtcatagttccccacttttttatgtttcttgtgtccttacattgatatgtgcacatctgacacaacagtcacttctccagttgtttgaattttcttgctaaggaaggattttttcctcaagatgtacctatgatgttggtttggtagtgcactttggctttgattctggatatatgcagtagtatagtttctctatgatttatttggctgtaaacagcatcagtggtatctgtaatttcctcagtggcttacggtagttattactagaagctatggtgaagttttgctgagataaggaggacaggtaggccagtccacaggccccagtggtggcagtgacgggccaagaatacccatccttcagcctcagggtaggctatgctggtactagcgctagcaggaccaggcaggcatattcttgggcctccaggtggctttctccggtgccagctgtgggctgggcaggtgggtgggtcctcaggcacctggatggcaggtgtggtgtgagcaatggcagtagtagcagcatgacaatcctctggtttccaagtggtccatgctggggtctgtggcggctgcaatgagctgggtgggccagtcctcaggcccacaggtggtagcacatgtaggtgggtgccagctgtggtggtagtggcaggttgggtaagcctgtccttaggtccctgggagagatgctcaggtgcctatggtgcacagggcaggagaatcctcaggtacccagayggcgagctcaggcactggaggtggtggagccaggctaagtgagtctgtcctcaggctccccaagtggtgcctgcaggcactggctgtggtaggcagtgacagggtgatccccaggcccccagtgaaatgcctgggttggggaaccagcggctgcactgcggccctgctactgaggagagcagggttgctttttcagtggcagcagccatacgcaggcagctggggagtgtgcacttcagcctggtggtggtggcaggcagggtaccttgtcctcagggcacttataaatgcacaacagcccactgctgctggtggtgagagtgctgccaagggctggtgctttggccctggtaacagcagccagcagcgatggcagctatggatgggggatatcaatgggcctcagggatgtaaagatgtggggccatgggtccccagaacaggatgcattctgctgggggctgggctctcaaagtggcactttgttgtagccacttaagacataagggtgtgtgtgggagccagcatgagcttctctcgagcaatgcggtcacagagtttccaggcagctccccatgttagtctcagagcctgcaggggttgagtcactaggattgcagaagtccatggtgggaatgtggtcagctgggggtctctcacttaccctttccctgcactgggagcctctctgggctcctggccaatcccagctgagctggctgccttgcttctctctccttttttgccttaggtgtttcctgtcacttctttgttgaattccagtgtctttcttagataatctattcaaagtttgattatctactcactattttggttcttctttgtggaggaggcaagtaccagatacctccagttagctatcttgargccccctccatatacgatttctggcactgaatcaatcaaatattacaagtcatgccagaagccaaaaccaaatgactgaaacccaagaaaaaaataattcagagtaatcaacaggtgaatgaggtatcattataacatatgggctttaattatgacaaatatgttcaaaaagaggaaaatgtgaagagtttccgtccagttccaaagaactggaacatacagaaagaatcaaatagaaattctagaatggaaaaacactataatattttgaaattagggatttaatatataggtttgggagctggttatccacactgaataggggaataaagaactggatgaagtgtcagtacaaaatacccaggtaaatgcagagaaaaaaaaatagaatgaaaagtaaacatagtaggagatgcatgaaacagaaagaaaggtctaataaactttgttatttgagtccctgaagaagagagggggacaggaagtcatattgaaagcaataccagtgataattttcacaaactgaaaaataatcctccctcccctaggtcttattcagtatgtggagagaatagctctactctaaccctgattaaagaaacttgcctaagattttgatcatgttaaagaaactatgatttcaaaattccatagaggtttcttttggtgcgaaaggttagacagggagttttagactgtttatttagcaaagcttcaattttggttctgcaaaggtggcttagattctactctsaggtaagggttgaatagctcaagtgcttgacatggaaaagaatagcagcttgggatttgaatctggcagctagtgagagggtgagtggacatttattatagaaagggaggaatttttacagctgggtagagcaaagctcaaactagtaatgaaagcaactggctttttttcttttaaagttcaaactgataacttttatggagtttaacaataatctctaacatggttatttgatttctgtttattcttttcagccactacattttaaatttctttttaagtttttaattaacaaattataattgtatgtatttatggggtacaatgtcttgaaatatgcatacaatgtagcatgattaaataaagctaattaacataaaaaaagaaagtgcatggggagagtgtggaataatcagcgaggcttaaaggaggcatagcaggcaaaaccaacagcaacaatgacagtaaaatcacccagaaactcctcctgccaggaaaatgcaggtgaattgtgaaggcattgctgtctaagatttcattttactctgatctgatttcctttcactgtgatgtgcttaactcgccaggcctgtccccaaacctccagtgaaattttgtggcgtgcaggaccttgcactcgcagtactttgggacatgaaagaatccagggcagcatgtggcacacgtggaagggaacgtcatgtgctggatacaagacgcaaaggaaggactgagaatccaacagaacagggagtcacagggcgggagccagaagaaatgaaataacctcctaaaaatccttgggactactggagagaagaaggaggaaaacaagccacccaatctctcacagtccgtgggatgagggcttgagtttctctttaatattagagaagagggtaaccccaaaggctagaagccgtggggacacccggtggaagatactggattgtgtgtatgcatgatcacacacacaaacacacacacacacacacacacatgcacaaacacacacgcgcacgcacacaaacacacatgccaggaagaaaaacacagtgattacattcattaaggattggtacatttttccacgtaatttcatttaaaaacaaattctgagctctgatacattcattatatcctgtgctgtagtttctgatagtccagtaaaaactcatttctctaaggttacgaatgtacagtaatgaccctgtttgccaatatgacaaaaaactgttgttgtcatcttccttcataacatttcacccctccaatgataaaatgcccacaaaatcaaacccgaagcagaaaaagcaactgtcacttgcccctgctgctggtgagaaacaaggcctgctgacagcagcagccggtccaggcacggagcagagcgggagagcttcacgtgggactttcaagtcttgtgaaaaacaaatccctttctgctgccatctgattcatagggaaacattccacttactccttttgctttattctggactcaaatagagaggacagagagagataaaagagacacacagagataaaacatcacacacagaaaggaagaagagaaagaagacacatacagacagacagacagagagagataggagaaatgggcaggagagagagagagagggagagagagaacatagagaaccacccactaatgacagtcagatataaagagcaggaaacaaaatagaagtcagagagccaaggagaagaggggcctcaatctctgccttgcctagaacagagtgtagggcagtaagtttgagttctctcttaagtttttcttctaaacctgcctctacttctcatttgttgcctgatcttgagcatatcagggcacccctctgagctttagcatgaatatctataaaatgagatatttgaaaaagttgctcttgatgtttctttatgactataatagtccatggctcctgatccatgatccagaaaaagtatagaaatctattatactgagtgtttatttgcagttagaattagcaacaaacttaaataatgggtttggcttagcttcatttgagaaaatactttgacattctgggtttgatttgcttcaataattttagaaaatataattaccagtatgaactaatttactgtatggttcttaatttaagaaaaagactgacagcaggcrctaaataaattttgcaaattagcaacttaaatgaaattatgaatttaaaatattgcttaaatcgaagtaaaataaaagcccagcaccaaaggcagtgttcaacaatataacagatagaaaacattcattaccagaacatgctagaatcagctaagtgacacacacacacacacacacacacgtcaaatacaggagatgtaaaattaatggaaaaggaataaggagaacaaagaataggagaaaggaggaaaaaagataggagagatgagatgaaagaagtagagaagagcaagaagagtaaggaataaagaaaaacaccaaaaagaagaaagcctcattacctgtgcttttccctcccttgaaataatctttgagtcctcatcaggttggctctgggcccaaatgagatactggatgtaaatggctgcaatagctctttagtttaattaagtctcagctatttatctttgtttttattgcatttgcttttgggctcttggtcatgaaatccttgcttaggtcaatgtcagaagggtttttccaatgttatcttctaggttttttatagtttcaggtcttagatttaagtccttgatccatcttgagttgatttttgcataaggtgagaggtaagaatccagtttcattctactacatgtggctgggcaattatcatttgttgaatagggagtcctttccccactttatgcttttgtttgcttttttgaagatcagttggctgtaagtattcagatttatttctgggttctctattctgttccattggtctatgtgcccatttttataccagtaccatgctgcttggtgactattgcctaactggtacttaattaaactaaagagcttttgcacggcaaaaggaacagtcagcagagtaaatagacaacccacagagtgggagaaaatcctcacaatctatacatctgacaaaagactaatatacagaatctacaaagaactcaaatgaattagcaagaaaaaaccaaacaattccaataaaaagtgagctaagtacatgaatagacaattctcaaaaaaagacatacaaatggcaaacaaacatatgaaaaaatgctcagcatcactaatgatcagggaaatgcaaatcaaaaccacaatgcaatgccaccttactcctgcaagaatggccataatcaaaaaaattaaaaaataatagatgttgggatggatgcagtgaacagggaacacttctacactgctggtgggagtgtaaactagtacagccactctggaaaacagtgtggcagttccttaaagagctaaaagtagaactaccatttgatccagcaatcccactactggtgggagtgtaaactagtacagccactctggaaaacagtgtggcagttccttaaagagctaaaagtagaactaccatttgatccagcaatcccactactgggtatctacccagaggaaaagaagtcattatacgaaaaagatacttgcacatgcatgtttatagcagcacaattcccaattgcaaaaacatggaaccaacccaaatgcccatcaatcaacgagtggataaagaaactgtggtatatatttacaatggaatactattcatccataaaaaaggaatgaattaatggcattcacagcaacctagatgagattggagactattattctatgtgaagtaactcaggaatggaaaaccaaacattgtgtgttctcattcataagtaggagctaagctatgaggatgcaaatgcataagaatgacacaatggaccttggggacacaggggaaaaggatgggaagggggtgagggataaaagtctataaactgtgtgcaatgtatactacttgggtaatgggtgcaccaaaatctcacagatcaccactaaagaacttactcttgtgaccaaataccacctttgccccaataacctatgaaaataaaaaaaaaaattaaaaaatgactgcaaataaaccccaaagcactaagcaagggagtggtattgttgttttatacttttctcaaattttcacttcctagatttgaagttttggtccaaccgagacaacagaatatgttactaaatggttaatattgttacagggatgctaccacattacactattttgattaagatgtggttggtaaatatacccacaagccttacattacaagggctctggctaatttgtaacctagggcaaatacgaccatacttacaatggaaactggtttggggagggaggtctacgtcactgacagaatgagagatctcctaattcaccctgcaagtgtcacccatctagaaagtaacacccgagacatagatgtgaagatgctgctcaccgcctgtggacaagctgagatctagataggtgtctcttggcctccatgtgagggtcttctgcatcctcccgcattctttcagtgttgggatcccacaggttttgttcttagcactcccttctctctctacacctgcactgtctagcacagcagccagcagctacctgtggttgtgtttgaaatgtggctgataccacatgttaagatgatatttaaaatatatcaggttaattcattaaagttaattttaccaattttattttactttttaaaatgtggctactagaagaatataaaataatacgtgattcatattatatttctattgaacagtgctgctcttcaaggttcatcaggattgtctaagctccacccatgccttttcagttattctgacaaatgacatcagtctaracctttcttttgaacttcaaatcaacttattccttttctactctggcactttcaaactcagtgtatttcaaattcaactcatttatctcgttctcatgagaaaagtatcctttttcaaatgcttctcttatttaagtcagaaactgaaaagatggccttgacctctctctattgaatgcttaacccagttgtatagatgcatgatttctaaaatattttagaaatgcacatcttagtaagaccatgaaagtaaatgggtctctctataagccaaactaaaaaaaaaaaaattctgaacaattacagatatatacttttcaaatgaattatytgctttttatttaataccatgataattgttaaagcagtctattaacaacagaagcaatatttagaatgcatgcttaacaaagcaatatataatattaagtaattaaaatataaaattataatggaaacaataaattggcaagggatcatttaccttttggataatatagtaacattttctgcaatatagtgtgtttggcaagattcagtatcagaatgtcctctcactaccaattctgagtatatttttaggcactgcaaggcaatgcttgctcaatggaattggctatatcactatattaatagctttgagacacactaagccttaccaaaaacatatcatgttgagtgaatagcaaagattgtttaagttaatacatttataaacaaaattgagcttgagattctacttatggcaagtctatgcaattcttctgcatgtgtgagcactcgatagagtttcgctgtgtccccacccagatctcatcttgaattgtagctcccatgattcccawgtgttgtgggagggacctgatgggagacaattgaatcatgggggtggtttccctcatactgttttcatggtagtgaataagtctcacaagatctgatggttttataaggggaaacccctttagcttgactctcattctctctcttgcagctgtcatgtaagaagtgccttttgccttctgccatgattgtgaggctttcctaggcatgtggagctgtaagtccattaaacctctttcttttgtaaattgcccagtcttgggtatgtcttcatcagcagcatgaaaatagactaatacagcactggtgatggcttgattttgaagaacagtaatgttgaagtatgtttcattttgctcccagtagtctttgaacttgaagtttaaatttggtaatattcaatatatgataacaaacattaagttatactatcttgcaattttcaatgatctctaatttctcagaaagaaatgttcctgttcacaagaaacatgaaaaacaagaaaacatgacacttccaaaggaacacaataattctccagtaacagtgaaaagaaaagaaawtctatgaaatgcctgaaaagaaatccaaaataatgatcttaagaaaactcaacaggttacagaagaaataaatcaggaaaataattcattatccaaatgagaaattttaaaaaagaaatagcatataaaagaaccaaacaaaaatcttgtaactgaaacatataatgagggaaataaaaaaaaatacaattgagaacttcaacaacagactacatcaagcaggaataaraagaatttctcaactcaaagacaggtctttaaaattacgtagtcaaaaaaaaaaaaaaaaagaataaaacagaatgaagagagcctatccgacacatgggacatcactacaccacgaagtgaaaaaagttttgcattttgggagttccagaagaacaataaatagaaaaagtcctagataatttatttaacgaaataatagctgaaaatttcccaagtctagaaagatatttagacatatagatacaggaagttcaaatccccaaatagattcaacccaaaacggtcctctctaaggcaagttatagttaaactatcaaaagtcaaagacaatgagaaaattatgaaaacagcaagagaaaagcatccaatcacatacaagagaatccccatcagactaatagcagatttctcaacagaaaccatacaggcctggagagaacaggatgatatcttcaaagtactgaaagaaaaaacaacaactatcagccaagaatgttatacccagcaaagctatccttcataaataaatgaaaaataaaatctttcccagacaagcaaaaactgagggaaattcatcaccactagactagtgctacaagaaatgtttaagggaaccctgcatgtgtgagtgaaaggatgatatctaccatcatgaaaacacatgaaaatataaaactcattggcagagtttcatattctgccacaatacacaaatgagaaagagataggagccaaacattaacactacagaaaaccacaagactgaaaagataaacaataaaagaggaagaaagaaacaaaggatatacaaaataatcagaaaacaattagcaaaatgaatacaataacaactttgaatgtaaagggtttaaattccccacctaaaagatatagactggctacatgataaataaaacaaaacaaacacagtgaaacaactatatcctgctgaaaagaaatttcacctacaaggaaacagactttctgaaagagaagggctggtgctatagtttggatatttgtcaccctgaacctcaagtataaatttgatccccaattttaaaggtggggcctaatggaaggtgtttgagccatgggtgcagatccctcatgaagagtttaacgcccgccctcccaaccagggaagtgagttctcattctctttttttcatttatttatttwttttttttgagacagtctcgctgtgttggccaggctggagtgcagtggcatgatctcggctcactgcaacctccgcctcccagctcaagcaattctcctgcctcagcccccygagtagctgcgattacaggagtgtgccaccatgcctggctatcttttgtatttttagtagagactgggtttcaccatgttagccaggctggtcttgaactcctgacatcaggtaatctgcccacctcagcctcccaaactgctgggattacaggcgtgagccaccgcgcccagttgtgagttctcattcttattcgtttatgtgaaggcyggttgttaaaaacagcttagcacctcccttccctctctcttgtttcccctctcactatgtaatctctgcacacacatgttcacctttgccttccaccatgatgaaagtagcctgaggcccttgccagaaatccaatcctgaactttctagtagaaccatgaactaaacgaaccttttttttccccaaaattacccagccttggatatttctttaaagcaactctaaatggactaagacaaatggaagaaaatattccacacaaatggaaaccaagagtgtgcaggagtagtgtaattatatcaaacaaaacagactttaagtaaaaaaaaaaaaaaaaaaaaaagatacagaaagtcattatatactgataaaatgataaatttagcaagataatctaacaattgtaaatatttatgctcacaacaccaaaacacccacaaatgtaatgcaaatattagctaaagagagacagataaacctcagtacaataaaagctggggacttcaataccccacttttaggtttggaaaaatcatctagacagaaaattcaccaagaaacactggacttaaactgcactacagagcaaatgtacctaagagacaagacatttcatcaactgtaatatacacattcttctcatcagcacatgaaacattctccaggataaaccatatattaggccacaaaacaagtctcaacacatttcaagaaatgaaagtcctattgttttctcacatcacaatgtaataaaaccagaaataataagaactttgaaaatacaaatgtacggagagtaaacaacatgcttctgaatgacaaatgggtctatgaagaaattaagaagtaaatattaaaaagtcttgaaactagtgaaaataaaaacactaaacatataccaaatcatatgagatacaggaaactctgtacacagaggaaagtttacagcaataaacacctaaatcaaaagtagaattcaaataaacaacctaatgatgtatctcagagaattagaaaagcaagaaaaaaaaagctaaacccaaaatttttagaacgtttataaagatgagagcagaaataaacaaagacaaaaatattttagaaatctgaagatgtaaaaggctgttttttaaagataagcaaaattggcaaacctttagctagacaaagaaaaaaagagagaagacccaaataagtaaaattagaaatgaaaaggacacttaacaaatatgatcagagacatacaaataattagagattattataaacaactatacaactacaaattagaaacctagaaaaaaatgataagcttctggacacataaaatctactaagattaaaccatgaagaaatggaaaatttcaagaaaccaatagtaagtaacaaaattgaagctataatgaaaagtctcctatcaaggaaaagcccaggacccagttgcttcactgctaaattctaccaaatgtttaaagaactaaaaccaattatactcaaactcttcaaaaaaaaattgtgtgtttttagaagctttattgaagtaaaattaatattgaaaaatgtactattaaagtrtacaatttrataagttttgacagatgtgtacacccatgaaacactatcacttcagtgaagaacatacccatcaaccccaaaagttttctcatgcttctttacgattcctctcttacctctcccaccccatgctttctgtcactataaatgtaataaacgtatattttctagagttttatataaatggaaacataaagtacgtactcctttttgtttggtttcttttattcaacattactttttttagatgcatccatgctgttaagtgtgtcagtaattcatttctttttattgctgagtagtagtagtctgtagtatgcgtacatcatcatttgcttacccaagaactgtaggtgaacatttgggttatttccagtttagggtatttacatataaagcccttatcaacattcatgtcgaagtcattgtatgaacatacattttctttccttctggataaatgcctagaagtgaaatggctctacatatggcatttgtatctttgactttttgagaaactggcaaactgttctctaaattggttgtaccattttacattcccatcaacagtggatgaatgctccaattcctctacatcctcaccaacacatgacataataagtctttttcattgtagccactctaataggtgtgtagtggtatcactgttattttaattttcattcctaatgaactaatcatgtggtatttggcatatgtttatttgctttctgtatatccttggagacaactgatttttcacaaaagtacaaaggcaatccaatggaagaaggataatcttttcaacaaatggtgctgaaacaactgcatatcatatcaactgcaaaaattgatccatatctcatggcataaacaaaatttaactcaaactatcatggacctaaatgtaaaacataaaactataaaacttctagaagaaaacctaggaaaaaattttgtgaccttgggttaggcaaattttttttatatatgacatcaaaagcatgatccatgaaagaataaattgataaaactggacctcrtaaacattttaaaaatatcttttctttgaaaggcactgttaagagaacaaaaagacaacttgtgtgctggaagaaaatatttgcaaagcatacatctgataaagaagttgaatccagatatataaaaagaactctcataaatcaataagaaaacaattcaatcaaaaattggttaaaacaattaaacagaaactcttcaaaaattttttgtagaagaaagaatacttgcaaactctgtaaggctagcattactctgataccaaaatcagacaaggacacaacaaaaaaagaaaactataggcccatatcactgaagaacgtatatgaaaaaattatcaacaaaatactagcaaactgaatccaaaagcacttcaaaaagataatacaccatgatcaagtggcatgcatcccagggatgcaaggaggtttccacatatacaactcaataaatgtgatacatcatattaacagtaccaagaaaaaaaccatgtagatactgaaaaagcatttgacaaaattcaagattcctttatgataaaaacttycaacacactggtatagaaaaataaacttaaaaataacaaaggccacatatgaaagactcacagctaatataatactgaacagggaaaattgaaagcctttcctctacgatatggaacaagaaaaggatgcccacttttactacttttattcaatgtaataatggaagtcctggctacagcaattaggtaagagaaataaacaaagggcatccaaattggaaaggaagaagtcaaattagtcttgttcaaagatatcatattatatatagaaaagcctaaagatttactgcaaaaaaaccattagaactaataaacaaattcagtagagttgcaggatacaaaatcaacatacaaaaatcagtcataattatatatgtcaaaagcaatcaatctgaaaaagaaatcaagaaagtaatcccatctacaaaagttacaaagaatataaaatatctaggaatcaatttaaccaaggagtgaaagatctatacaagggaaactataaaacactgataaaaggacttggagagaccagaaaaaaataaaaagatactccatgctcatggattggaataactaattttgttaaagttaccacccaaagcaacatacaaattcaatgcaatctttatcaaaataccaatgacattcttaacagaaatatatatttttttaaatcctgaagattatatggaatcatgaaagacccaaaatacccaaagaaatcttgagcagagaaaataccccaaaacaaaacaaagctggagacatcacactactagattcaatatatattacgaagctatagcaaccaaatgagcatggtactggcataaaaatggacacatagaccaatgaaacagaatagagaacccagatataaatccatgcatttacagccaactcatttttgaaaaagttgccaagaacatacaatgggaaaagaacactctctttaatacatggtactaggaaaactggacatgtgtgtgcagaagaatgaaattagacccctacctctcaccatctacaaaaatcaaataaaaatggattagaggcttaaatttaagaccccaaactgtgaaactacccggagagatcattggggaaaatgctccaggacatgagtctaggtaagcatcttttgtgtaagacctcagaagcaaagacgatcaaagcaaaaatggacaaatgggattatatcaagctagaaagcttttgcacagcaaggaaacaatcaaccaagtgaagagataacccacagaatgggagaaaatattcacaaactatctatctgacaagtgattaataaccagaattataagggactcaactcaataacaaaaagtaaataatacaatttaaaaatgggcagaagatccaatagacatttctccaaagaagacttacaaatagccaatgggtgtataatcagagaaatgcaaattcaaaccacaatgaaacatcttaccccagttaaatgccttttaccaaaaaggaaattaaggatgccggtgggaatgtcaagaacggggaactctttacactgttggggggaatgtaaattagtacagccagtaagaaaaactgtatgaaggttcctcaaaatactaaaaatagaactcccgtatgatccagcaattcctctgctgggtatttatccagaagaaagggaatcaatatattaaagagatatctgtattgtcatgtttattggagcactattcacaataggcaaacaatggaatcaacgtaagtgaccatcagtggatgactggataaagaaaatgtagcatatatacacaatggagtattattcagcataaaaaaggatgaaatcctgtcatttgcagcaacatggatggaactcatggtcattatgttaagtaatatatgccatgcacagaaagacaaataccatacattctcacttatatgtaggagctaaaaaaaaaagtggaccttattaagaagaaaacaaattggttgttaccagaggttggaaagagtggggagtagggggagaaaataaaaacatacatacatatagccatatacaatatgatagaagaataaggcctggagtttgayagatctgtagggtgactatagcatacaacgatctattgcatatttcaaaatagctaagaagagaataattcaaatctttctagcataaagaaaagacaaatctttaaggtgatggatatcacagtcacactgattagatctttacaaattayatgaatgtattgaattatcacatgtacccagaaaatatgcaaatctattatgtatcaatacaaaaaatttaaaaatartttctttggagaatattttaaaattatgaaaaaaaccattagctagactagaaraaaatagagaagacccacatacatttaaatcagaaatgaaaaaggagacataacaactgagaccacagaaatacaaaggatcattagggactattatgaacaactatatgccaacaaattggaacacctagagaaaatggatgaatttctcggcacatataacctaccaaaattgagccaagaagagctagaaaaccttaacagaccaatgatgaacaaagaggttgaagccataataaaaagtctcccctcaaaaaaagcccaaatggatttactgacaaattctaccgaacttttaaaaaagaccaaacacagatttttctcaattctgaaaaactgaagaggagagaattctcccaaacacattctatgaggccagcattaccctcataccaaaaccagacaaagacaacaaataaaggaaactacaagccartattagcaatgaacatagggaaattcatcaataaattcatcaacaaaatactggcaaatcaaattcaacagcacatgaaaaagatagtacaccacgatccagtttcattcatcccagggatccaagaatgtttcatttttttgtttgtttgtttgtttgtttgctttgctttttttaattttaagttctaggatacatgtgcagaatgtgcaggtttgttacatgggtaaacatgctccatggtggtttgctgcacgtatcaacccaatacctatgtattaagccccacatgcattagctatttaccctgatgctctccctcctctgaccctggtgtgttttgttcccctccccatttccatgtgttctcattgttcagctccgactcatgagtgagaatatctggtgtttggttttctgttgctgtgttagtttactgaggatgatggcttccagctccatccatgtccctgcagaggaagtaatctcattcttttttatggctgcatagtattccatggtgtatatgtaccacattttcttgatccagtctaatattgatgcgcatttgggttgattccatgtctttgctattgtgaatagtactgcaataaacatacatttgcatgtatctttataatataattatttatattcctttgggtatatacccagcaatgggattgctgggtcaaatgatacttctggttctaggtccttgaggaaaagccacactgtcttccacaatagttgaactaatttacattcccaccaacagtataaaagtgtttctatttctccacagcctcgccagcatctgttgtttcctgactttttaataattgccatcctgaccggtggagatggtatctcatcatggttttgatttgcatttctctaatgatcagtgatgttgagcttttttgcatgtttgttggctgcataaacatcttcttttgagaagcatctgttcatgtcctttgtctactttttgatggagttgtttgttttttcttgtaaatttgtttaagttccttgtaaattccgcatattagacctttgtcagatgggtagattgcaaaaattttctcccattctgcaggttgcctgtttgctctgatgacagtttcctttgctgtgcagaagctctttagtttaattagatyccatttgctaatttttgcttttgttgcaattgcttttggtgatttcatcataaaacctttgatcatgcctatgtcctgaatggtattgcctaggttttcttctagggtttctgtggttttgggttttacatttaggtctttaatccatcttgagttaatttttatataatgtgtaaggaagggacccagtttcagttttccgcatatggttagccagttctctcacagcatcacttgttaaatagggaatcctttccccatggcttgtttttgccaggtttgtygaacatcagatggttgtagatgtgtggtcttatttctgagatctctattctgtttcagtggtctatgcatctgctttggtaccagtgccatgttgttttggttaatgtagccttgcagtatagtttgaagtcaggtagtgtgatgcctccagctttgttctttttgcttaggattgtcttggatatatgggctcttgtttccatatgaattttaaagtagttttttttctaatactttgaagaatgtcaatggtagttttatgagaatagcattgaatctataaattactttgggcagtatggccattttcatgatattgattcttcctatccatgaggatggaatatatttgcatttgtttgtgtcctctcttattttcttgagcagtggcttgtagtcctccttgaagaggtccttcacatcccttgctagctgtattcctaggtattttattctcttcatagcagttgtgaatgggagttcattcatgatttggctctctgcttgtctactgttggtgtatagaaattcttgtgatttttgcacattaattttgtatcctgagactttgctgaagttgcatatcagcttagcacttttgggctgagatggtggggttttctagatataggaggatcatgtcgtctgctaaaagagacaatttatttcctctcttcctatttgaataccttgatttctttctcttgctttccctggccagaacttccaatactatattgaataggagtggtgagagaaggcatccttgtcttgttccagttttcaaagggaatgcttccagcttttgtccattcagtatgacattggctgtgagtttgtcataaatagctcttattattttgagataygttctatcaacacctagtttattgagagtttttaacatgaaaggatgttgaattttattgaaggactttgcatctattgagataactgtagtttttgtcactggttctgtttatgtgatagattatgtttactgatttgctatgttgaaccagccttgcattccaggcatgaagctcacttgatcgtggtagataagctttctgatgcactgctggattcagtttgccagtattttattgaagatttttgtagtaacgttcatcagggatattggcctgaagttttctttttttgttgtgtctctgccagggttttatgtcaggatgatactggcctcataaaatgagttagggagaagtccctccttttcagttgtttggaatattttcagaaggaatggtaccagctcctctttgtacctctagcagaatttggctgtgaatccatctggtcctggacttttaatggttggtaggctatttattactgcctcaatttcagaacttgttattggtctattcaaggatcctacttcttcctggtttagtcttgggagggtatgtgtgtccaggaatttatccatttcttctagattttctagtgtatttgcatagagatgtttatagtgttctctgattgtgggtatttctgtggggtcagtggtgatatctcctttattattttttattgtgtctatttcattcttctctcttttcctctttattagtctagctagcagtctatctattttattaattattttcaaaaacccagctcctggattgattgatttttttgaaggacttttcgtatctctatctccttcagttccactgtgatcttagttatttcttgtcttctgctagcttttggatttgtttgctcttgcttctctagttcttttagttgtgatgttagggtatcgatttgcaagaatgtttcaataccataagtcaataaatgtgatatattaaatcaacagaatgaaggacaaaaactgtattataatcccaatggacaacagaaaaaaaagcatttaataaaattctacatctcttcacaataaaaactctcaacaaatggggtatagtaggaatataccttagcacaataaaggctatatgtgtcagatccacaattagcatcattctgaaaggaaaaaagagaaatcttttccattaagtgctggaacaagacaaggatgcccactttcaccactctattcaatagagtactggaagtcctagccagagcaattacgcaagataaagaaataaaggacattcaaattggaaaagaggaaatcaaaatgttcctctttacagagagcatgatcttatatatagaaaaacattaaaactctaccaaaaaattcatagaactgataagggaaatcagtaaaggcacasgatgcaaatccacatacaaacaacagtagtatttctatacacttaaaaacaaactaactgaaaaagaaaccaagaaagtaatcctatttacaatagttatacaaaaataacataattaggaataaatttaaccaggaaggtgaatgatctctatgatgaaaactacaaaatactggyggaagaaattgaagaagaccccactcccccaaaaaaagaaaagatatctcatgcttatgaatgggatgaattcatgttgtaaaaatgatcatacaaatcaaagtaatctgcatattcaatgtaatctctatcaaaataccaatggcattcttcacagaactagcaaaatcaatcataaaatttatatggaaccaaaaaagtcccctaagagccaaaagtaatcctgagcaaaacaaaagaaaataaaaacaaaaccataaagctggagacatcacactacctgacttcaaaatatattataagcctatggttaccaaaacagcatggtattggtgtgaaaacagacacataaacaaatggaacatcataatagagagcccagaaataaacccatgtatttacaatcaactaattttcaacaaagatgccaagaacatacattggggaaatgacacactcttcactaaactgtgctgggaaaactggatatccatatgcagaagaaagaaactagacccctatctctcaccacatacaaaagccaattcaaagtggattaaagacttaaatgtaaaaactgaaactataaaactactagaagaaaacatagggaaaatgctctaagaaattggcatagcaaagattttatgcctaaaaccttaaaagtacagattacaaaaataaaaatagacaaatgggactttatcaaactaaagaggcagtcaatagagtgaagagacaatctgcagaataggagaaaatatttacaaactattcatctgacaagggacgaacaccagaatatgcaaggagctcaaacaaatcaataggaaaataaactcatctgacttttagaatgggcaaaggatctgaataaacattcctgaagaaaaaggcatacaaatggccagcaagtatattttttaaatgctcagcatcactaatcatcagggaaatgcaaatcaagaccacagtgagatatctccctctggttagaatgtctatcatcaataagtaaaaaaataacaaatgctggcaaggatgtgggaaatgcaaattagtacagccattatgaaaaccattatggaggcttctcaaaaactaaaaatagaatcaccacatgatccggcattccactactaagtatttaaccaaaggaaaggaaatcagtatactgaaaagatatctgcatctctgtatttattgcagcatattcacagtagccaagatatgaaatcaacctgaatgtccatcagcagatgaataaaatgtggtgtacatacacagctggatactattcagccataaaaaaagaataaaatcctattattcacagcaacatggatgagcctggaggacattatgctaagggaaataagtcatgcacasaaagataaatatcacatgttctcattcatacataggagttaaaaaaatgagctcatagaagtagagagtggaattgtggtgactagaggctgggaaggctggtggggatggggggaaataaggaggggctgcttaagggataccaaattatagctacataggaggaatatgttccactgcactgcagggtgaattcacaataatttattttatatttacaaaaggtaaaagaatttgaatgttccttacacgtggcaatgataaatgtctgagatgatggagatgctaattactctggtttgatcactgtgttagagtagacagacagctagacatgagcaggagggggagcccctgaggaaagggaggtctggaggatcccacaatccagggaccaccagaaacaggcatgctagatatgagcaaggcggaggggaaataacataggcaggaaggagcaatccttaagaccccccaggcactgctccctctgcagttaacctacatgctgataaggcggaaattcctaagagaccccgggtgcaattcatatccaacaccggcccacacatgtgcaccaactcatagtaagggagggtcccacaagcctggagtggggactagacgtggaaaaagcggggacttaaggcaggagccagaaaactagacaaggaaaaatggcagagacttaagacagcggcgaacttcaggaaacagttcaacgtcatcaaaacccaatgcagaactcttggggtgaggggggcctctggctttcagcagtccgctctgcctcatctttcaaagtgtactgtgtctctaaataaactctctgctttctgttttccttcaattaattctcttttttggctaaatcagtcacttggcagacttctttctcccaaataagactaagaaacaggattcccacatgtctcagtaataattacacattgtatacacgtgtggaaatataactctgtatccaataagtgtatacaattattacatgtcaactaaaagtaaatgggggtagggggaagaatttgcttacttttcacatggagcttttcaaagacaccaatgcctgggtcttaccccwcagcaagagtcagcctctctggcggtgtagcccaagcatctccatgtttcaaagttccctggrtaattttgatgaacaaaagtgtcaagaagaggaagcaaaacacccscagaggtcagagaaatggaggaagccagaaaacaaatcagacagcctccggaggaaaccaagatggataaggatatagtgaggctttcagtactgacttccttcttacactgaccacagatattggagggaatcatgaagaggattttccctactgccctgccccaccacctggcggccctcactgctccccccggtcttctagcaggagatgagattgtgcaggatccggccgcctcttccctccccactctgtctctcctgggtctacgtgacaaggctggctgatttagctgcaaagttaaaaaaattttctaagtttctcaagcaatattttgtaacaagagtttgtttatgtaaaaacacattaacattcaagtttggtttgtagttcagctaattattgcagtttgttccactgcttagttcaaaagtccctgagtagaaatatatatttcaaattatcctcataaacataaaatataatagatacattattttggaaattaactgtttttatgaaagccttaggcagatataatatgaacagcatttattttcacatttccatagaatttaaaaataatagcatttgttctccctattatctagaatgaaaacaagctctaatttaaacatgaactaatgaactctaccttctgttcagctgcctaaaaacacaattttgatagccaaattagtagtactctactgaaagtgacagagtgccttatttactagtatgtgatagtgacctggtatgtagctgattgctcagagaactgtacttaggaggccaagctacaatttttatacagtgaagtgttagattattcttttccacattgcatacccagtcatcaggtaagggaatgcagatggattaataaaaatccactggaaaatgctagaaataaaaaactaaaaagtagtgatttcatcccttacactcatccatccataacttctcaagtcccatggaaatctctgccatcacagagttctcataatagaccagaggaagaggggaggtgctgtgtctatggtaaactgtggcgtgattcgatggggagcaatcttccagctgctgctatcagcccaatagagtgcagatgccataatacagtattttttaaattttcatagcaatcctattgtttcttttgtcagacaaaagcattcaggcttcggggagtttaattaattgtgcaaggtcctaaagatagtagatacagagcacctctcttcctctctcattcccttcctccctcacttcctcctttctttcctcccttcctcctttgttgctttttccctttcctcctcccattagctcttcattctgtaaataacagtgaacaccttctatgcgccaagatcaatgcttggcaagcggaatgatgagattgtgagtgaagagggaaaagtatcaagagctgagactggaagagtccgctctggccaagactacatgggggtcagtggacctactgtgctctgggcatggcagagagatcatctttttagaagatctagatattcacagattattttaataaaatagttatatgtttaaatcttatatatatttaatatattgaccctgttatacagctatttgtactacttacatcatgtaacacattttacattttaaatgtttatcattttaaatgaattttaatgagtcatattcactagggtaatacatatacatgaggttacatttttctatacaaacctaatttagtaaaattcagcacaatgctttcattcaattaatattgattcattcaactacaacagtactttgtggaaggactctcattttgaacccgcagcctgacaatatcacagacccttgtctgttacatctgtatcttttcttcctcttcccagtgccaccatgggttgctacttgcctctaataattgtactggcctcttagctgggaactctactagtttctataactagatctattccattttgcatggtgctacgagaaacgtttttctggagcatggctcaaatcattcgtaacaagaacttttgatccttttctcttttggggcactcactccctcctttgctcagtaccagggaaattaacacccaacttcgtatctggaccytggacattgggaatcccatactgtctctttgtagttccttcccataaatcacaggcatgaactctacaaacccacaaaatattttcttaatcaaaaagatattgtttttctagaagcatacagtactattttgtctccatgaatttgttcatgctatgttcttcgwctaaaatatgcctcgtaaactgctacttgttacaactttatattctagaaagctcatcccaaatggtatttcttttggtagtgggagtggtctacctctaactcctttctgccttttgagcttctgtagggcttcatcccctctaggtcaagctgacccagttacttgtcctaatcactccctagtctctctcatctttgcaatggcagccttacaccccaatcactacaatatttttattaaatatcaatcagttaatattaaataactattaattattacatcaagttagacaacctatgaacccaataaaattactcttttataatacaagaggggaacttagaaaatgactttatatttgaaataaaaaaagaagactttacttcctaagtcattggccaagcctgctttggggtggcatacttttccaaattaatcaactgaacattttgtattatattcttcagttgcttagtaatgaactaatacatatgtgttgtaacttcttttgaaacatgatagtcatttcattctatcctttaaaaatctctcattatcatacctagaaacacgcaccccctttcttgaatacctatgctcctccccagcatactgttgttacatttttcagtttttggaatcattgtgctggtgccagaaataccagaaaacaaaattgcagactgggcacagcgcagcttcctgactgccagcaattgctctaacaagctagattcatgtctcgtccttaaaattgatgagaacataaaatttcagaagtatttgattttcagtatatcattataaattggtttgatattcattattatagtatagataattatgagttcatttggtattcatatggacgtcacatgcacttccagaggcgttatgctgtaatttagtattagctaatggtcactaaaaataaagtgttatcacattttctaacagaacacattttaaatgaatttaatccaggaagcttaatagatattacctctgacaattagcttccttctacaacgaggagaaaattgatttataatttattgaatattattatcttgaacactgcagtggtctaaaaatgctatatagaatctactaacaaaatgacaaggaaaagtaataatttgtctatgtctgaagaggttggtcattttagataatttaactaagttagatgagcacacagtttgcaccttgtaaacacatttgctgttcacagaatggtacatcagtctaaaaatgacaagaatgatgacatagacatgagtgaaagcctataaatataaacatatttcagtttttccttatttttcagaaaattttattctctcaaagctcttttgctcaacaaatatcatagtgagagagagaggttaggccaaacagaggagatgtgcaggagtgggtggacaggatatgaataatcagaactccggcagtgccacacttaacaaaagccagatgtcaacctggattttaaaacaaaaagaccaaagatagctaaagaagatagatgtacataatgctttctctgctcaaaaatgtggctatggggtatgcattctgatttaaaattatatctggctacctgaacccaaatctatctcttctaatttttctctaaaatggatatggagacagctgtcccctgactacaaggcagaagtccagagtgctgaccctactgaaccctgagagccctacttcctgcagaaggtgttgwmttttccagcccagaagcaggaccacttcctaagaatgtaaatctcccaaaattttagacagagttagagattggtggtggcaaaatgcactaaggatggccatattgctgaggctggagaccacagcagccacagtttgagttaccgtgaacttcactgctccaggataaatgctccacttgcattatttcagaatttcttcatattacctcactgtataatggagayattattggcctgaatttaccaaagaagactctaagacagattaagcgagtttctcaaaataacatggataattggaggccagccttgaactcaggcatatgtgagactcgaagcaaagctacagcacaacttgcaaggcccagactccaaaattaacatactctagggaagagacaaaaagaaatgtgatccggatgttccaacttttgggaaaattagaagaccggacagtctggggagaagaaagtatccaccactagaaaccgtaagtttggctgggagtgccacacattaaccactgctgatctgagaaagaatgtggccactagatctgtgcacaggacactgggccagctccattcatcattgcgtctcttgactgacactgactcttgtgagatcttgctwtgtttgaggataagaaacaattaaaaatgccacctggagccaataaaaaagaactacaaacaaggagaagatagcatctggagtagactcagagacagcacagatttatgaaatttgtgtacttgtatgttgcagcacaaaatttcatgaaactcaactctttaatgcatcacaatagaacatggcttgtataaaataggataatgtcataagaaagatggttaaggaaaaaaaggaaacagaacaaaatgcagaaggtactgcataacataagaaatgtgagctttaggttccagaagggaaggagaaaaagattaaaacagaaaatatatttgaagaaataagggacaaaaactttccaaatttagtagaagtcatagattctagaatctcaacatatcacacagaggataacttcaaagaaaccatgaccaaacacatcatagtccaactgttgaaagccaataataaagaagaaatacttaaaacagctaggaaaaaataccttacatccatagaaacaatgattcaaattatcacaaatttctcaccagaaactatgaaggtcataagacagtagaatagcatctttagagtgctcaaggataagaactgtcaacttagaattctatgttcaatgaaaatatccttcaagaatgaagtcaaaatgacatttccagatttaaaaaaaattaagaaaattcattatcttatacctgctctaccagaaatgctgaaggaagttctgcagatggaagaaaaatgatacaagaggaaacctgtaacttcaagatgaaggataagcaatagaaatgattcctatctgggtaatgtaaaaactgtgctttcctcttaagttctttaaatatgtatagctcattagcactaaaattataccagtgtctgtgaagttttcaatgaatacagatatagcccatatcacaactataaaataaaggtaggaggtggcaaagagacctctatggttccaaggtttctacattagatgtcaagtggtacaataataactccaagtagactgtgaaaggttaggtatatatattgtaatacataaagcaaccacaaaaacaatacaaaagaatagctgatagctaagagatacattcacatgcaatacaaacatattcaaataatcctaaaaaggcaggaaagagagacagagagaggaacagagcaacaaaaacatggtacaaagagaaaacgcataataaaatgacagatctaaatccaactatataaaaatatcacaataggtattaatagtacaaaacagacactgtcaagctgtagtctatagaccaaaaatggccaggctcctggtgttttttattatgcttacaagctaggaataattttgtatttctaaatggttacattttaaatggttatataaatacctacataatatccttgaatttgcctcctaggttgcaaacctgaacatatttattctggcctttaaaaaaagtttgcctacccctggtctaaaaaaaaaaagattattttaatattggcagaaaaataatttgacaaaattaatgctcattcataatttttaaaaagctagcaaattaggaatagtaagaaattcctcaagtagataatggttatttatgaaaaactcatagccaatatcatacttaatggtgaaaaactgaattactttcccttgagatggaggacaaggtgaagaagattcactctttcatcaagtctattaaacattttactaaagttaaaaaaagttaaatataaggcaaaaggatcagaaaggatgaagtaaaactgttcctatctcagatattttattgtttatacaaaaatctcaaggaatctatagaattacaactagaaataatatataatctgcaagatgcaagatttttacaaaattatttatattcttatatactagctgaaaatattgaaaaatagaattcttaaaacatttcatttacattaatgtcaagttataaaataggaagaaatctaataaaaggtatttatgactctgcactaaaaaattacaaaacattgctgagagaaactaaggacctaagtaattgaaagatatgccagaatcatggattggaactggtaattctccccaggttgatctatagattcaatgcaatcctaaacaaaattccagcaggtttttttttttttggtaaaaatgggcaagttgattttttaaatttatagtcaatgcaaagggcttaggaaagcccaaacaactaaaaaaaaaaaaaaaaaaaacaaaaaagtacaaaactttgagaccttatgtacgctacctgatttcaggactggctataaagttgcagtttgaggttggcaaaagataaagaagtacagctcagactgttcagtctacttctggaccgtctattctattccatatgtatacggtcaatttatttttgacaaattatcaaagcaattgatggggaaagaataatctttctaacaaatgatactgaatcaacttatatctgtatggaaaaaaatagacaatttatacctcataacacatacacaaactaactaaaaattgatcataggactagatgtaaaccctaaaatataaaacctgtgacaaacaaagcataggagatcttggaggaggcaaacatttattagattagcataccaaaagtaaaaccataaaagaaaaaaatgataagctggatttcatcaaaattaaatacattttctcttttgcagagccttaagaaaatggaaaagctaaccactgactgagaaaaattatttgaaacacatagacaaagcatgtttataaaatatataaagaatgcttacaacttaacaataaaacaattaacctaataaaaatggacaaaatatttgagcagacacttcacaaaagaagatatataagcacactaaaaagtacataaaaagaagatatagaagcacattaaaaagtacacaaaatatgctcaatattgttagtcatcaaggacatgctcagtcactgtgtatccattagactggctgaaattaaaaggattgactataccaagtggttggtgaggatgtagagaaactgagactctcaaacgctgctagtggaaatataaagtgatataacaggcttggaaatttacttgacaatgtcttagaaaggtaaataaatagcactttccacgcaactcagccgttatactcctaagtatttccccaagagaaatgaaaacatgtgtcccaacaaaaaattgtacatgaatgcttttagtagctttatgtttaagatccctgaaactggaaacagctcaaatgcctactgacaagtgaatagagaaatcatgctatttctatacaataaaacactactcagcaataaaaaagaatgaactattgatacaggcaacaagaatgaacatcaaaggcatacgcttagtaacagcagccacatacgtcccccacaaacacagtacatgttgtatgattacctctatgtagaaagctaggtcagtggttacctggggacagaggaaaggcttgggaccatgggatgttgattatcgtgcttcctgagatggttcatgggtgtatacagaggccaacatttagcagattgtacaccttgaattagtgtgatttaccgtatttcatttatacttcagtgaagttgtaaaaatcataatgtgaacacacaaataagcctaaaggcttacattggaacaataggcataaatgttgatattttgccatacttctttaaacattttatatacataaaattttatatgaagtcgaaatatcctttgagcttatccccaatggtagctttccaatccaattttgttttttttttktttgtttgtttgttttggattttactacacatgtatttataagaatataatgtgtgggccgggtgcagtggctcatgcctgtaatcccagcactttgggaagccgaggcaggcagatcatgaggtcaggagatcaagagcatcccggccaacattgtgaaaccccatctctactaaaaagacaaaaattagatgaatgtggtggcacgtgcctgtaatcccagctacttgggaggctgaggcaggagaattgcttgaaccaggaagtcagaggttgcactgagctgagattgcgccactgcactccagcctgggtgatagagtaagactccatctcaaaaaaaaaaaaaaaaagaatataatatgtgacttaygtgtttaacatttacatgaatgtatcatagtgtatacaggaaacttcacttacacttactacagtggcagaagttacaaagctgctacatgctggcaaggatgtggtgataccgcaatacttgtgcactgcttctgggagggtagaggaccctcattcaagttaagcatacacatgcacccgaagaccagttgattctgctactggatttagacccctaagaagacttcaagttcataagagagcatatacaaaaaaagtgccttacagcactattagtggcagaagggaattggaggcaacctggaagttgatcacaaggaaacaggatagatttttttaaatgatggaaatatactagggagtactactctatagcaggcattagcaacagacaaaatatacttctaacaacttggattgaccttgtggctggacatactcagttttcctttccagatcctctgtgctctctgctatgagaaagtaacctgtatggtcaacaccaatggaccccagtgtcttctggccaccattttgtttggccagtgagggactttggcagaagagcggaagtagagaggagagactggaaagaggaatttgtttcccaggctccctctctgccaggttttctcaattataggttacttctcttctgaaggcaactttttctacaggactttcagagttaaggaatctttccctcctatcatccttttgggcctagcagtgtccaaagctcagctgccactagccctaggtcacagcattatcacttggtttaccctctccctacacctttgaaaatctttgtaaataaaccctctttgaatgaattatcctgaatttgggtagagagcaatttgccagtaacaagtaaatctaaagatgggcatttactataacacagaccctctacttctggttataaacctagagaattgtcatgcatgtgccccaggggagacctacaaagttgttcactgcatatctatctatatatccatatctatattctgtaagtatcctaaatgcagtagctatttcacycaatatatttttcaaaaacattggaaaagatactaccaattaaataacttcagttaagtaacttcaggccattggcccagaacattgcatttatttttggtaataggaggtagaaaatccatagtttctaaagtctgagtaagaattattttcagaagagaagaaaatctcacacacttgtactttcaaaacacttgtggtaaaattgtacatgtacctgagtggtacaatcttccatctataaacaacagagcacaatttattgtgcttgatcacattataatgcagctgtgcttcatgcaaagcagaaataaatgaatgtaaaatgaagctgtttgcttaaaataacttagttcttgattttaattgtctaagttaatgaaaacaaattgatatcgatgcagatgcgcatcatgacttagaacatatatcaaatatcctactcaacaattgtctaatattctcctaatgcttcttagtataccagagtttgttcaattgtcctttaatacaaagtctactttcatgactttgggatggtaaatgagttatatataatcctcagaatcactgtagccagcagcatctgtggagagccggaaggtgagaaagttgctttaacttttggtttgattcatttttcctcctttctaagtgggctctctgaactaatctgcagagaaaattatgggcaatgaactgctactgcttccatgttgccctcttagagttttggagaccccactgcctctatttaggtaatctgacacacaagaatggagaagagaatccatttaactacatcctgaacaaattcatcctgaataaacttctgccattttgagctatttacaatttgaatgtatcttgttttgttttggggaaaattgctaatatctacacaaatagaaaggtttaatataatggtttttgtggttttttttcaattcaaatgaaaatrttggcatttatttctcaactatctatgttcaactatctgaaggtataaacaatacagcttagcagtagtgagcacaattatagcaatatctcaaagctacatggttcatgttacaatcttatacagaaagtaatcattaggacaaaaattagctaagggaaggaaaatatttccctgtatccttcttccagccagtaagaaccaattgtgaaatctcagtgcagctgaaactgtgagggctttagcatcagataatctttaattagaatagtagctccccattttagaacccgtgtgaccttgaggaagttatttaagcattctgagtctcagttcacttacctaagaaataagaataattatgtttatgacagagttggtgaagattaaagaagtaaacacttagcaaagtggaaactattaccactatctttttacatatgagaaaacagaggcacagaaggttaggtgctttgcccacagttacacaactggtaagtgaagacgcaagaatctgagcccaggcattctagctctaaagcttacactgattttaacactatacatactgacactcaagtgcttcttcatatacgtgtttgcagagagcaaagaggaaattattctagtgtaaaaccgattcaaatctactaatttgttcatgcattccttccttcattcatcaaccattcattcaatccccatcatgtgccaatcactgtaccaggtattgggggataattcatggaggataattcagataattcatggcccttactcttaagaagttctgtttaatggccaataaccccaccatcaaatattataatgcagtgtgacaaatgctaatgatactcgtgtgccagatactgtggacatgtagaaaatacatatctaaatctgtctgggaaggggtaggaagtggggacaaggaaatttcaagaaagaaatgcttaaggatgattttttttttttttttttttttgagatggagtctcgctctgtcacccaggctggagtgcagwggcgcgatcttggctcactgcaagctccgcctcctgggttcacgccattctcctgcctcagcctcccaagtagctgggactacaggtgccctccaccacgcctggctaattttttgtatttttagtagagatgaggtttcaccgtgttagccaggatggtctcgatctcctgacctcttgattcgcccacgtcggcctcccaaagtgctgggattacaggcatgagcccccgcgcctggccaaggatgatttttaaatgatgcataaagacaacggtatggaaggacttccagacggaaataacttgggaaaagcctttgttatgagaaagagtaaggcttgtgaagtggaaagtagtacctgaaagagtatgatcatttgttagaattgcaaagagttcatgtggttggattcagcagtgatgggagatgagactaaagcaggaaaaggaagaagttaggtcaagaggagtcgtgtatactacacagtttgtactgcatcttgccctcttgagagaagagtagcatttcgagattttgttctagaggggtcactctggcagccatggacatgactgcttgctcctgagaagagcagagacatggaatgacagtccaataatttgatatgcccacccagcttccatctccctgtgctgtactaatggtgccatgcttcctgtggagatccatcccatattgttaagtcaggctgatggcctagccactgccacagccaagcagtgggcccctgattctggctaatccaagtatgccatgcccctgtccataatgactggatcctgaaggtttatgaaacccaagactggctaatcaaaacttatttcagctcatttctgccagctattggggaaaatggcctatctctactgtggttacagaacctgaaaagagcagagacatggaatgtctcggaatggcctgtctctactgaggttgtagaatgtgggtcttcagctgcagggccatatcatgtgctatttggtggagagcctactgagtgatgcattgtgataaaatggattatagcctctggaataggccatgcctgaaggcagtacaccactgggcttctgtatgtgtgccaatggatttcctgttttgtgcttargctaggttgggcttctttaagatgcaacctaaagagtcctaaacacgattatgataatccagttttgcagaaatgcatgcttttgaaatgagagatatccactacttagcaggtatgtatgtgaattaagacaacttggctgaagtttgagtttcaaaaccaaacattaatgtagtctttttattgtttctgtataaagagttataatttattcaatargaaaagtgtaaaattggtatatgactttatgtaagtattaatatatgcctatgacttaaaaatcacaagacagtgacatctggtggttacatasccaaattgcagtttcaatttatttgagaggcgtatgtataactctcaaaatttgcaggaaatgtcacttggttgtccttttgttgcartatcacagctcttaggttttcaaggcatatgagatttcagtcactgaaattatatggcaaataccttgaagatggcagtgtcataagtgtcataagtctggtccttaagattcagctacataaattctgaaagatagagggaactctcaaatcactagtttgctatgaggacagacgtaccctgaagactttaggacttgctttcaaaatatgttttatagcttccatagtatttatgagtctatttcaagtgtaaacgcattttttaagaaataatatatataaaataatgtagctctttttatgtgtgaatctttcttaagagtcttaagaaagagtcacgcatacttcataggtctttatgttatttgaggttgtagattaaaataaatgaaatcatccttttctctattaagttaygcttgatgaagtcacaccagaaaaacctgcctgctgaggactaaaatctaatggctaaatgtgtaggaagcatttttctactctcttcccttccccttacccagaagtcttttcaaatgatcctaggaattaattttcagatcatgtaaaaaatattagaaatgcccaattgaaagaaaaattgtttaatttcaatttttccttatgaatgagttcagatatccacctactaaatacataaaataggcatgtattgataatatttacaaataaactactgaatctaagccatttttaaactatagaacagggagcagccgtattttaaagctgcaacatttaaagggcaaaatttccataaacaagttcatattttccaggacaaaatgtctggaataaaaaaaagatctgatacatgcaaatcattcatataaagaactcatggtatatgaacaaaatgcttttcaataatgacacttagtttgatttgtgtagatttttaatttaaggcttctgcttaagatgcatttcatagagtattaactttcaataccctagcaaccttagctcctcacactgatgaagcccacatttgagtataatttgcatttctccacatttaaatattttcctaaaactcactggttttcatatgcactatattccagaacttattccacatttcccataacatgaacatctctctgatatacaaggtatacgatcattgttttcagtgaaattttctgtgaggtacagagatttgaatgaaagctagtaatggatgttgagtctattctttagcaatatgtcagttccctaaagaaatcccacaggcagaggcataaagatcttcaatacttgtaacgtcttttgagatgcctgtagtattgatgtacaggtaaacaccacrgaagaaagagctgtcatcacctgcacatgaagaagatcgtgagaaaactccatcaaaggcatattcatcagtgcttgatctatgcctgtcgtgatcaccaatattaagttttctgtcaacattggtgataactatatttcccaaatgtacttaactcaaattagacggttgtttgaaatacggtctggcatttaaaattgttttggaagcactattctctactgattatttagtttttaccaagaaaagaaaatttccttccagtgtcaaagaaatttctaaaactctaaaaatgctcatcacaaggagagacaaatactattacctttacagaagattttatttcagaggaagaggattgacttaaaggagaaagagctttgcattaaattgacatttacatgtttcctattttgaaatacttattttggatcaaggtagacttatacaaagtaattattttaattcctttttttggaacacacacaaaaaatcattattaaaattcaagatgaataattaatacatctccatgaagaagacaatagtaaaaaatttgaaaaccttgccgcagttggaatcaatttttcctcagctttccccccctttttttctgtatcaaaatcttaacaaattctaacttcgataggaaaaccatataaaccaggaattgcaaaatggctcccatgctgcattttcttcctatagtcctcgtggttagggagaccacgggttctagtttgctggggacagttctggttcatgcctgctgtctctgcatgaggaataaccaccatttcactctccattggactggtttggacattagatacatgccttactcatactaaacactgaaaaccaaagtggcttcagatagagtgcttcgggcagctcccaccaatccaccacagctcaacattaattggaagctaaattaggtgcatggctatataaataaaattaaagggaaagtgaaaagatggaaatgtttattacattaaagtgttctttttccctgtctccctctctccctttccacaaaactgtagtagaaacagcaaagtagcagacgtcagaaggtttgggttttggtcctcctgactgtctctctcggcttcaatctctttatttttgaaattaaagggtggaattagacgagctgcgggattctttccagctcccacttagtgactgtaaatgctgccagtctggtcagcaaacagaaacggtttctcccttttaaaattggtaagcttattttactggcaataagctaaagcactgtctcataattattattaccttcagaaagcatcctttccatcttcagttcccttcccactccattcacacagatgacaggtgatagtacaggcagctctcctgagccctaaatgctcatggtgcttcttaaacatctcctcccaagcctaatgcatcctcaactgaatgactatcttacctcttgcagacatttccttctccagtcctcctgcgtcaggcaacgaggccaccaccaccttgttgctccaatgtaggcaaggcttacaggggaccaggaggcttttcctgatgcccaattcatgaattccccctgtctctcttctcatctctgtctctgtcccaggcattgtgccctttcaactccatgtatagtccttgctctttcattcccatacttcccttggactagatcactcttcccctcccagctaactcatcctcaccttcgggggttgcatcacaaatgcatttcctcaaagaagcctaatcttcacccaaagatagtcggccactcctgcattattctcatgccatatcatctccttactcttttgtaagcttttttccttgtcatttatcattcaatgttgcttattccactaaacaggtcaggcactgggtttctcttgctcactactttaatctcaatgcctaacatttccataaaggtaaaatgcaggcactaaaacactggtgaaaaaatgactgaatggatttctgaacgtcatttaacatgtaagctgcatcctaaccttaagtattaataggtttctaaaagtcttcttcattcatcaagagtcttagttgctcaagcaagagagggaattccagggttgagttgggcggcagcacggctgtatccaggaatcggacactgccaccaggatggcctccctcgctccctcactccacgtgctcccaggtcagctgcattctctagcaggcccttcaaccagcaggggctgttccccgacttgagagaaaatgcccagtggttttcctgagtctgtgtgagtttcacagaagggccctgtgggactcactggctgcaatggttacttttatttgttgctgtggctgcgccatgttgcccagctgttgcgtcattcatgtagatgtttctgtgaaggtattctgtagatgtcattaacacttaaaatcagttgactttatgtaaaggaaattaccctccctatatagcctcatctggctgggtgaaaaccttcagaggaaaagctgaggttctgaaggaggaggaaggaatctagcttcaaggctgtaacatagaacccttgcctgagtttcctgcctatcagtctgccctgcggatttcggactcaagagtgcagcatcaacacttatttccaggctgctggcctgccctgtggatttcagactcgccagcccctgcaatcacacaagtcaattccctaagataaatctccctattatgtgttaacctattggttctgtttctctggaatgtcccaactgatacaggggcccaccctgaggcagggtgaatgtagtctttggttgacaaacccctcacratcacataaaggggtatttgggggcagtttcccaaattaagagaagtaggcagacaaaaaagtaagagacagtcataagtatatattccctgatacggtttggctgtgtctccacccgaatctcatcttcaattgctcccataatttccacatgttgagggagggacccagtgggagataactgactcatgggggcagtttcccccatactgttcttgtggtagtgaatcagtctcatgagatctgatggttttataaggggaaacccctttcacttggttctcattctctcttgcctgccgccatgtaagatgtgtctttcaccttctgccatgattgtgaggcctccccagccacatggaactgtgagtccattaaacctctttttctttataaattacccagtcttgggtatgtatatatcagcagcgtgaaaacagactaatacattccccaatattaaaaacttgggtatttaaattattaacatattattatttttcccctagagaaaaatatattcccaaatatctcccatcctcctttcctgaagcttcttgaagacaaagtgacagttctcacctgcacagtcagatggtcgggggtgggtctgattctagtattactacctaaaacctgacaacaaactgtagtatgggagaaaaattcaccttaatctgattccaattttatcaggacctagctaacctttagttttcctttaattaaaaggtagcaacaataaaacattccagctttggatctttaaaacccagacatagttcaatctaagtgctttactccaacagctgggaaggattaacagtaaggtatattattatagcagaaaaacagaagttgtaaaaatgatcagatgataaatatattatcttcttgtcttggattatggttgttaaaatgcttttggaattgaagaaaaaaagcccaaagggcagcatttgttatggggtcaaattgataagaggaatactttatttcctttttgggagattcagaagaaaataatttggccaaatactaaactataggatgatttttgtctaaaaaattgatctgaaaactcaagcaaaaccagactacattttacctttattgttaacaattacaacgtctctacctgaaaaccgcactctgaagataaaattgacttaagtattctgtatacatcttcttgttttgcttttcttttgatatattgtcgggatagcaagccctgagtgttttaataagatgggataatggcctatcagttcactgggcataactacaaagtgataaattagaactagacaggaaaaacattttgtttcttaaaagtaaaaatataatgtagaatgttatgcactgtgtgtatgcttgaaatttctgcagtcattcatagaaagtaaactatagtattttaaggctacttaaaggtatatcatcagccatatatttaagacaaaacagtaaaaggtttacaagccactcaaattactctttagagcatccaaatggattgcttcctacttaacagttattttctttgtaaatgcaaagctataatcacatgtaaaacactgatcatgcatatgtagaataaacataatacatttctaaaatattctgaaaagatcttcaaaatgtcagaacccatacttatcacatttgcaaaggctgaaatatttagcatgcaacgtgtgaaaccatagagtaagaatcttcttgtcaaaacaaacaaaaaacgattaagaagaagagatttggtattgtaatctgcatgtacgcatggacacacacaggccacattcccatcaggcaatacgcctgggcattgttctttactatgcccaacacagccaatatatccaataggcatttgtcaccaagtaatgaccttggaaggaactgtaattaccttagcgatcctgccattgtggcaaatatttttttggtgcactcttttataattattttcagagcttttaacttgttctttcaaattagtggaggtacatctttacccgctaggaatggatttaaagcagaagttttttaaactgaaatctaacaaataaagtgtttaacaaatttgcacaacttcctgttacatgactctccaggaaattctagaataagcactttaaagactccctgagcaaaggcggtgccacaggatttgaatacgttgtttttgaggttgttgatctctatctcatttttaaatttaaaaactgtaagtgtttagcttactctttgaaaacaagtattaggatacagctaaacaatcgagtccattttcctagtaacctcacctttatctatgtatcatcctggaacagtacatgccttagagaaagtcactgcacccaacttctaagagacaatcaggattgaaagaaaccttaaaagccacttattacaagcagctatgaatctcctttacatcatctcttcccagaagctacctgtctatttgggaaaaactgtagtaagaggctcatcaccttcccaaaaaggctattacatctttgaacactctacctggtaggaagttcttccttaaattgcaccaatatatacctgcttcggctcccactcttagtcggttccatctcctagagccgatgtagcccagggtaaatccctcttctttatgacagtcctctaaataccagaaaatggatgtcttatctctcctggtcttttatgtgccaggttaaattgtttgtattatgtatctgtatattatatattcattcatttgattaaaaattaatgagactataatactcaccaaggctatgttctaatcatgagagatgctgaagcaaataagatagacgggatgcgtagttgaagaattctagtcagggagatagagtatgagcaaacaaaaagatactttcagctcatgataagtcttttgaataaaataaacaaggtaatagaactgaggaaaatcaagggtttaaaaacaggctctcaggagatgcaacatttgagccaaatccgatggctgagaaggagccagccacaggaaaggcgctggggcagaaagaaaagcaaacagcaagtcccggaggcagcagagcgcttggcacgcttgggggatggcggggaagccggtgtgtttggagcctgaggaataagaaagacggcaagagatgagcttagagtggcagctcgggggccctcacaccagccaaggagtgaggaaagaggaaatgcagagaaagagatgccgtggaagccaaaagaagtttgaagaaagaatgggccatggttccaaatgctcttcctgcaggtggtaagattgttcacatgagactatctgaagtatccatagacccatacattctcattgaaacgtaagttcattgaagacgggagttgagtcttgcacgctatcacgtctccttgtaggaatcacctaggaatcacaggttgaagaagtgagggtagaatggggacggatatggaaagtttgaggcaagaagagatggagtaaaattgatgtctcagggcgagggaacgtcggcctctgtaagcagaggccagccctgccaggtcctgctgcgtgacatccgtgagcattgtgagtgcataygtgcgtgttggttcctttaccgatcctccctggataccagcgcatcagttctcgagggtgcattacgatgttccggcctgaccatgctctgataccagagcatcagttctcgagggagcattacgatgttccggtctgaccataaggaactggctctctctcccccgcccttccccacagccagacccttttgctccctgcagctccctgaccttcccctcatcctctgcatgcacagcggtgacggtgacgggtgcagacccaaagccaggagtcctggccttccctcttccttgcgctcagacctggaacaggttatttcatttccagcttcagtttcctctcctgtaagatggggctaatgaaagtaaatacctcaataaacgtaagctgctttttcttatcctccccggggcaacaaggtttcacaatgtgaatatcttaatattactcgtatccagtgatttcttgccatgccaagtgactcctgtagctcaggccctcattacatttcatctgcatattgtcttctcagtgtttagggctctaaagctctcagcctcaccctggctgggaggaagaccttccttacagagaggacggcaggagccagggcagaggtgaagagaggatggaaggacagcttcctgcccggtgcttcccgaatgcctacctgcacacagtcctcagtgggggtgaataaaacacaaactcactcagaaggtccggcacgggcttggagatcttgcaattttgacagctcctaggtggtgccgaagcggtagccacacagatcctagaaaggtgagacgtcctctgggccctgactcattcctgggaggctgcttyccccccgtggtttctggttgttaccaagcctcatctatgccagctctcctgtcttcacactgcctggtgagagtgtactgcatctccctctaacctcytctttctcccctggcacaccacctggccactaccagcaaattgtcattaattttcaaaaatttacacagggctgtgacagccaaagaattgcaaaacccctcagcacacaaaaagaagtatctagagacttactcaagccctcatctcccagagttggtrtactacaatataaccttgatagctctttgtcctaggatataaccaccctcggaattaaacaggtatttatatttaacacctggtgaaatttaaactcactttctttggtttataagtgttcatattagacatcagttaaataatgtgtctagatactaaataatgaaatagggacattacccaaacttctattttccctgtaatattttatcaagatttggtggatttagacagtaattccaaatctctgaaacaaaacaaaattttaatcacaatttttagttcaaaattactttaggcatcaataaagtaaaacgaagaccataacgataatagctaatatttattgtgtgcttcctaagtgacagacactctttaagtcctgtatttgtgtgaactcatttaattcttacaatatccctgtgaggtaggttctatgattatcctcacttgcagatgaaaaaatagacacagagagattaagcaacttgcccaaggtcacacagctgataacagatagatccaggattgaactcagggaatatcgctccagagcctgtgttcataatcaccacagcacttccattgtgtgaaaatttctgaaaggctatatgtatttaggcattatttttcctttactaaaatattttaccataacaatatccagtcctgtggtgcattccggtagacaaggtatattcttacatagaatctcacttcagtgtaaaggctggtgcgcgcagagactcaggctgccccagtctctcaggacatactcaaggagttcaacctacgcttgggactcttcagtgcttcttccactacagcaacccactcagcagagaggagattccgcttagcaccatctgtcttcattatctgtgagcagctccacactgtgctcgcggctgaggctacactggtgaagaacagacaggccctatcctgtagctgcctacagttcagtggtcctactttcatcagaaacctagtcttaggagggcaaaacttcactcyctttccagaacgttctgcactgcttctcctggagagttgggaaagtgtctgtgaatgtagacatggacaggggaacgtggagctagcttcagggctcttcctgcctctgcagattccttcacatcagggtgaccacctcgttctggcttccatgggactcccccattgcagcatgaaagccctgagtgccctgcctcccgcagaagcaccagccttgacgacgcatcccagaatggtccagggctaaaccctttctgcagcctgaagcttataggaccagaagtcygtgcatgccaacaaactatacaccccactcactaatacagcactggtgctcagcgtgaaatgaagaaattccctgataacagatacacagaatagttgaaggtaagaccctaaatggctacagacctctccagcacctcagtgtaacgttaccaagatggcaaccagaagcgattatcaaatgaaaccacatcctttgcatttaatggaacataggtgtgtaaatcttggtatgaacagcttttcttacgtatacacattcatttctggataaattcactgtctactccctggaggaataaatctctataccagctgggatcgcattacctcacctatcaaygagacttcagttctggaaagaacgcatcaggcacaggtacttgatgagtgcaaattcctcaggcttgaggcttgcacaattgggggtgctctttgaaaaaagaatacgaaactatgactatcattttataaagaaaaaagcagaaagataatccagtctttccagcagcatagttgatctaaatttctcttttagtactgaagtttgaaaaagttactttcagcttcatgacttgttgttggttatatcatgcacattttttggggaattccaaatttctctcacatgcaagcaataagaatactaggtttttcaagttttgttgcccaggaactaatcttaaactctctttgaattgctgacactcattaacaagtttatcgttagttccttgttgtaggggctcattggcagattagatcagattatattcattgatgtcagaacttttgtcaaggaagcaagaaattcaagtattttcccaatgggttcgtatgcaccacttctcttcattaattaagttgtctaataacctgagagcctattcattacttctatttaaaatgtatttccttctcataataaattattggttttggaatgacacatgtgctgtttggacctgccagatggctttgaaacaaaataatcaaatatactaagacctgttccaatatattaaaaggcataagacattcaccttcacacacagaccgcttgcttactaaattgctacagattgtgtcatacaaaggaaaaaattctgatacatgtttcatataattcacatgaaaaaataaatgaacacatggatacgtttataatataccctgcattattgatgagaacacaaccttcctatcatagttttcccaggtagcctatacattttataattcttacacatccaagattttaccayggatttgcctgtgactccagacatttccartcttgtttctcctctaccaccctcgtgggtctgctgccagcaccgtgggatgcgttcttacggagaaattatccctggaccttcacataataactcctggtaagtcagcacagtccgcagtaagcgtgaaccacaaaatgtgtcattctaaactcatactcaatgtctttccaaatcaatgttcccccagctagatcccsaagctgccaagccccactccaattcctctaaacagcaggagaatgtgctggagggaagtcagggtagaaagaggcagcagtaacaaaggactgtggccaaacgatctcacgtttgtgaattttacaagaacacatggccatgtgaccaccctgcctaggcccctctcagggctgaggaaggtgtggtggcaatcagtgatcctttcggcttcatggtcaatccttctctacacaggcctgatctaaggctgctgggagcaatcaagcttttgatgactatttttttaatacactctgtagaatctgtgttgatcatgaacaatattattctgtaaaagaagaaaaaagcctggctgaaacattcagctatcttcacagtaaacactacaaagaaaaagttacaaataatagaaactgttcgacttgggcaaagggagcagtgaattcaccgaggaggtgaccagaacaccagcagtgtaaagtaaatgttcttagagcttgtggtatcctgtgagtaataatcagataactccaattaagactgttggatgctctctgtgcagttattgctaaggtttcagacataagtaaattgctattcatatstaaaaagtattgcaggttttattttcaaattgtacaggtcttaaaccaacatatttggagagattaaacaaacaactcaacactgacttgtttagtgttmggcattactgtcaagatcgggctgggtgaagaaggtatgctttcataagaaaccgttaaaacatacaaagaatttaagtaatagccccatttgatacaaagtaaagattaagaaatgttagaccattagttaacattccctatattttgataaccttgaaattcacagaatggtacaaaggccatgagctttgggtgaaagatcacagatagacagttatgctgggtagttgtaatattttgcttttattattaggaattatcacctgaaatatagtattcattcatttgaagttgtattttttttttttttttttttgagagagagggtctcactctgtcacccagactggagtgcggtggcacgaacactgctcactgcagccctgacctcctgggctcaagccatcttcccttctcagcctccagagtagctgagatcacagtcgcatgccaccacacatggctaaatttttttttgggggcgggggggtagagacggggatctcaccatgttgcccaggcaggtgaagttgtattttataattacctaaaagttatagtttatttggtttgatggggtagcttatttatttttaatcttcaatgtagtagaatgactttttttggtgtttttgtcagcattataatcttcagtgttcttaatgaacactttcattaagtttaataaatgcctttagcaacaataatatatgccaacaagaatcatgacaaatttctacccaactcgttgttacatttctgattctgtttcaatgaaaatgttctctctaaaaatgcacactatgcaaagctggcataattccttccacaagcgtgtttcacacagcaatgaacagaaagagttccaaatcaacaaaaggaaacctaattataacacgttcatccagaggctctaccatttttttaaaaattgcataataacatgcaatccatgtcaccttagaatatcgagaagccttgcaggccacaggcattggcctgattttcatttgtagacagtcaggcaggctcggcgtgcacccaaatagagctctttttcaaaacctgactgccttttttcatccctcagtgattacaatctctttcccaattttgtgttatttttggccccatataatttggtgatcaaataatgatacaatgatcaaatgatcacataatgatacaaaagaccattatatcttagtcaacttggtcttacttttgcaaccaaactataattttttagagagcaagacatgttttatatttatcagcatttttccatctgtctaacctggaatcaagtcgtataatcaagaaatacttgttggattaaggcctgtaatttggtgctccatgcaaatgctgttccagatcatggttctgggcttgagggaggctagtgtagaaatattatcatattcatcagcagttttagtcatgggaaggacgtgtgtcccactccaggtctcagactactcccagtcagcatttgtgcaaggccaagcaacagcagctcagcaaaaccagaatgaaaaaggacaatggtgcgccgagcttgggtcccttgctgtggtgtgcctttgttactgccattcactgtcatttctttacgtcccaaggtatgaatgactgagttcgtgwttgattgtgccactaagagtgagtcyggggcaatgctaccatccctgacaactctcgctggtgagtggaggctgacttgcttgccttccagggcaataccattgattacttcatttgaagtcagggacagattccatgccatctttctaactgggtgattcccatcatatctgactgcccacagggtgagggtragcacggcggctctgttttcgatctgcatagccgtcggagtgctgcacggtctatcgatggtgtcgacttccattctcaagagaatccataaggtgtaaggggaaaggaaagcacgttttggggaagaaaagcaacttagtacctgactccctcccatacaaggagtgtagrtctggggcacgcgtggtgcctctgaaaacagagtgtgggttacaattgctggcacccccaagttgggcttccttgactgttgggaccagtgtgaactgagaagtgcactttgacaatcactacaatgtagcctcctgatctgctggtaaaacgcaccgtttccagttcagtttgagcaactgggtgaagtccttctcggctttggagagactgtttgagagccatccatttaccctgccctgtctgtccacactgccagtcgagccgaggccctcccctgctgtttccaaaaatttctcggtaagttaagggcaatggcagtccagctgtgttcagagctgcctggtgacgatgtgagagccagcagtcagttaaggtgcttgtaatagtttgggtgagcggcaccaagttattttccttcacaaggaagacagacaccagggatgacagtaaaggaaaaaggtcattcatagccctcaccccgcttacctcttagtggaggtagaggggtgtgggccgaggctcctgaggctgacgtggttctccgggatgtgggccgaggctcctgaggctgaggtggttcttctccggggtgtgggccgaggctcttgaggctgaggtggttcttctctggggtgtgggccgaggctcctgaggctgaggtggytctctggggtgtgggccgaggctcctgaggctgaggtggttcttctccctccactggaataaaattagtgtgccctatgtcagtggctggagctttactttgctccccatgcccctgctcactcccgactttccatctggacagtcaggtgcaagaggcacagaggattttaataaagtctacagaggcctgtcacggccaccattttggcctgtgtgaaccactgtaggggggtcagggggcggagctctcagccagtggtccctgtcccacctatctcagtccatggcaatgcggcatgagcatccaggtggtcgcatcagaattagactagaacgcgctgggctcacgggggtgcactaaccacgtgggcctgggggagttgttagggtaaagagagaagcctcatgtccaggaatgatcaggaaaggttatcaaattttcaaaatagatctagatgattccttgccccttcattctggtcattactcaagaagcagccaagaraagatggtccctttctggaacagctacattcagtgaacaacgtgtcttagtcaagcgtgtgaccaggaggagaccaaagtcagatgtctttgagtcagtttttgaagagactgatccagtgctcaacaatgcctggtgcctgtggatggcaatggcatggaaggtcatctgtccactcctgagtggtttccttgacaaaaggtgttccattgtcagactgcaaacagaaagtaagaaccaagcggactggtggtgtggctgaagttggctgaccagactgggacagtaacaacatagcctggaacagtgtcagccctgagtggaggtcaggggtccaacgtagtcagtcttccaggagcagggggggccttgcccagggaagtgtggcctcctgagacaccaactgaaacagaagataaccggactataaaacacctgcatgcagtgagtggcagctctgtgtcagaaactgggtttcctttgtgctcatgttgtgatgggggatgtgctgcaatgcccagtatgaaggtaaactcaggcagcctggtggttatgtggccagtgccatctggatcagcagctcattcyagttggtctcatcgaaacaggtccacactgtgggcttgtacctgagtgacccacatggttccatgcatgatttgtttccatggtctacagccccccaaagaggtgccttttatctgcttgtctggttttttcaggtggcaaaccaaatagctagrccattggcaacagcctaagagttgggaagaatgtaacagggattaccaagggaagtagcagttatagctgagaatggccttgagwtctgcccactgggtggagaatcaggtccatctttggccctgtctcattggagctgagatggaatggctgcagcaagccagagagcactcccaggtctcagctcagccaaatcatcactgaaccaggcccaggcatttagggaacttctatgaattgtgggtcccactgagcaccagcttgcttcaggtgcatgagggagggataaatttcctgctctttagagccaaccttccctaagggttttccttctacttagtgcctcaacttccccttctcaagatcacttggataagggaaaactgctgtctctctgcactgcctgactgcaatagcattgcagttgaaatgaataatggatagctgctaactttccatgtaaagtgcagtgctgctggggtcagactgggtgtgttcctggatataccgtgtccatttcacaagcaaggcttgccgggctcttcctgtcctttagtcgttaaacctaagctggctcaccccaaatacaagtatcggaccacgtatgagcatcacaaggctttcctggagcaggcactcagcttagcaagaccccatcataagctgatggctgctttgcaaaaggatgtagctgatggcccggtcagggagcacaagacctcgaggggtgcagctgggtggaagctgcctccctttctgggctcctatcattaaaaccatcagccacagagacttgaagctcaagggggtcgtgaaggttaccaggcctccagggtagagcatacctcattgcctgctggacggctttcaacagtttccaccctggggtcctaccccagcatgctgattcacagggtatgtgatataaagactgaggagaatgcccacgtggggcacatgctgttcctatgacccaaagaatcaggtacagtgcggggtctcctttctggcaggaggtggtacaaagaggcagaagtatttccttctctaagtgaccctgaggaggggaagctaaggcgctgagtgtgagcgaaaccattaggaggggctggctctagagcagtgagggcctggaggccaagtttgggctggaaaacagttttgattgtggtgaaggtacataagagtaggtaaatgctgatgggaaaacactagaacaaactttctttttttaatggagcatttgaagatctggagaaaaaaacagaaaatttcttaatgcagctggtcagtatttacttaggattagaatccagagaggatggtttcatcatatcatatcataaggtttcttccttagattaaaaaaaagtatacatccaagaggcataaacacattttatcacttaaatcttttttgctttaacttgtttttgaggaccagtagaaaggtagaaagaacccatgggaagggttcatcacttgagtctcaaaactaggctgcattttatsttcaataacaaatggcaattgatggcaatagtctctcaatgtaatacattttaatctcccagtttaactggcctgagttcttaataactagtcatttctttctaaattacctgccaattttccagatgtgctcagacctttctaatcgatttgacatagtttatttcaggttatgagttacacatcaccattacaatgtctgttgactcattcagctcttttgcagcatgcagtaacttacaggagattgtgctaaaatgtgtagtaactaagctctgctggtgctttatgctgtacctcaaaataaggtagcttccaatatcttcatttaatgagtatgaagtatgtaagtgcatatcgaagagtcttggaagtaactgaaatggaaaataaccggactataaaactcagttaatatatttggtagatgcttatataagtagaagccacatatacagatttctccaaaatgctaaagtcagctaaagactgttactcatattcaaaacacaagtatacaagagaacaccatgccatgctgtataatcacagaagacagaatgtattggtttactctgactttaaaaagtcactggagagcattgttctgacaaggctgatttagacagtaaacaaatctacttccattattgtagaacggatatccctgagatctaggttaacaagctataaagtacatttttattgctctaagcagcaactcagaatagtttgaagtaaaacacttctatttttaaactaccataacatttaaagctgggttttcaatttgttaacctatctcaaaaactgaatatcatagcctgattagtggcaagaggcattcaaagaaagatttttttttaatggatcagtgatgtagaaaatgtggtatcatctgaacagacttaatatagaaagtatattatagaataacatacagttcttcatgactttgaccaccttgatgaataacagcccaaaatatgcatcaaaagcctgagttataatggcttactgggtaagatgaatacttgatccaacccagttttctccstctcatagtgtcaggattgtgttgctaaaataatgctcattttttgacaattttacacttctctgtcacagagggattgagcctaatgccagaaattagcttaatcacagagttccaaatctgatcccatggccgcatgactgataccctgaaatataaacctatgctctctttccttgtgaattcctgtcaattctgaccttccttcctatttgggcagcagctgggtctggttgcctcagggaagggtttttcaggagaaaattaagagaaaagagtcctgccttttaaattccyggctattgggttttccaaagaggaagrttgcctaatgggagccagggcctgtatgaaaatgactgctatggaaatgcttctgacccctgcagacccaggcaggggaggaccaagtgtgtcttcagaaagggactctgctctgatcgccttttctctccacctttcctgtaagctgagatcaaggagtggaagtgacatcagcctaagagctgaaggatctgtaacctctgtcctgggaaaacccagggagagagagtccaaatgtcctgccagccagcagggcttggcagcagttgkagatgaaatgactgtgccttatctccaagcagacaagtccaaggtctctgaggattgccaagccccagcagcagcccagcgatcctacrgatgcaagaggagggcagagactagagtttcctggagctccagcaggaggcctcatgtcttaggttggcaccacgtgctgaaagagccgctggacccaaatggacttttgtctgtatgtgagggttgtggccaagactccaggatgsgaagtgctcawctcggtgatggccagcacggacatcccacagatgaggatgacaccccgcagcccaccctcwctgctacagaaaccccctagatgaggatgagaccaccccagcccaccctcaccagtacggacaccccagatgaggacgagaccccgmagcccatgctcaccagcatatgaggacacgacgttcatctcctcctgaggctgctgcaacaaggcaccatctttggaagcggagagtagccctcaccacacactgaacctgctgggaacttgatcttggacttaccacccccagaaccgggagaaataaatgttcattgtttataaattacccagtattttgttatagcagcacaagcagacaaagacagtcaccaagactgaggactgagcctcacccaccctcagagactggatgctgagtcatgaagaccaaagaccggtctcttgcccagcctttgggactgggcactctgcaaaccagtctgatggctcaacctaactcaagggaatgtatttaaggasggaggcagggcgaggtcaaaactttctgggattatctcaagattcaagttcaatttagacaagaaatgaatagttatacttcttaagactycatattgcatcctgagataatttcaccctgatatgttagttttttcactctgaattttggtgggaagttttacaagaacgtgtccacataagtattactatgggaataccttaacagctacagaaatcacatgcaatacgataccaaaacatctgtggtcacatgaaccaagggagcccatctgtgcagagctgtacccactattaattttttcactaaaattccagagaatacattggaagtcacccttccattatccacactagctgtctttctcttaatttgcaaagatggaactatctgggaggaacttgcttcagcctggtcattgctaaagaacacacccacaagatggaaagcaaccattcaaacataactgggggccatgcgcagtggctcacacctataattgcagcactttgggaggccaaggtggacrgatcacctgaggtagggagttcaagaccagcctggccttatgatggtgagcacatggtggtgaggcctcatggtcaagacagacatggtgaaaccccgtctctactgaatatacaaaaaattagccaggtgtggtagcatgtgcctgtaatcccagctactcgggaggctgaggcaggagaatcgcttgaacctgagaggcagaggttgcagtgagctgagatcacaccactgtactccagcctgggcaacagggtgagactctgtctcaaaaataatactamtaataataataactggagttgcataattattgtatggataacrtctcttttctcttagaaattatttaaatttaaaaaattaatgatatctagaattttgggttcttgttcctgcatgttttcctccaggaaaaagcaaatgaatgtgtctaatacttagaagagatactgacacactctcctctagatttgtgtaacaaaaataagrcctcaaaatcaatttcatctctgtgacataaaaataaatggtcaaaactttagaaaacagcataacttgaaaactgtaaaaaaaattccttcactccaatgagccaaatggctacaggaaatgttttctgattctattcctcatgttgctgctgccacatcaatgagagtcccactggagggggttaatraacagacagatctctgaactttccaggagacrcgtgccatgtgattgtatgaagtcatgtaagatttcatcaagtccacaggatacataagaatgaaacaggtttttgaaaaggaaaaacccggaataaatgaggacagaagagtggcccaggaggaaggagatggatgatgagaaggccaaggaggagaaggacctggctttcccagtctgagaatgactggccagagacactgaaggagagccacaacagagacttgtccaggaagagaagttaaaaaagagcttgcaagcccgggggcaatggctcatgcctgtaatcacagcattttgggaggccaaggcgggtagatcatgaggtcaggagttcaagatcagcctgcacaaaatggcgaaaccccatctttactaaaaatacaaaaattagttgggcatgataatcccagctactcaggaggcaaataaatgtaatgtgtgatctggactagattctgcatcagaaagaacttacaactaatgaaaaattggaaaaatttgaatttagaatgaccaccaaataacaatattgtaacaatattaaattttcagaatttgataaagtaactttatgtaaaagaatgtccttggttttaggaaatgcactctaagacagggatgaaggatcataatgtctgcaagttgctctcaaatgattcagcaaacagtaataattattttatatatatacacacacacacacacayatgcacgtgwgcacgcacacacacacacatgcaagtcaactctcattatttgtggtaaagtcaccaggaacactgaattagccaatactgctcctcaaggaaatacagggttggttcccaaaaacctctgatcacattttcatcaacgatcaatacataattcagttttatacatgtttctgttcaaagacaccttatttaggccaggcacggtggctcacacctgtaatcccagcactttgggaggccgaggmaggcagatggcttgaggtcaggagttcgagatcaacatggccaacatggtaaaaccttatctctaccaaaaaatacaaaaactatccaggtgttgtggcacgctcctataatcccagctacttgggaggctgaggcaggagaatcgcttgaacccaggtggcagagtttgcagtgagctaaggtcgtgccactgcactccagcctgggcaacagagcaagactccatctcaaaaaataattaaaaaaaaaagagaaagaaagctcccagaaaaaaaaaaaaaggttactcaaaaggccaaactctgcagagcattgaaaggaaaccatgttttcttcatggtttataatccctgcagtgttttgtgcaaacttgtacatagaggaacctctacaagggtaaggagaccaaaatttcatgcagaaaattatggtattatgacgatggtggcttttttaatgggcaagtgaygtgggtaacattgagcccacaacttcacctctaaagtgaagcagggtgctgaaaaaatgtatattgagagacccagagcagagaacttctgtctgtttaagtgtaagtggcatggcacaatttcagtacgttacacgggctgggttcatattatgctaatagatgagcttgggcccctgaaatctttgtttgaccttgctggatttttagcgctgagacttttaggtttagaggtttttaggtttatcattggggagctggcaaaatacacataaatgccaaccaccatacacaggcatacatgtatcactccacagaagagacggtgacatgttaacactgttattttatatttcaggttcaccataaacaccattgtgttcaaatttagtacaaagcatttactccacatactgcttgtaactaaaattcatgaagtagtcataagttgcttaattttttwaaaaaaatttgttaggaaataatttcatatttacaaaaatagttgagataatatccatatcccattcaccctttacccagatttacctactgttaacattttacccaatttgctttgtaatttactgtctatatctatcatttacacttgtgtgcatgtatatatgtatttttatgcagacagtggacccttgaacaacacaaatttgaactgccctggtccacttatacaaggatttttttcaataaacatactggaaaatttcttggtgatttgttacagtttgaaaaaacttatagatgaaccttctagcctagaaatattggggaaaaaaataacaaaaagtgcagggtgcaatggctcactcctgtcatcccagcactttgggaggccaaggcaggcagatcacttgagcccaggatttcaaggacagtctgggcaacgtggtgaaacaccatctctacaaaaattagccaggtgtggtggcaggcccgtagtctcagctacttgggggacttaggcrggaggttgaggtgggaggatcgcttgagcccaggaggtcaaggcttcggtaagctacgattgcacattacactccagcttgggtgacagagtgagaccctgtctcaaaataacgaaacaaaacaaaagttaaatatgttatgaatgcatataatatatgtagagagcagtctatgtgtcaatcacctgcctatgttattggtgaaactttcaggcaacagtagggtattagtagttaaattttgggggactcaaaagttctatgtggaatgtggatttctgactgtgtgcccctaacccctgcattgttcaagagtcaactgtatgtgtgtatgcagatatatacatacatmcayayacacacacacacacacacacacacacagtttttgaaaaatcgtttgatgccttctgaaccacttgatgtttgctcctgctgaatataaatcatatgtactggacttgccctgagactggaaaatattttaaaaaccgataaaattaaagatgtgattaaaaagagggtaataaatataaaaccactgtctaaacttgttaacattgtgaacactatgtaaataagcagactgaatgatccatgccatgagaggaatgaaaggggaacttacatttattggacatttgtaatgtaccagatatttggtacgtcatcagcaaatatgtctttgtaattatgtgaaatcacactttaaaaatctaataaattaattagaggccagctaaataggcagcgggccccaacaagctgtgtcatgagagctgaaaggaaaactctttcctggatatttcatgtgccagacagtttacgtaacatcagtaaatatgcctttataattatgtgaaatcacattttwaaaaaaatctaacaaattggtagtcagctaaaaaaaaaaacctggtagtgacagaatgaaacatagactttaattctgatttttaatcatttaaaaattagtttcatttagtaaataataactgaatacatattgtcagacactgctccaaggctgatgatgcaacagggagtggaactcgaggtgcccctgccagtgagggtcagagcgcagagagcacagctcaagcctggctgagggtttccattgtttgctaagcattcacacaaatgctaatgccccatcttcaaaatgatctagtcagggtttctgaaggtttgggaaataacacttcagggtaagcctgctaaagtggggaagacgcgagtgagcacaatggaaataattcacgaaggtcagaaaaggcttcctggacagtcgggttagtttgaaatccaaagacatgttggtgggatggagttgggggatgcatagaaatgacctggacaaggccctggatgcagagaatggttttctccaggtgtgatgttcagagtcgagtctcatcagaacccagcttgcctactcctcagggtccatacccaggaggtgagctttgttcactcaaggtgacaaatgtaaagagcccctgaggtctacacactcttcctcttataattttcccacatgtccaaggcattttgtaattcttacatccaagaatttaccacagacttgccactgactccatccatctatagtcttggtagagagagcccctgggtctctgttcttggtggagagcacccttgggtcactgatcttggtggacggtgccccaggtctctggtattggtggacagtgcctccgggtctctggtcatggtggagagggcccccgggtctctggtcttggtggagagcaccccagggtctccaaccttggtggagagagccccctggatctgtattcttggtggaaagcaccccactgtctctggtctyggtggagagtgcgcccccccacccccagtctctggtcttggtggagagcgcccccgggtctctggtcttggtagagatcaccccttggtctctgttcttggtggagagtgcgcccccccaccccgagtctctggtcttggtggagagcgcccccgggtctctggtcttggtagagatcaccccttggtctctgttcttggtggagagtgccccagggtctctgtccttagtggaagagtgcccccccccacccatctctggtcttggtggagaggaccctgtggtctccgatcttggtggagagaggcctcagatctctgttcttggtggagagcgccccctggtctctggtcttggtggagagcgcaccctgccccagtctctggtcttggtggaaagcaccccagggtctctaaccttggtggggagagcctcccggatctctgttctttgtggagagcaccccactgtctctggtcttggtggagagtgcacccccccacccccagtctctggtmttgttggagagtgtccctgggtctctggtcttggtgaagaattcccccaggtctctggtcttggtggagagcacccctgggtctctggtcttggtggagagtgcccccgggtctccagtttggtgaagagtgctccctgtgtttcttcagccatgtgaacatccacaagtgcacctctttgcaaatctcttgaacatgatgattggaaacacactttaataccttattcacatgtagttgctggagcattgacactcatctctctgcccttctaatttaaatttcccaccggattggggacattaatacagttttaaaaaaataaacatctaccttttgcgtgggtgcatgtaggacttagacatgaaagctaggcctcatttacagccccaaaggaaaacaggttcattaaggagcagtcatcattgaaagtttgctcattttgaagacaaccatcaggcagcccctggagtaaggctctcagccaaaactgccaggtcgtttaaagtttataaacacttccaataggcaaaatccaaagaatgaagtatatgcactgaggctggctgagcctgtggtccatacacaggctcattcagtccagttttattccctgataccattgccagcatcactgttagcaactaccaagaccaggacaatgacatgcacatctacagaagatcgtgacgatctgtgtctttctgtagatgtaaatgtacagacagagcgtggctctgtgcacacatccagcacatctaatgcagtgcagctgccacgccctgaacgatgcacccctggcgcatgctttgctacacaaggtggatctggctggtgtgcaatgtagccttgcccacgtgcagccacagtcagatgaaagcgatgtgtagttttagggtatctcggaagatgatttcaggtaggtgcaatttattttttactgcttatttttgtaatacgtatgaggcacaacagtttatagaaatttaagatatgttttattctaaaaggaatataaattttcattttatcttttctaaagcattcttgtttaatagtcatggctgatcttactatatataacttagtgttgcctgaaagatatgaagcgttmtatttttctatttttgttcacaaatacacagaaccttgactgcatgccaccatctacctcagatattcaaaacactacaaggaactcattcttctgcagtataytttgtgataggccctgttttgttgttgttgttcctttgctctttctataataagcagaaatacatgctagagttgcaatacatctaacaaaggtcctaagtgaatctatcaaaaaccaatgccacgtaagtgatcattctctcatgtagattccagtgaggggcctggcaacatcatccacaaattcccaagtaagcaacagtcttttatgtgacagatgttaaataaatgtttgccatactgtattgaaatccgacatttcttaccgttgctacattttatacagggacaacaaaccgagctgcaactaaagggcagaagatcagacctttcctctttccagtacaggcctgctggctgaaattcatttccacagaagggggtgttggaggacccccatttacatgtctgttttctcccctgtgctcagcctctctctggttccaaggtgtggtttgacctygacacagaagtaaaaggagactgcccggtacttaccacatgccaggtgctctgctaagtacctaaaaaatatatcccctcacacattctcacagatgctttttgagagaggtgttttgtagatatatcaggaaatccttatagatataccagctacttctccttgaagaaggagtaactccctcacgttccctgccctcttgaattcactggacagccctggaaggctgcttgggcacccacagtcagcctcatctcctggaagactgaaacctgctctctgtcttactcactgtcctatctgcacggccagctcggggcctggcccacagcaggtgttcaataaatacttgttgaaggaatgaattaatgaatgaagcctcctatttaccctaaccactgagtaaaacctttgctagattaacttcttatgtcctacattggattgatttaaaaatctgtatatggtacatctatatcagtgtagatgaacagaatagatcagttttagcaccaactgtcccctgcccccctcaatgattcctaaacataagagtctgggtgtctagacagagtcatgaataccaggccaactgggccaaaaatcacatggtggcaatgttactttttgcccaatagataattaacttttaaaactgaatttcttgagcaagaaggggagttacatggatagttttactgtgttaccttttgtgctattttttcccttcattaaaggacgatttctatagaacagagaactatagactgttaatgaaggttaaagtgggctatgtctcttcgtgcacaattggcaataaagtatggattttataatatattttacatgaagcttgatattgttcttgtgatttgatagagaattacatggggggttaatttttgaggaccatcatataaactgagaagctttttaaaggcaaggaaggcatttagactgtattgaaacaccatgagattcctcctttgtatgcaattacaatacatattacagaaaargtaatatttagtgaataaaaatttaagtagtactgaaattgtattattacatacaaagagccattctataatagcaataatatttctagaagataaactaagaaaagcaagacatctttaaacttgtcaccatagttattcactccattcagatttagaataacatggggcttatgcatatacattcatcttaacatactacaaatcacggtaaactaccgctagaaacaacatattggggaaatcagaggatttttaaatttgtcccttatgtgtcagctctatttccaaactcaaaggcctagaacaatctcaaatttccctagtactattttttaaaagcttaatgtataacatgggtaaccatctgttgttttggtctccttttgttgggggaatgagcatcaggtggctctagttggccatcttgctgatgtcactctttgaatccaagtaacaatctcattatacacagagataggcaggcacagatgagaaaaagattcagtctattcaatatttgtaacagcatcaaacactctaaaaaagtaaaatagattttatttgttaaaatgtttctcattattactttattcaaaaaagaattcattatcaagacagctacattggtgtgtttttttacttagtgaagaaacattaaaaattaagtttaaaataattttcttattcacatacatgacttttaaaaactgttgttataatttaatatctcatttctgtgtcataatgtcaatttttaattatgttgtaaaaatgtgaattgtgatattgcatcttacactttacacttgcatctcacacttacacttgcatcttacaaacatttaaagttattattccaattcccctaatataaaaaagtctcagaattttaatctactaatattattatgctttttgctcatactatttataattcacaggtatattctaaatttagtatttacccagttaagtgaaactatctataaccttaggtaaagctccaaaaataatgttgtaagaaataattcatagcactcaacttagttaccatggtgaccgttgctatctaatagtttggggataggaacttgttcattggtaactataattctataaagggaaagaccatgaatctacttttttaatggaaarcaaaatcccttctgatatgttataggcatattgactcttctgggcaggacaagaagagggatgccatttctgaaccaaggaacgttgcactatgtcttccctaaaacatttctatcagatataaaacatgtcttatatatttggtcccagtaagtccacatctgactgaagcctcctgaattttttttcctcttcttaaacatttttttattttggaaaatattttccttttttttttcttttttttattattatattttaagttctgggatacatgtgcagaacgtgcaggtttgttacataggtatacatgtgtcatggtggtttgctgcacccatcaacccatcatctacattaggtatttctcccaatgctatccctcccctagcccccaacctcccaacaggccctggtgtgtgatgttcttctccctgtatccatttgttctcattgttcaactcccacttctgagtgagaacatgtggtgcttggttttctgttcctgtgttagtttgctgagaatgatggtttctggcttcatccatgtccctgcaaaggacatgaactcattcttttttatggctgcatagtattccacagtgtatatgtgccacattttctttatctagtctatcgctgatgggcagttgggttggttccaagtctttgctattgtaaatagtgctgcaataaacttacgtgtgcatgtgtctttatagtagaatgatttataattcttgtgtatatatccagtaatgggattgctgggtcaaatggtatttctggttctagatccttgaggaatcgccacactgtctttcaccacagttgaactaatttacactcccaccaacagtgtaaaagtgttcctatttctccacatcctctccagcctctgttgtttcctgactttattctaactggcgtggaccccttccttacaccttatacaaaaattaactcaagatggattaaagacttaaatgtaagacttaaaaccataaaatccctagaggaaaacctaggcaataccattcaggacaaaggtgtgggcaaagacttcatgactaaaacaccaaaagcaatggcaacaaaagccaaagttgacaaatgggatttaattaaactaaagagcttctgcacagcaaaagaaactatcatcagagtgaacaggcaacctacagaatgggagaaaatttttgcaatctatccatctgacaaaggactaatatccagaatctacaaggtacttaaacaaatttacaagaagaaacaaacaaccccaacaaaaagtgggcaaaagatatgaacagacacttctcaaaagaaggcatttatgcggccatcaaacatgaaraaaagctcatcatcactggtaattagagaaatgcaaatcaaagcctcctgaatattaaagtgatatcatgtaaacaataaagagagaaaagatctcccagggatcctgctggcagttgctgatgccatattctctcctgtattattagaggacagcaggargagagtgatggtttccagtggaatcttgtggccttggcctcccttcccactcttgacctcctccttgtcagaagaaagcttcacagtagtgtaaagtctccctcaaatccacctacaatgaggttccacttgtcattgctttctttggagaggaaccccctatgatggtgaccatgaatattgaaacgctaccctccagatggctgcacccacatgagaacagtgatacccgggaagcatgcatggttttagcatggaggagggggtggtgaaggaacagagctgggaggccttttgtaatcttcggctctatctagggaaggaaatgtataaacattttccttctcatctctgttcacttcagacaagcatgatgtagaacaactggagatagacacacgagttcaagctccagggaaatagaaagaaaaattatttccaagactgaatggtcagtaagcatttagaakatcatactggaggaagaagacctccctggaaatacaactaatgaagactatttaaacataaaacttggagcattagtggaatgccaggttgataactccatgcatttaatgttgtaatgtgaccccaagtcaaggacacaattattgcagcagaatttttgggggaaaaccagccttggacatagactgtatgtcacttagaggaaaaggacaagtggttaatgtacaacctatgtgaaacaaaaacttacagaataataaagatgatatttctttcagccacttttggctaagagtttttaaaatgtttaacgagaaaagatggaggatgtctaaacaccatactacacagatggtgcaggtgaaggaagcatgtgtgtgtgaatgtctgtgtatgaatgcctgtgtgtgaatgtgtgtgcatgactgtgtgggaatgtctgtgtgtgaatttctgtgtgtgaatgtctgtgtatgaatgtgtgtgaatgtgtgtgcatgactgtgtgtgcatgtctgtgtgtgaatgtctgtgcatgtctgtgtgtgcatgtgtgtgtgtgaatgtgtgtggatgactgtgtgtgcatgtctgtgtgtgaatgtctgtgcatgtctgtgtgtgcatgtgtgtgtgtgaatgtgcgtggatgtgtgtgaatgtgtatgaatgtctgtgtgtgcatctgtgtgtgaatgtctgcgtgtgaatgtgcatgactatgtatgtgtgagtgtgcaaatgtgtgtgagcacatgaatgaatgtgtgagggtgtgaatgcatgtgtgagtgtgaawgcatgtgtgaatatacatatgtgtgaatacatacatgtgtatraatgtatgtgggcgtatgaatgtgtgtaaatgtgtgtgacyggaggcatgtgactgtgtgagtgtatgtgtgtgtgtatatgaatgtgtaactgtgtgaatgtttatgtaagtgtgttaatgggtgtgtgagtgtgagaatctgtgtgaatgatgtgaatgtgagtgtgaatgtgtgcgagtcgtatgaatgtgactttgtgtgtgatgtgggaataagtgtgtgcgagtgtgtgaatgtatatgtaagtgtgtgaatgcatgtgtgtctatgcatgtaggagccatgcctcatttcctctctctgtgccctggtacttgtggatgattctgactggcctccccccacactgatgtgataaaatctaatcgccacattggggggtgtccatcaggcagagatttgagggaaagaggcaaacagccttstggtgcaggtcacgtgcttccatctgcgacctcccaggagatctggctttgaagctgactaggcatttcccagtctggtgaattggctggcattctgtttgccactggtttcttgccctcctgtgaacagacccctggctatcactctaagaaggaagatggatgagtgtggatccaggcacctaagccctagcccaaaaccctaaatgatataaaaaaaataaggacattccaagtcacaaactggtaggcaaatcggcagctaaagtttgaagggaaagattaaaatagtttgtcttattaataaaagttctttaagccatctcagaatttggaggggaggaagtaaagttacaaaaaaactcaactatttgayaccctagccttcatctgagcatatatatacwtatatatatatatatattttttttttttaactccctcatgtttttgcctgatctgtctggtttggaatacaaaacaattgtaaaacaattcattccaatattgagtttatgcacatttctgaaataatcactattgttaatgtgaggtctgacatggaagtgcacaatcagaagcgctgctcacttgtaagcaataaaatctgtttgtagcttggtttcgtttattgaaaagaagataacttgagttacaaggaatctaagagtgaatgcgcagttatttggctcttccatttgttgctgaatggtaggcaaaaatgtactggctaatcttattttcttttcatgcctagtgtcagggtagcatatcaaattaattttaagctgrcctgatgataagatgtgagtcactgaaagttttggtgccgaattggtttttcaagctagctagtttccaaaggaatctttaccacatttagtggtaaagtgctttagtgactttaatgacatttaggatctagttgggctctaagagggtcatcctggtttgcttcattgctggtttcatgcccaaaacaacttccagtgacatcaggacatgatttttacagtatgggctttgctttggacattttgccaattttatgctttcctactttgaccagattacataatttcatagcattctttcaagaacaattttaaaatgtcttgctgacctacagcaatagattcagtgctaagacagacacatatgtgttgagtaaatgaaagtaaaggtttagaaagaaataactcctaccactaaaattgagaaaataatgacatgtgacctaccattaatgagtcaatctgtattttattaggaatctatgatggacagggcactattgtaggtactgaggaagatgtggcaagccagaaacgtaccccagttacctaaamacacacacacacacacacaaacagaaaaaccaaactactcttggaatttagtattcttatttatttcttgataaccacatctcatacgtataaataatacctgtagttccagggaaaaacatattaggcagaaagcccaagctaagcgttcatctctggcatctgggttaggcttacatgtgcactgtaaatggctgtattacacattaaactggtttttgtaacttttacttcttaactgagtaatttttttaatgtactaataaaattgagattctgatacctagtgatatcagtcaggccttgaagctaaaatcagtataattataagagataataaagtattgcactacctatgagcgctcattccctgaaactctattcatgtctctttatgcaaactgtgcttggaaatcactcagttcagaataaaggtgggggtgccttgagcagcggtgggatggtgggaaccaaggtagttgctaggacaatgtgggtgtctggacctgcaatttttcttgaaaaggttttacaaaaataatccaattatagaaattacctccctccctccctcttctttcctgtgaacgttttctataatctgtacaagttttattacaatttttagggaagtttctaatttctaattttctaattatgtatttattttttagaaagccaaaaggctggcttgagtaggaaagaaaaatctggaaatgagcaatttcttatagacaaaagtaagtggggtaatgatacatttaaatatcttctttcttgtttctcaattcaacatcattaatttttgttggcgtaagtttataatacagcattctaatactcaactgctagagataagatttatttagaagtattaatctatttacagaatgaagatattttaaaattacatttatcaagtgaccaatttcctccagattttagtcaacctaacaataccgctgtctactgtcttccaatgacactgagctctcatagagaacttagggcatctggagttagaagccctggctatgagtccacctccttaaaatctctcatgactgtggttttggcaagctctgaacttccctctctgttcttgagcctccktatctataagatggaaaacataatgtcacattttgtagttattgttagaatcaaaattaattcagctaaaaaatggtagttaatcttaaaacatatcttacagtgtttggaagaatttaaaatattctattgagaaagtagtcttttgtttttttttgttttgttttgtttttgtttttgtttttttttgagacggagtctggctctgtcacccaggctggagtgcagtggcacatctcagctcactgcaagctccgcctcccaggttcacgccattctcctgcctcagcctcccgagtagctgggactacaggcgcctgctaccacgcccagctaattttttgtatttttagtagagacagggtttcaccatgttagccaggatggtctcgatttcctgacctcgtgatccgcccgcctcggcctcccaaagtgctgggattacaggcgtgagccaccgcgcccagccgagaagtagtctttaagataagtggaagtgcttgttttatttttaatgaaatgattgctggtatttgaaaacatatatatgagaatgtgtaactcatggttaatgtatttttatgttagcataagctactgatgatttccaagttctctgaggcacagaagaaggccactatggcagatcttaaattattgctatagtttgtatagtgctaaacaatgttcttcagttttaaaagttttatatgcactcagaatagtatcaaccctttacatttctgtaagaccttggggaaataccttgtaccagaactaacagatctttgctatttaaaatggtaatcacattcaaactataacttcataaaatatatgtgccttatataaacatcacctatttatcaaacttaataaaaataaaatacaaaagtatgattgcatacttttattgataaatattaagaaattcctaaaaggagcacagttacaatgtttacaaagccttttctgactaacccatctagagtatgttaccacccccacatcacctcgttttaattttctcatagcaattgacattttttggaattatgcctttccttgattaaataactaattgtcatttcccactcccaaaacttaacattctatgataccacaggcctttacttttgttcacagtcatattccagcattgaaaatggtgccccagtcaatttycaatgcatgaaagaaaagaaacaagagaaggagggaggaaggaagagattasagatcaggagagagctatcaacgcagctatttttgtgagtctggctgaagtaaaggtaataaatatgttacaactttggcctttattatatcagaaatttctaccccataagaaacactcataaagtaagatatcagttgtggtggctttatttccaataatatatggataaaccagagcacatttagaagaaatgtatatgttctcattcataagtgggagctaagctatgaggacgcaaaggcataagaatgccacagtggactttggggactcaggaggaaagcatgggaagggggtcaggaataacagactacgaactgggttcagtgtgtactgcttgggtgatgggtgcaccaaaatctcacaaatcaccactaaagaccttactcatgtagccaaacaccacctgttccccaaaaacytatggaaataagaattttaaaaaagaagaaatgtacgtgtggtagcaagaaatcacactggtaagtgaatgaggagttataataaaaagtctcattggaatatccctctgagtgaaaagttaaaaaagttagagtattgtaataatccatgcacaaagaataatactagtagaatrattctcttcattgaacgcttggtaatcattaagcagtgtgctagttgctttgtatgcattccctgcatgtgaaaaatacatctgtgaaaatgtgcttaaggaacgcagggacacataatagtgaatagagtgacagtcacctggatttccacggtaccaaacccaggaggggctcccaggaatgtctccattccatctcagaagcctttcaaagaggacacccaatctcccaggggcagatcatcttttaatgagtcttctagctccattagtctataatttgcctcctttttataaaaccatatagactacaatttcctaatagagcaaccaagaaaaaatagcagacattaaataatcgcacaaaatgctccatgtactgtcaacagggctcatagtatattttcaggtaaatttttaattacttgcagattacaatgtttaattagtttcacagtaataataaaatgttatggaagaatattctttgctgaaattgtaattttattctgcacatggtattattgataatgaatttatcaagaatcaggctttccaagcactacttccaactgtctagctttccaactctgaaattatattaaaaataaatctgtaacgtcttacaaactcctttgaaaacttgtaaggtattaattttatcatggtaaacaaaagggcccccataacctgccacgactttttataactacagcatttatcagagcaagggcaaagcacatattcattagtcccttgcctacctcttccctgaacacaaaaatcacgctttttttcctgacaatagtctgaatggaaaggtaaacatttcaaaaattaaatctcataaaataaggattagtacactcaaaactaataatataccgtggactctacatctttttttgttctgatttattattcccaaataataaatttcagccttttgcagacaaggtattctactgggataatctcagaaaacatgctaagactttcaggctatgttacatagatggaatcaaagtatcaaggaacgttctgagccagagggatcttggagccgccctagcccagccccttcattttactgataatgaaatacatccactgttatttgggatttgcctttgctgctattcagtggcaaaccccagcaaatctttgctgttctcttcctctacattctgtaaagacccatgaagccatcgtcaccagcagcacagaagcaattctgagcagaggatgcacatgtcatcgtccctctgtgtacctgcgtgatgtaacgaggaataattaacggtacctaccagtctaacttaggagctttaggcatgctgccctgtgtcagcagctatcaggttaacgtagtcctcctagaacaggtctaaaaggaatttggttttaggttctagtgcagagttcaaagagcctgtgtcctttttcagtaggattcagtgttggtttgtgattgtgtaacaatcccaaacaattccccatctacaggaaagacagggcatcccgcggcagaccctgtgcgcatgtgcatggcgaaggagttgcstattctcctcccgcaggaagcaggtgatgagccggaaaggaggctgtgctctggcggctcgggtgcgccctaggctgtgagtagggatctcacctgcatggggcggggctggaagaaactcaatgccagagcaaggggtcctctccaggcactcagacagagtccctatcctctgttcctcaggggagaacaactcccaagggggaacgactgtggaccgcgcatctcaccactgtgctgcggcggctggcctgccacagctcccagcgctcccagtctacccagcactatgggaagcgctttcctcacgacaatctaaaagatgtaattctgtctgttagataattcttgttccattttaaagagacaaaactgaggtcaaaaaagtctgatggtcgctctagtaadagcggggaaaaggccaggatttaaaaccacggctgtccaccttgaaagcccattggcctttcagggcggcctatcgcctctagttccaggctggatctaggaacaccgtgtatcctatcctagtcaccaaggccatgtgcaaaggcatctctgctgcctgttcaaaggtgtctgaaaatcctttgaagcaaccctctccttattcagtgagagatccagcttaaaatgcaaaagggtctggaataagaaaagtcataagaraagtcaccctgaagggtaaatggcgcctgcmatacaaagctaagctttcttctctcccttttattgatgagaaaagtgaggctctgaaaagttctgagaatcgtccaagagccagcagcaaagtaatgggttatagagaaaagaattaaaccaacgtcggcctggctccaggcctggttctttccctctacgacgctgccttctaggacgagggctccttagagaaccatcttctcttgctggagaaaaccgggcctgttctgactgggagatgttcccaggaccctagagggtagccacctggttcatcaaggtgtgtctgtgtcacagggagaaaatattttaaaatctcatttcagttcgggccagttgctggaggagaaatacatttttcttgcggatagttcttttcgtttggaaaatatctcaatgcacattttaataaggcaaagatggcgggccttttgaatagtctgggagcggagagaggagagtccccttgctctgcataatacagaggaacctgaagcggcttcaaggtagggaccctggaggagaagccagcacagcccttcaggaagccagggtgcaggggatgaaggccactgtgtttcccacagtgatgtccaagaagtctcacatctgttaccagagatgtggagggagaaatggcaacagggatggagagatatccaagaaggtcccacagcaagagtttggaataaaaacaaaaatagaataaaacaaaacccaaaataacaaaacacaaggtagggtcctgaggcttctgatagtatgtgagaggagggatcaagctgttttaattgggtgccaaggtcagtgggctagaagactggggagcattcaggtgacacttctcaggggcaattgagcatttggtactgagccgctggcaaaggtaacttcacagtggaagcaggacaaggagtggagacctattgcccagtctttcccgctgtggaccctggttatcagctaagtatcacttatatttattatttaccatgcaacaaatatttctccatgcctatcatggacaaactctgagacaaagaaccacagaggaaacacctcttgaagtttagtcaagagaaaatgtttggctttcctgatgcactgatttacttcctttaatcaaacatgcacagtggagcttgtcaagtttcctgtcatgagtatctctggtatcttttggttcggttgggtgcactttgcttttcttagcatgattactctgatagaattctctttctccatcctgctttcttttctgtttaggcttttattgtaactgtgtcttttaagttccctcaaactgttttggaagtaggaaagtcagtaactagttgaaacaggggaattggaaatcagcattctagtttagagatttttttttttcttctgtgtatttggtaaacctctcttgaaataaacatggaataatgaaatatctgaagtggcgaaatctgaagtgcagaaaactctaagaagttatagcaaaagagcgagctctatggctcatagggtttctatgtcagtaaggatagtacctggcacataaatgttgccagactttaatcataaatattataataaagagtaattggagaagaaggagatgtttttagaagatttctggaaaagggatgggtgacggtagggcctaggggagattagttggtaaagaccggaagcacaggactctatatgctgcattcaataaatgtgtaacttcctttaaaattattttacatgagcaatttctcycaccaaaagtatcacctctgtttttctcccacaagtatttttcatccctcactcatgcatttgttaatccatttgattaattagaatgctctggtaaaaatgagtttgggttcatttaatttcttggttttcagagtgataactaggaaatcaattctgcttcaatctttcattgctgaaaatattctcaacatctattagcttattttttcaccccagcaaataacatatttaatatttctgtaatatttctttcatgcattagaaaacatgggtatctctggttcatcattttaaataaatcataactatataggtttgtaatatgaaaacttggctagctatttactgaccctagcactaaccttggaggctgatttttaaaacaaatctttgctattttgtttgttttccaatgatttcaagctctaaaagtagagcaaaaagaaaaaaaaaatctagtaaattaaaggttctatttagctatgttccagttaattcgagcctttctgaatgctaattacatgaggcaagttaaatttattctggagaagataagccttttgtgaaataaattcaaggagttcttagtcttcaagaagtgtaaaataaacttttaaataatttaagttatatgtaatgtacttaaacattttcaggatcatatagcagagttgagtggaattataaatctgaatagctacagtctaagctttttaaaatcttctttagaaagtttaaaaggcatccatgtagtcgaaacttaatatatacattaaaaaagaatcatgtttcaatgtgaagcactcagattaatttacaatgagaaggcttactgtcaattatattaagatgctgtatccctatatcctaaaacagcaggtaatacagcaagactatcatagtcagtggaactatatcattttytcaacatactcatatacattaataattaaacttcttaattttatgggagccaaggcagattgcatacatagcccacaattttatatctcaaatagcattcagaccagagcagctgtgaggtcttaaataaccagtatatgccaattatcattgagagccgcagtccagagcaagaatttggccattttcctaggtttcttgaggttttatcccgtcctagagggagtatattacacatgttcacaaatgttcggttaacatttagtaattggtgaaagattcactcgaggttctgcaaactccgaacagctatagatcattctcctaacaatcactatgtaagtctaaaggcatttctactggattctttggttaaaaaaatattctttggacaggaaatgaaacaaaatataatagcacatactttataggtcagtagtgggaacacaataaaatagtatatgaaacttgctcacaacaaacgtctagtacatgtagtcagtactcagtcaaggtgtaggagtaatcagaggtggagaagtctcctctctacaatgaagtctttaccagaaatgattttccaaccaactaaagtattcttggagttaaatgtcaacacttgtagagactgaaagtttattttagtgaaamttaaactttctaaaatatatatacaacactgagagttcatttaaacgtgaaagcaagggctagaacaaaaggaagcattttgaggttttcaaaatcttgagtccattttctcatgaagattgatggatggacaagtaggtagacaggcaggaagaaagaacatctgtcatctgtctcattgtacttctatttgcctatcgttaaactcccaggatcaacagaattctaggtgctatgtgtgagcacctagaataaggcctggcacatagtaggtcatcaagcaggtatggaatgaataagtatgtatttgtttatcctagagttatttttccaactctactctgtggctataataaaatgatttttaagaatatctttcatgtcaaattgtgatattatggacattaagcatcaaaatatggataattggcagtcagaaattttgaaatataaatatttttattcaagcagcatgggcaaagccttaatcaaatgtcaacagggaacacaccacacaattcagagggagaggaagagcttaaaaagataattattggacggtgagatttagaaataattagattgtcattgggactcaatgagtagagaatttctgtatcttcccataaaactgagaggatggaaaattccttggctccatagagaaaacagatgcatcaaagcacatgttggaaaggaaataatgcaggaatcaagagaaggagaacaagcaatggaaggcctcaaaataaggatcatgtagagtaaaaatataaagaaaaatgaagcagaaaggtagacaactccataacattaaataggtaggtatgagagcatgaataatttattcagacctatattcaaatcttggttttatccatttattacctctgtgaccttaggcaaattaagtaaactctctgagtctgtggttccttatttattaaataatacatacatacgacattgaagttttaaggatttaatgaaataacacatatgaaagtagcctgctgtgccgcagcatcgatgttctataaatgtgaagcttttgcttattgcacaaatgtggtttcaagtttaaacttgggttactccactgctcagtggtacccagcctgtagcttagcctctgctatgcagtgccatcctcttttgtttggttgtaaaggagacaagtttaccttttagggaagaaaaaatagatgcatttgcccacatgttctcaaacatccttacaaatagtaacaaggtgttctgaaatatatcagtgacaacataaggcttgtattctcttcaaagttcaacattgctgattatgttatacatcaatcactgcgctggagggactcaaaagtttcctagcccaactctctggttttacaaatgggggaaaccaagacccagataagtgatgtttattcacgtagtaacttgatgatgtgctcaacaaataccagtagagcacatagcccacatcaggcacggtactagacaagagtgcacgcagacggctgaagcccaggggctgccctcagggcctgtggatgcagtgtgtgcagggcccttgagtggaagcccagcccaggctttttccactctatactgagtagtttcctgatgtgtttaagcctgtttttacttatgacatagacttgggctyataaacaggaccaacatgggcactgaatttcctgttaatcactgacctgctgagagtagcaagattaaatgatttcaaattaattttgaagccaaatctaacccaggcaaaagggcacagaggcctcagcagcgcctgccttcgagatgagaccagctccaaagctcaccccagccagtctgcacaagcagcagagagagatgccttgcagcctgggatgtggtggcacttccccaaagtggctctcttcatcccagcacatgctttatctctgtcttactctagggtttacagcatcgtgttatggatgagggttgagaaacgtatctgaaagcagacaagcaagcttttccagttatacggagtgactttctgtactagtcctggatctttgctctctgagtctggaatatgtggatactcccagtttataaagatggctctgtggccaccttgacatggcacattaaattgaaattctgcttcaggtacaacttagatgttgcagcatttcttgtgtgcctagcatcaattgcttcttcctaaatgcatccccgttgccttttcaggcatctcctttcttctgctgtataaagtattgagggggtaaacaaagacgcttcccctctcccccaccacagagtatacagggggtcccaagaggttcagccagcacttccctctcacttcccagtgtaatgacatgacagaagctttgcccgtctttctccttcgcccctataatccggagtctcgtgaaaggtggtacaagggggaattggaattcattcccaagactctctggggctacctgaatcctgccttctaaatcttgaaacaccttccaaacttttgagtcacctcctcagtcctctgagttcccgtggactgtcctagagggagcacagtacagcctctttctgaccaacgtgtggtcaagccagacagagaggagttctgtcgcctaaaaccaaagatctcagctgacacagaaatgccaagaccttagtggatacaaaaatgctgagaccttagcagacacagaaatacccagaccctagtggatacagaaatacccagaccgtagcagatacagaaatcccactctgtgcagactcccttagtagcatctcagtgggacaggtcataaactatgaacaccaatggaagaggaaatttagagagctttacaacagagatctaaagtgatttcaccaacaattatagtgagcataactttaagagattcagtaaaagatttatccaacagttaagtacccaagactttctgccagcacctctgcatctccacgatgcgatggaaatagatgtgtataatgagaggtgggtggtgaggcagagggaggtgggttttgcttrgagcttccacgttccctctgtggtgctccttgtgttgacgacttcactcagggtctcagttgctttcgctttgataggtagctaagaacacctgccatacttttctggcagtttcttaattttggaagttaaaggaaataataaaaatttgaggaatatacaagacattatatatgcacctattattgctatcctaacagatcctagatcaaagattcaatattttgattacctacattttattgtattcccattcttagaaaattggcaatcttaaaacaatctttactaactttttctaaggctcacctatgagtgaaaactgggaatatatatcagccaattgaattaagacatcagactaatagcacattaattttattaaatggttaccaagaaattctattaaccctctcaggttctacacttcgagctgatttaatctacaaaatgctttgcatgtgtatgaagttatatatttaaatgttctttgctgccagctgtgaagcccataaatattcttcttgcaaacaagaagcgcacagccttcatgagaagcagtttgcctccttgtccattgtttttctcccygataggccttgacagctgatttacaggaagaggcctcaccttatctgcatctgtattgatgtgtttggtgagcaaaaaagcaactaacagacttaattttaatcagggaaaaaatggactttactcattctctcaagcaactacctaaattcatcaggtttttaaaccatcttctcttaccctcaacatggaaattcttcaaaggcagtaccaggacaaggagagaataattatccactctaagcctccgtaacttgcttagggaacataatcatggcttctcttccatgatatacagcaaaacatttcaaatttgtacctttgataaaaatttacaaattggcaacaatacattgaccaatcaggaatttgagagaaaccattaaatattaaatctcaacttattaaagcaaatgctttatactgtcaaatcctagaaaatctgtattttgggcagataaaataatagccacaatgattttaactacacacattgcagatcaaagactccagaccacttgctaaatagaaacaagaataattcaacatggcgagtgggactcaagtttacattgctcttaggcaaccaagttggcatgttctgctagacaacttactttctaaagaattgaaacaagactctaaaactcccgtttttctgtaccatttttattttatctgtcttcagtatatataaaattcatttggtgaaaactactagaagaggccttttaactttaaattactccattttagagacatgaaatgcacagctctatagatacaataggtatggaattacttcttccccygttacaagaatgttttctttagttatcctcttgaggaaactaataacgttaatatttgcttccctttatagatgatataaattagttaaaataagaaaatatctgtataaaaactagtctttttttgtgtcttccttctctctcccccacccccacctccctgctaaacccattttttagaaagtataacagtcaaagttgtaaaatccattactcttgtaggggagaaaaaataataccttttcctcaccagctacaagagtcatggcggagactactataacagaaggcggattaacaagagaaaagcataaaaaaatttatgtaacaaaagttttctgtgacacaggaaggtgccttctgaaattaagacccaaagacccaggaaaaactatgtaatttttttgcataggttccaggaaaaatgtacagttgtatagaaatgtgactggacaaaaagggggtacgacctaatgtactaaactgaggggactctgcaaggcttatttgtttagcttcttcttggcctttctgttcagggcaagacacctatcacttgagggtcttcaggggagaaaggagaaggtcagaaagtggcctttctargttttatggtttgctttggcaaagagaaattttggtttctatgaacctcctcaggggagaaaggaagatgaaggaaaggagggagggagaaggtgagagagtgacctccgaggtgtcacattttggggtagcgtgttctgaaccctgatactcctcagttaaacgtgtgctgagttgaatttctagccctgctaattcaattaggaaaaggtagttcctttgggttcatgtatagaaaccaaataagttaaaaataacaaagctcctcagatagttgggcagatttcattctagtagacatttaaaagaaattgaagattgatgcatttaaaaccaataattagatgtttttatcattgtacatttcttgcaacaactctggccatttattagtctatttttaggtgagagaacaaaggtacaaaaatggcaaacgggaaaagaracaagcataaaacagcttcgcttcaatcatctactgaaaaaaaaaatgatagagaggcataagttcctatgtcatcattgtgccttcatggaggcctccaattatttaaggtagaatatttttggggttcagaacatgatactccaaaatatagcacctttgtgtactgttttaagctcaagaaaatggaaaacgccgcagaagcaggagggtctctgtgacttytcctgtcctctgtctcctgaagtaggcatggaaactagaattccctccaccccttcttccctgaaacaggccatgaccgcagggaaggccactctttgacctgcggcctcacttcttccctgaagacctcatgtgacaggagtactgccctataccaggagggaaggaatgtcactcaggaacacggagaagaaactgggcaatcaggtctccctgagttgcccccagtttgtaccgattggagcatgccatttcatcctccagtcttacttctgcatgcctgtccataaaagtacacacatctctgtttctttgggtctccatttctgaaggctcccatgtcacataacctctattaaataaatgtgatgtttttctcttgttactctgtcctttgctctaaggttctcagccacgaaccttgtgataggtaaggaaaatatattactttttctcccctataatatagtgattggtttggctctgtgtccccacccaaatctcatcttgaattgttatacccatgggtcaaaggagggacttggtgggagatgactggatcatgggggcagctcccccatgctgttctcataatagcgagtgagttctcatgagatctgatggtttaaaagtgtggcacttccgccttctctatctctctcctgctgccatgtaagatatgccttgcttcccctttgccttccaccgtgattgttaagtttcctgaggcctcccccgccatgtggaactgtgagtaaattaaaactcttttgtttagaaattatgcagtctcaggtagttctttatagcagtgtgaaaacaaactaatacatatagttagacattacttaagtgctaaacacaacattcaccgaatattcaagagttaatatatgtcagcacaatgatgataccaatatggcttctaaattaatagttaatgttttacagtaacttttcataaaccattttcttgtcaggtaacaacaagaatatacacacatttatttttaaaagccttctgtcaagttgcattaaaagcaggttgcaacatgattggcagaattaagaagcctttgaaacaggtaacacagttgcatttaagtgtgggcaacgagaacatattttatatcttagatctagtttattaaagagaccttaaattaaaaaaaaaaaaacagagcaaatggatcatctggagaattcagagctaaagtgattaattagaccttattttgtcttgaacagatttactaagcatttttcaaatagccacattgtttgtaattaccaaaatcacacctccattggccagcctaagttacttcatgcatgaatgacaatctgatggaacactcttgttagagcttcattcttcattgtaattagccataatcatagccttcctgggtgcatgagaatgtgcaagccgctattcacaaccccaacccatttgaatatgaatcttctcagtaaggagcaataaaataggagaaacaaagcagtttctctagggaattttgtaaagcatctctactctaattctgcctcccttcaaaatgttccctctccggtatctggattctatttgctaaaacaagggtggcttaatgaggacaatggcttattatttcttaagtgacacgggagggcccaagtattccaggcttagttctttcagtctttgccaaggacacaaggaacaaaagaacaagcaagtgtgcgtggaaaagagaactcggactgggctatactctgtgaactctcggagcaagatgggggcctttgctattccggagctcaaaggctgttgcttgcttgctttcttctttctcccctctttacccaccccgctgcaaatgactcagacattatagaaaaaggctcaaagcagcagggattgaaaacaaaggctaagtggaggaggggtgacatgtctgatcccgtcccaagcacattcatagtgagccacctactggcaactctacttttccttctgttattgtctaatcacctaaacctcttcagggaaaacctaggtaaacccgctggagtcactccagatgccttctcagccaaaaatgggaaaaacaaaattcagggggaaataagcttcagagwagtgctgtgtcttcagaagaaaactcaatccttccagcaaaactatggctaagtagcaggtgtaaagaattattcaaacggctatttgtaaaagaatcatcatttgacttatgaagcaaaatcaactacttatttacactaatcacatcatatatgaaaagtgtggtgctgcacacgctacagatctggtgctccttcaagacctttaccatttgtgtggagagatttttttcttcgagacgtgccgctcacctattaagatacctgtttagattatttgctaccagaagatgctccagggctgcaggagactcgggatgattctctgatcatctcctgggcttggaccttcatcatgttgaaatgactctcccaaggccacacagccggttgaatgtatcactattaaagtacccgataacaatacaattcagcacttccacrgctatatgcacaatgcagttttaggccaggtgcggtggctcatgcctataatcccagcactttgggaggccgaagtgggaagatagcttgaggccaggagttcaagaccagactggacaaaagagtgagaccctatctctacaaaaaatttaaaaaattaccaggcatggtggcacactactgtagtcccagctactcgggaggctgaggtgggaggatctcttttgatcctagaagttcgaggccrcattgagctgtaatcacaccactgcactccagcctgggtgacagagccagaccaagtctctaaacacaacaataacaacaacaacaacaaaaccaaaactcgcagctttggacctgaacaaggataagtggccctcccggtcaaggaaggcataaagtccggcatgggtggaggtggcctgggacgctgtctgagaaatgaggggcagaacctgaacccggactccgtgagaaggggccataactgactagcaacaacatctgttcactggtgcccaaggaaggccagttaaatcacctgtctcccacccagtgtccactgtgctccaggaactgctacgccctatggaggcatctccagtggagaaaacatgactaaacgtcccagaagcagggagttggggcgctgggaagctggggtgggaacacacaccgctgggacgattgggggtatctattcccatgtcccttgtcataagttacattcaaattgacaggagagcttcttcctggctatttgcttctctgatctctctgttgtctcgtaccatattttgggattattttattttgaaagccatttcaatatttttaagtccctcactctgtatttcttctttctccatttttttttcttagaataacagtttaagacagatggctataataattccttcatcagataataagatataatttaagacacatttacaatacttacatctctgatacgcaaaaaagaagagtgtctataagattaggaattagtctaaactgaagtcctgaagggctgacagagaccacttttcctactaatttcatcagtgtcataaatcacaattataacacgatcatcatgtactgtgttctttttgtgtgccagatagggtgctaagtgttttacaggcactcctccacctaatccttacaacagctctaccaggtgtcagcgctgggcattatctccagcttacgccgagtctgagaaggcagcaacagcttgctcaagatcacacagctagttaacagcagggctgggagtgaacgaaggaatcatggttcacatgagactgcgtggggagtcctctgctcctaagattcagccacttcagcagcgaccaagccaggcgcgctcgcagggcacagcgtagaagcgatgctgctgcagcggctgctctaggaagagcgcaaggatacggtgataagaggaagggcggaagaaacgcttttcggactctgtgcacctccaaagggactacccatgtgaaattcaatggcaagtcacggtctgctgaagggacagctgtgctaaaaccagcgaagtggggcttttcacacgtgtcatcaggctcatttaggtgaagtcagaatcaaacacaattcatagtaggcctagctggtacagccacagactaaactgaaaggtttataactagccgtacagaggcctttttagtcatactctcatgcgtacataccaatgaatgtcagttacaccatctatcaaaacaaatataggttttaaaactgcatacacaaatatttgctttaatttctttttggagagaaataaagtcagtctcaaaccaaaaaataataataataatgtaggatctgtaatgcttgctttttaattccttctctatgaggcctgattatgtgtcagacagcattatctggaggtcacatggaactctaattcctggagcaaagtcaaaacatctttcaattctactggttaaacaaacacacagatggttttcttttgtggaactatgcaggtagaagtttctgttcccagtttaatagatcattagctactcatggactttcacaaataaaaaatgtgtgctttgacaaaatttaattccacaaacattactgaatgcttactatgcgcaggatactatatatagtcaagaaaataaagatgaataaaacaaaatcattcaattaaaaaaaaaaaaaacagaaagaaaatggtctccttctcccagaactagcaggttaatgagaactaaatatataaggcaaatacaaaataaaaactatagtttaagtcaaaatatgtgggaagtaaaatttatggacatagattagtaatatatttccttcaactgttgaccatagaatatgttagagattttaaatgtataatgatactaatgatattaataataatagttaatatttatacctagcatggacccaacaatattctaagttcaagaatatatggtcttatttcatctttataataaatgacaaccctatgaggtagatacatagatacaaacaaggaaaccaagacttagaaagaggttaagtactttgcccaaggtttcatatctggtagtatagctttttaaaaaatgtttattttaggtttaggggtacatgtgaaggtttgytacatagacaaacacgcatcatgggcgtttgttgtacatactgttacatcccccagatgctaagttcagtgtgtgttgtttccgcctttgtgatcataagttcttatcatttagctcccacttataagggagaacatgtggtatttggttttctgttcctgtgttatctggtagtatagctttgtatgcatatttmtttctgtcttattaaggctgtgataaaaacaagaagattggctacaaggactgagaacaccacagttctgtgaataaaataataagaaaggatgattcgaggctgatagtaacacataatggtaggatatcaggaaagttaaaacgtacggtaagtcagtggttcaaccaggtattgcaaagaaaagcaaaagacagaattttctgcctgatctccaaggagatcaagccattctggagcagagatttttatacygggtacacaaagctttggcatacaaaggctttccaaggagcacccaaatgcaaataattttaaggagttcaatttccagattttaaacgttcagtgtactcttttctgaaagtgatgatctgctcaggaaagcccctggtgttctcttttctctactcccctttcacaatagttctgccgctttacaaaagaaggaaatctctcatccatcccaaacctgacagttcactgtctctggctgcaaggccccaggtcaccaggccacaggctccgtttgaaatcatgttggtgacggtgttgagaaggggaatggctttgacggctgggcagcaaatcctgttgtaagtcaggcagtttctagtttttggctttcaagaaaattgaaggcagacccgacagtttatcagtgatgagatcactaaaaagaattattgattaatgaattgctatgtgattgttggcatataattctcaggataagttcaaagaattgagtcacattgttaaaattcctttcattcacatctgctttattataacagggctttcttgtgcttccttctataaaataaaacataggctcgaaattaatgctgggcctcattttatctaacaataaattagtattcagccacatgtatggaccaattgaaaacaaaagcctggactatcaagagatgaatttcatacaaaatgttacttttatgcttaaaaatcacctatcacaatttgtaatacatctatgtttttcatgcaaggtaggtccctttgtggtctctacctgccagggttcaggacaaattccacagtcccgcaggagaaggaggctccccatcccacagaagcgcgtcttagcctctcagcctgcgctgggggttctgctgctggcagcaccctggcccccgggggtcagtagtgctggtgccagttccttctgggagttgtctgagaaagacgcccagaattgaggaccctggacgcataggaatacttaaaccccaccctactctagtcagatggaggcaatcaccagttctgggggaagctgatcacaaaaaaactggattgaattgtagcccctctgagacggagaaggatcaagccctgggttctagagtcatcatggttcagatttacttgtggacaagcctgctggttaacaacaggtgttctgaaagttatgcattagtaatacttctaatgacaaaatttatccaggatggagctttccatctttccttccttccttccttccttccttccttcctccctccctccctccctcccttttcttttctcttttcccttccttccttcctcccttcctttctcccttcctttcttttcttttctcttttctttctttttccttctatacttttcactctcttacataagataggtagatggacaccatttcaaagtggtgtctatgtataaatacacattttaaatatatttaaattcttggacacatggttatgggaaattttttaatgtttaaattaatttacatatcatataataatcaataataattttcagaataaaaagttacattaggaaaacattctgagaggagagtgaaatgaaaatacagtttcaagggggataaaagaacaacataaaaatctggcaattaaagaaaagcaaattcatgtatttttaaaatgactgatggtgagaatcagatccctaatggtactaagaactggctggatacaattaacagagtgaaaaaaataattttatttttaaatgtcaatatttgtatttcactagaaattacattgcttgcaactatgataaacatgcattttagatgccagaataaagatctctaagagactaccatttttcagaattcttttgggataaatgtgaatgagttattttgaaggtcagtcctctagagaagagaacgtgtgtgggaatgaaggagatcatagtgtgggtgaagagacagcaggagccgagctggggaagctgtggccagggtgcagaagggaggcaaggagacaggagaggacaggagagagagctgggcatttattaagtggacctccctgtgaatcacaatctaccagccgcagctggacacgtgctcaccaggaggttcagtggcaggtggggatctatcagattggtccttgttagggaaaaatcaaagcattttcctccgctctcaccccactgccgccgcagtcaacacagaaaatgctgtggccaaatgtgtgggggatttccccaccaataggcaacaatcaattctgtagtaaatgccagctgggtgtcctaggattcagtcctgacactgttcacctggagatggcatccgatcccttgggctgggggctcaggtccgcaagactgtctcctccctcccccagacaccatttgcaagtctcggcctccagaatttctgaccaaccagcttcaagctggagtttcctcaactccctctttagtttggttaatttgctagagtagctcacagcactaagggaaacacttaagtttactggtttattatcaaggatattacacaaaatacagatgaagagatggatagggcaagatatgggggaaagggtgtggagcttccccgccctctccaggtgatccaccctccaggaacctacacatgctgagctattccgagctccctgagccctgtccttttgtgggtttatgaaggcttcattacatagtcatgattgattaaaccattgtgcattggccatcaacttaaccctcagcccctctcccctccctgggttcaggggtagggctgaaagttccaacactctagtcatgctttggtctttctagtgaccagctcctttctgaagctacctctgccatctgttgatttatttgcataaaaaaggatatcattttggagattctaaggattttaggagccctatgccaggaaatgggctgaagaccaattatatatttcactatatcatagttttaatctatgcatgcctactctatcacattagaaagccaacaagactcactataaagctacacatattttatgaacacaaataagttgtttaatacagatctgatgaactttgattttacttacacacatgagattgacagatcatagaccatgcacttgattaaagatattatctgtaaaattcccaaataaaactcattgaaagttggaatcagcaaacatttcccctaaatataagttttcatgctgctgctttgtgattctattcacatgcacatttatggattcttagaactgagcatgaccttagaaacagcattttggggatagttgagatagaaatatgctaccctacaaacttcttattaatgaagttataaaaaacaatatattaactcattactagtcaagttgtcagaatctgctgagcattaaaatgtgagaatattgattagcgactatttactgtcaaatggcaaacagcatgccttttctctttgagatattttaaatctatcttaatatttagatatttcaaaaatcgaaaacttacaagttatagtctaatttgccactatgattttaataattgcaaatactaaattgtagttttcaataatctctgtacttttagaaagatataaaaagtaaatacagcaattcaagaagagtaagcctcaaaatggatacagacaggaactattctgttataagtcctccaatctcagacaagcacaaaaagcctgagcagatcacccatatcagctggttatcatttagggctctgcagcattcccctggggggtgcactgtttggcaattggtcagcctgctcactgcactgcacgtgactttctcagcagcaggcactgggaatggggcatgcattcttcacatcagtggagcaaacagggagctgactatagctgcagaagctcaagatgctttcacctttcctgttcttttctctctcccctgtctccgtgctcgtcttattgcacacggacttgtctgcttgtgtgatattccccactcctttacatgtgtgtgattaattaaagcttaacgactgtcttaaagggtccttttttctttttaaccatcccttcactctttttgcacgccaatgtactaaattgctcacttgttccccaataatgtcaacttctttggtcttttcgtrttacggtaaacactgtttctcttgcctgaaaccctgcttcctctgcccccagcccttctcttgtgtttctctggtaaacctttagttaccatttggcatcaattcagttttcaacatctctgttgcaaatctctcgctttcccctaaagttgctctctcctttgtgtttccatagcacttggatttctagatctgctctgattgtgtattttatatacacagacctcacatgtgcattcttttccccaaatcactgaaattcagaaggcaaagacaattttgtatgaagtatctgcatttctgtcatctaggccagtgcctggcatatagtgtatattcagatcactcagtaagtgattattatccaattgatttcacatgaaataagccttaaattatactaaggcaacagaactaccatccatgaatcctaagtaaaatcacaaagaatggaaataaggtgtttcaaaagttccctcttcttcataaaaatgggcttaaggaagtctttgaaagaataaaggtagctaccttaatttcaaaactggaaagaattctatgtagtttgataaagctttacttgatatcttgtcacagggcaaagtgcttattctaagcccatagtagatttctggatccgatttcatctgttcatctagaaggagtgtgcaagacctcgtgtgatattttgaacatgagtctattgtctgtgcccaccatggtgcactgatcagaggctgtgttttcctggccagctastcagatagatgttctcttttcctttcctgactgctgctcctaaagctgaaggacacatttcggtaaaaggtaaagaagtcattgtgtttccttgctggtgctattttgaagaaggtgaagtttgtctgttgctcacagagaaagttgagatttgaatgcttgccaaatccagaggcccctcttgggctccatcccttggagctgtgcctcctgcgttctgtcctctcctgggccgcagcctccagctcggtgataactctgccgctgcaccctctagagcttccctttcccgacactgtagctcccgctgtcctcactcctgccggggtcactaaggagcaacttgggggcttcttggctctggtctgccccctccaatttctcttccctattcctgatggaatgatctttctgaaaggcaaatctgctcaggcctcttcctccttaaaacctttcagggcttctcactagcctttgatrtaaagtccagatcactcaacatgtatataaaatacttgatggtcaggtttctttccacttctatcctcctcctgagccctgccccyagtagctccttgttcaggttattcagaactactgtgaatcttgcaatgcatgctgctgttggcccctttgtgccttcaaacatgctctatcttccctaagtgaatgcaggacacatgtgttcacctcgggtgatgcttccttcctgccctttttaccttggggaccacgtccattcgtatacctccaactgtaactgttcccatacctgtatctcagcttacacctttatactgaggccccttatccattcaacaatacacacatactagatgttattgctgagcaaaaataaacagaaggcactgtcctcatagcaaagtatcgagtattacaaactatagtaacataaaaatcccaaaaaaggggaaactgaagttacaataaacactaaaagatgagaaatgtgggcctgcaagaggtcacatgcaaggaatatgacttcaacagagtgtcaaggaaggatccttgaataaagttctctcaagctgtggccttaaagctgtgtgtaaatgactttgatgaagagggtgtgaaggaccagtctaggaagaaggaagtgtgttgaaagtatggctgaagtgggaggatatagctggctagtgtggacccgtaaggtggtcagtgtgtgaagctctggagtcagtgtggggagcatcacagtgtggggagcacagtggacagtgtggggagcacagtgggcagtgtggggagcatggcagtcagcatgaggagcacggcagtcagcrtgaggagcacggcagtgtggggggcatcacagtgtggggagcacagtgggcagtgtggggagcatggcagtcagcatgaggagcacggcagtcagtgtggggagcacagcaatgtggggagcacagtggacagtgtggggagcacagtggtcagtgtggagagcagcggtcagcatggggagcatcacagtgtggggagcacagtggacagtgtgcggagcacagacaacagtggggagcataatgtgaactgaagcactacaggaattgccaagattatttcacaccacccaaaaggctacaaaaagccaaaagtggatgaaaggggtagggataaatatggtggtgccttctgtcctaaattactctggcaatatgataaaacagccactggagggtggcacgggtgayctaaaaaggcaggatacgatgtggggatgggtgattattagagtctcctactaaagatgaatataaagtgtcagagctaagagagatgggagagaccaaattcatttggcctggtgatggtttggctatggaggtaagagagacagaatgttgtcaaggaagattctgagtttctggcttactcagaagaattacttgtaatatggtatagctttaagatagaatggtaggtgcataggtgcactaaagwtttttacaaagtgtgggggctatgagaatgcacttcccgtatctctgactgcagggaatgtaactgaccctggaccaagctctgcactgtaaaatctaccgtgttcctgtgaagttgtgctccctggggctgctcccagcggtgactgagtctggcagggctaggaaagcaggccccctcctggagatgcaggatcctctgacaggccactgtggctctaagggcccctgacagccctgcccagctccccttagagacgcagtgcaggccacagtgtttccgtccagcttccttccttccctccccttcgctggggtcagacccgcacctaggtctgccggctcccccaccctgtcactggctcccttcctcctctccgccttaccctcctacttttcctgcatgtttaatcttgtcttggcatttgctaccctgagaacactaatgttaaacacagcaactctctaatgatgctgggaaatgatcataaggtgatatttagtaaaacacaggatacaaaacattaggtagtgtatgataacatacaaatgaaaattcagagattgaatgatgcaaactggcaattaattttaacagctggaggtaaattaaaacawttctatgaaactgtaaacatgtgattcaagaaaatacttttaatgaagctaagcagatcatataggctaaagtcctaagcttctgagcaggagaactggcatgacgtctgcagtgatgtggtgttagaaatattaaaggtgacagcaagcaacattttcttgagacaatgaagaaaagtcaaagtttagctaaatggacattgatcacaggaggttctaatgaccaatatatacaagaaatgtctaaaactgtgtatacttgaaattttttagcaaatattttatctgtccagtaaacacgagttttaattatatatacaacaaactttaccaaaaggtatgaaaatccttcccaccaaaaaaaaaaaagaaaaaaaaattgatgatacttgttgccacactgcaatgaattttgcaagcctgggggattcttgctcacggtttggacatgtgagtatgttttatttaggtttaattttggaacgtaccgttgcatatacaatggggtcagtggggttttgtttgtttgttttttaacctagtattttgtctgaagtatttttactgcattgctagtctgcaaaattatatctcatcaagtgaatttattattatttaattaactattacctattgtggctatttgggctgctttcgacatttcattataaaaatgaaacttttcacatagtttacctttatttacatcatttcctctagaacctaagatacgagattatttgacaaaaagcacatcagctttatgactctctaatactaggcagactcacattggattaataaacaaaactacttacacaaggatgaggtaaaacagtaccctaaaaaataataataaaagcatagtggacttctgcttctagccatgatggagtaactggtacagaactagccttcatgttatataaataactataatactggagaaaatataagaaataaccattttaagatgtttaacagcagacaatgaaggattgtgatcaataagaaatgaaaaccactaatttgtaatggtgacagcttataaaaatattacattcaacaaaagggaatgcttatgtaattgaagattcacccaggtcactgaatgttatgtagcctcaaaaatgatgttaagggaggagccaagatggcgcaataggaacagctccggtctacagctcccagcgtgagcgacgcagaagacgggtgatttctgcatttccatcggaggtaccgggttcatctsactagggagtgccagaaagtgggcacaggtcagtgggtgcgcgcaccatgcgcgagccgaagcagggcgaggcattgcctcacttgggaagcgcaaggggtcagggagttccccttcggagtcagagaggggtgacggactcacctggaaaatggggtcactcccacccgaatattgcgcttttcggaccggcttaaaaaacggcgcaccatgagattatatcccgcacctggctcggagggtcctacgcccacggagtctcgctggttgctagcacagcagtctgagatcaaactgcaaggyggcagcgaggctgggggaggggcgcccgccattgcccaggcttgcttaggtaaacaaagcagccgggaagctcgaactgggtggagcccaccacagctcaaggaggcctgcctgcctctgtaggctccacctctgggggcagggcacagacaaacaaaaagacagcagtaacctctgcagacttaaatgtccctgtctgacagctttgaagagagcagtggttctcccagcaygcagctggagatctgagaacgggcagactgcctcctcaagtgggtccctgacccctgaccccygagcagcctaactgggaggcaccccccagcaggggcacactgacacctcacacggcagggtattccaacagacctgcagctgagggtcctgtctgttagaaggaaaactaacaaacagaaaggacatccacaccaaaaacccatctgtacatcaccatcatcaaagaccaaaagtagataaaaccacaaagatggggaaaaaacagaacagaaaaacgggaaactctaaaacgcagagcacctctcctcctccaaaggaacgcagttcctcaccagcaacggaacaaagctggatggagaatgactttgacgagctgagagaagaaggcttcagacgatcaaattactctgagctacgggaggacattcaaaccaaaggcaaagaagttgaaaactttgaaaaaaatttagaagaatgtataactagaataaccaatacagagaagtgcttaaaggagctgatggagctgaaaaccaaggctcgagaactacgtgaagaatgcagaagcctcaggagccaatgcgatcaactagaagaaagggtatcagcaatggaagatgaaatgaatgaaatgatgcgagttgggaagtttagagaaaaaagaataaaaagaaatgagcaaagcctccaagaaatatgggactatgtgaaaagaccaaatctacgtctgattggtgtacctgaaagtgatggggagaatggaaccaagttggaaaacactctgcaggatattatccaggagaacttccccaatctagcaaggcaggccaacgttcagattcaggaaatacagagaacgccacaaagatactcctcgagaagagcaactccaagacacataattgtcagattcaccaaagttgaaatgaaggaaaaaatgttaagggcagccagagagaaaggtcgggttaccctcaaagggaagcccatcagactaacagcggatctctcggcagaaaccctacaagccagaagagagtgggggccaatattcaacattcttaaagaaaagaattttcaacccagaatttcatatccagccaaactaagcttcataagtgaaggagaaataaaatactttacagacaagcaaatgctgagagattttgtcaccaccaggactgccctaaaagagctcctgaaggaagcactaaacatggaaaggaacaactggtaccagccgctgcaaaatcatgccaaaatgtaaagaccatcgagactaggaagaaactgcatcaactaacgagcaaaatcaccagctaacatcataatgacaggatcaaattcacacataacaatattaactttaaatgtaaatggactaaatgctccaattaaaagacacagactggcaaattggataaagagtcaagacccatcagtgtgctgtattcaggaaacccatctcatgtccagagacacacacaggctcaaaataaaaggatggaggaagatctaccaagcaaatggaaaacaaaaaaaggcaggggctgcaatcctagtctctgataaaacagactttaaaccaacaaagatcaaaagagacaaagaaggccattacataatggtaaagggatcaattcaacaagaagagctaactatcctaaatatatatgcacccaatacaggagcacccagattcataaagcaagtcctgagtgacctacaaagagacttagactcccacacattaataatgggagactttaacaccccactgtcaacattagacagatcaacgagatagaaagtcaacaaggatacccaggaattgaactcagctctgcaccaagcggacctaatagacatctacagaactctccaccccaaatcaacagaatatacatttttttcagcaccacaccacacctattctaaaattgaccacatacttggaagtaaagctctcctcagcaaatgtaaaagaacagagattataacaaactatctctcagaccacagtgcaatcaaactagaactcagaattaagaatctcactcaaaaccgctcaactacatggaaactgaacaacctgctcctgaatgactactggatacataacgaaatgaagkcagaaataaagatgttctttgaaaccaacgagaacaaagatacaacataccagaatctctgggatgcattcaaagcagtgtgtagagggaaatttatagcactraatgcccacaagagaaagcaggaaagatccaaaattgacaccctaacatyacaattaaaagaactagaaaagcaagagcaaacacattcaaaagctagcagaaggcaagaaataactaaaatcagagcagaactgaaggaaatagagacacaaaaamcctttcaaaaaattaatgaatccaggagctggttttttgaaaggttcaacaaaattgatagactgctagcaagactaataaagaaaaaaagagagaaaaatctaatagatgcaataaaatatgataaaggggatatcaccaccgatcccacagaaatacaaactaccatcagagaatactacaaacacctctatgcaaataaactagataatctagaagaaatggataaattcctcgacacatacactctcccaagactaaaccaggaagaagttgaatctctgaatagaccaataacaggagctgaaattgtggcaataatcaatagtttaccaaccaaaaagagtccaggaccagatggattcacagccgaattctaccagaggtacaaggaggaactggtaccattccttctgaaactattccaatcaacagaaaaagagggaatcctccctaactcattttatgaggctagcatcattctgataccaaagccgggcagagacacaaccaaaaaagagaattttagaccaatatccttgatgaacattgatgcaaaaatcctcaataaaatactggcaaaacgaatccagcagcacatcaaaaagcttatccaccatgatcaagtgggcttcatccctgggatgcaaggctggttcaatatacgcaaatcaataaatgtaatccagcatataaacagagccaaagacaaaaaccacatgattatctcaatagatgcagaaaaggcctttgacaaaattcaacaacccttcatgctaaaaactctcaataaattaggtattgatgggacgtatttcaaaataataagagctatctatgacaaacccacagccaatatcatactaaatgggcaaaaactggaagcattccctttgaaaactggcacaagacagggatgccctctctcaccactcctattcaacatagtgttggaagttctggccagggcaattaggcaggagaaggaaataaagggtattcaattaggaaaagaggaagtcaaattgtccctgtttgcagacgacatgattgtatatctagaaaaccccattgtctcagcccaaaatctccttaagctgataagcaacttcagcaaagtctcaggatacaaaatcaatgtacaaaaatcacaagcattcttatacaccaacaacagacaaacagagagccaaatcatgagtgaactcccattcacaattgcttcaaagagaataaaatacctaggaatccaacttacaagggatgtgaaggacctcttcaaggagaactacaaaccactgctcaaggaaataaaagaggatacaaacaaatggaagaacattccatgctcataggtaggaagaatcaatatcatgaaaatggccatactgcccaaggtaatttacagattcaatgccatccccatcaagctaccaatgactttcttcacagaattggaaaaaactactttaaagttcatatggaaccaaaaaagagcctgcatcgccaagtcaatcctaagccaaaagaacaaagctggaggcatcacactacctgacttcaaactatactacaaggctacagtaaccaaaacagcatggtactggtaccaaaacagagatatagatcaatggaacagaacagagccctcagaaataacgccgcatatctacaactatctgatctttgacaaacctgagaaaaacaagcaatggggaaaggattccctatttaataaatggtgctgggaaagctggctagccatatgtagaaagctgaaactggatcccttccttataccttatacaaaaatcaattcaagatggattaaagacttaaatgctagacctcaaaccataaaaaccctagaagaaaacctaggcaataccattcaggacataggcatgggcaaggacttcatgtctaaaacaccaaaagcaatggcaacaaaagacaaaattgacaaatgggatctaattcaactcaagagcttctgcacagcaaaagaaactaccatcagagtgaacaagcaacctacaaaatgggagaaaattttcgcaacctactcatctgacaaagggctaatatccagaatctacaatgaactcaaacaaatttacaagaaaaaaacaaacaaccccatcaaaaagtgggcaaaggacatgaacagacacttctcaaaagaagacatttatgcagccaaaaaacacatgaaaaaatgctcatcatcactggccatcagagaaatgcaaatcaaaaccacaatgagataccatctcacaccagttagaatggcaatcattaaaaagtcaggaaacaacaggtgctggagaggatgtggagaaataggaacacttttacactgttggtgggattgtaaactagttcaaccattgtggaagtcagtgtggcgattcctcagggatctagaactagaaataccatttgacccagccatcgcattactgggtatatacccaaaggactataaatcatgctgctataaagacacatgcacacgtatgtttattgcagcattattcacaatagcaaagacttggaaccaacccaaatgtccaacaatgatagactggattaagaaaatgtggcacatatacaccatrgaatactatgcagccataaaaaatgatgagttcatgtcctttgtagggacatggatgaaattgcaaatcatcattctcagtaaactatcgcaagaacaaaaaaccaaacaccacatattctcactcataggtgggaattgaacaatgagatcacatggacacaggaaggggaatatcacactctggggactgtggtggggtggggggaggggggagggatagcattgggagatatacgtaatgctagatgaccagttagtgggtgcagcacaccagcatggcatatgtatacatatgtaactaacctgcacaatgtgcacatgtaccctaaaacttaaagtataataataaaaaaaaatgatgttaataagggggttctaataactagtgtgggaaagactcactgttcagaccatttcccttttcctttgaggtacacagctggactgtatttcccagccttctttgaagttattcatggctatgtgattggctgatttccgatcaacaaaaagtagatgaaagtgaagaatggaacctctagtctgggaccataaacgtccctcataatgattagcctacatgttctcctcccacatgtatgggaaaaggatacaggagaggattcaggaaaagaatcaaagtaacttaggtccctgagtgactgcctggagcagaggcctgtccatgacccactggactgacagatgagtgacagatggycttactatgtcaagccacggagattcagaggattattttctacggcagttggcataaactcctatacctgaaaaaatacttacgttgaatataaaatgatatgtaataataagtcaactaagataggaaagaataatatggaagaaaatctgccaaaacattaacactggttccttctggtagaaactttttttcctccttgcctacatttttctatattatctaatttttctaaaataaatatgatgtatcatttcaataaggaaatgctctttattttctctaccttgattctttgtatttattttcaaaatcacctataatttatttaaatatatggcaacaggaatgctaacaatttcttgtttccttccaagtcattaatcctgtttccagatgcctttgatgactgtttacctttccttgctgttgtgtgaggcccctstagtttttaaaacatgtgctgaggtgtatgactggtcggtgtgtatgtactccttcagagataatttaaggttgtctcagttctatttcctttctaaaatttgttgaaacttaattgagataagtctaccttttattaacttattggaaaatgtcatttgatttccttgcttgttaatttttccagataagttgtgaggattattctgtcaaatccaactaaaaattatgagatttttattttgctcttgcttaaaagaaatagattacttgcatctcatcctctgctgctaacattgtgaattcaccctttatgtctccctcctcttgatcactagtattctattatttgccaattctatctcctcttccaccatctttccactccaactccttatcatttaatgtgtggactgttgaaacagctgctagagtccaattcaacatgcatgctggtgacaacccaaatactctttatcagcaccgcgtgttacatatatactcggtgttctttaataaaatacttgattcacaatagttagtgcctgaaacatagactttaataacactaatttccttctttatcatctcccccactatctacgcaggacaatgcgctacctcagattgtcattcagggcccctcacaatccagcttccgcctttccacttaatcttatcccacattattccctacttattacatccaattatttacatttccatctctgaatcaggtcaaccattgttaaaaaaaaatacttaaattttctgtaaagaagcatatgagtcttctctaacattcagctgcaagagttttagtgctataatagaaagaaaggactggatatagcagacctaggttctagctccattagggctactcactagctttgtaacattgtgaaaaatccccaaactaatatctgaatattagttttatacttgaagacaraaaaatggtttagaatttatctggttttcttcctaatattcatgataatctttgaataaaattttacagcacaagttgtaagaatatgctaagaaaacactcwwwtaaatcaaatgaaaaatacaaaaaacaagaagggatgtgactaaaagagcaagattgaaggtataaaaaataatcaaatcgagggaaatgaagcagagagaagcaaaagataatggaacttctttctaaatgacatagggctcttccctccacctccactctttggtacttttgagtagcagaaaggacggtatgatgtaaaagtggtggaaacctgaaagctgaatccctcagcttgagcgatcatggaaggcagaagaggaaagaaagggaagtgttcagataggtgttcctacctcacccctctgggccaacgcgccaagcaacagttatggatattgaggagaatgcgaagaggaggaggcttctgcttccctgaagtcacagccctctgactacccctgtaccaagctagacccaggatgtgaaaacataacccaattgcgaaaaagaaaggggagaaagcctaagttataaagatttataaattgagggaaataatgaaaattcgaaggaataaagaagagaaaaagtgattatctctttttcccattcaaaatgctgcacaatgaatgtatgaagtattaccaaaaataagtaaaaaatatataaaaatcatgttaaagtcaaatataaccttaaagccatgcaaaaatatgtcagaattcaagatttaggacaggaaagtatttaataacaataaagcaaaagaagacagaacaggatgtgggacggaaaactgaccaaaacaaaggaaaagagaggaagaaaaaagtagggtatttttaaccacttttttcctactggaaagaacaattttacttatgaatttcacacaaatcgtatgattcttttcattacaatttgtaacagaagaccttaaaagagttgaaaagttggagtgagttattactttttgttgaaatgtgtccaatggtagattgtaagacctaagctaattttcatttcctcaacaagttcatatagatgacggcaggtaattaaaaagcacatgctacttgtgtaatatataacaccacacaacaaaaaaaaccacagattttctctgcttaggatagaatttcacaaacccttcggtttttcattgtcgagatgcatgatcaaacctatattttaagatgtataattaaatacatatttataaaatgcatttatggctaaaaaattgtttgcagatattttaacatgatatccaatttactgtttgtgatttatcttcttatacttgaaggtgtgcatcacagaatgatttcctagcatgttccaatgactcaagacagtgcttccctcactattaattacaaatagcaataaaaagagtagggagaaggaccagatcatattatatcttctttttagaaatggaatttgctttataaataattctcaaaggatgacaaatggcaaacagaataaaatttaatgtaaagattctcctttgtaatacttcatgtatactttgcatattaaatcagatagcaatgactgatgaaacaatgttttactgaagaagccatttctaaagcatattcatcatcagaaaagaaagactaagataatgaaaaaataatatagtttagcttgtataatttattccaagcttcaaacaatggaaggaaatgggaaaatgaaaaagagtaaccaaatgagcattgagttaagtccttgaaacagggctcaatgaggccaagtagaataataaaaatgtaagtaagcatattcgtttaagttactcttatagtttattttaacttaatatgccaaaataaaggggatttaatagtttacgtaaatcaggaaaacccctttggtttcaaattttattatcaagttttacattagaamcaaattttggtttggcattaggacatgataagccctgattatgctctttaacatgaaattgcaccttctgggtttcattacatcaaagtaacatacaaatgatattagcaaaaatgcttggatggaaatataatagaatctacattcagatacaggacagttgctttaaggagtatttttggcaaaatgctatagagagaggccagtgatcttgaggcataactagataccctttgcaattatcaaatcttttaaaaaaatcaaacaattccaagttttaataaggatgtcagaatcagggtctttgcaggtaaaagtgaattgaatacaaaaatacacacgtacatgtgcccattggtttaagggatattaaacagcatatttgggaaatggcatgtagctaattcaactggcctaaaacaacttatatcatttttaaaggttttataaccttttatgtatgcattcattatacaatgtatgcaatgttatacaatgtatataatgttttagacagggtttaaaaacacctttttaccctgatattttaatgtctaattaaattatatgtatttcatatgttgtgataattttttagtacaggtacagttttcttacttaactctctgtggctgctaaacattccaagtagaaaacataactgacttaactttcttctcttttttaacatttggaggccatattgccaataatctatacaaaaacaaatacacttcactgtgcacctaacgtacatgaaaaatctcttatgaaattcattatgtccatttcagagagacagaaagtaaagcggtggttagcaggggatgtggggagcagggagtgaggagctgtttaatgggcatagastttcagtcttgcaagatgaaaaaacgtttggaaaattggttgcacaacgttaatgcacttaccacttaccacaacttgaactrtacagttacaaatggttatgatgttaaactttacatcatgggcctttaccacaattttaggaaagaaaagaaataagattgcatcaatacttataaaaatatcatcagtaaaagtaaaactgttatactgaaaaaagtcctaaaaattcaaattaattaacatattggtttttttaagtacatatttttttaattgcagtcccattaaaaagtgggcaaaagacatgaacaaacaattctcaaaagaagacacttatgcagccaacaaacatatgaaaaaaggttcaacatcactgatgattacagaaatgcaaatgaaaaccacaatgaaataccatctcatgccagtcagaatggcaattactaaaaagtcaagaaacaacatattgttttttcaaaataattagcatattgttttttaaaagatacaaacaatgctccaattccagaaaagtctgcacaaacaagttatcaaggcaaggggaataaaagagctccagaggggaatcaaaagtgacaaaaagtgttggtaatatcttctctgaatgaggcagttactagaagaaagacaaccaaattaaactgaagtcwtcttaacagctagaaggaatattgcctaaatatggaagtattctcatttttccaagagagctgagatcaagttagcaacatggctatggttaggtaacaaaagaaagttaattcatcttttgacactagtaataggaaggctgtaataatttcttttggaaattatgacaaattattatttttcataactcacctcattattagttgataggggaaaaagtttaaaaccctgcacttatgcctgaatccactgtgaaaggtctagtaaaagaaatttaagtaaaaatatcgagatggcatcactcctttcaaatgttgattaaatcttcatttcataaattatataaaaaagatttttaaaaaacaaagagaaattgcttgaaaagttattcaaattgcaaatcattggttttgttgagtagaaaggaagacatcaaacaaaatataatagtttatttggaatcatctttatttgggcaaaaaaatgaaaaaaaaaaaaagactgcttttatgtgcagaagctagaggttcagttcctaagagaaaaatattttaaatattaaaaccatagctcacaatgctcattctgtttctattcacttcctcccattatgggaaaaatttatgcagaagcttgtccttcacagatgttaattatcagaataatgtgagctacattgttcccactctcttttacacagcaaatcccagcagaagctaaagaatataatagatgtggtacaagttgtttagaatttgtaaatgccactaacaaaagctaaacatcaaaaccattttaaaccaaatatagcaagaattttatttaatatcactcaattattaaaaataaaatttagaaacaaccagcccacacagattggagcactgataaggcatatttagatttcatgaaaaataattgattaaaaaatgtcttttcttaaaaaaacaaacaaccccattaagaagtgggcaaaagacatgaacagacatttctcaaaagaagacatttatgtggccaagaaacatgaaaaaagctcaacatcatcatcatcacgatcattagagaaatgcaaatcaaaaccacaatgagatatcatctcacacaagtcagaatgacgagtattgaaaagtcaagaagcaatagattctggagaggctatggagaaataggaacgcttttacactgtttatgggaatgtaatttagttcaaccattgtggaagacagtgtggtgattcctcaaagacctagagccagacatacatttgacccagcaatcccattcctgggtatatacacaaaggaatataaatcattctattataaagatacatgcatgtgtacattcacttcagtgctattcatgatagcaaagacatggaatcaacccaaatgcccatcaatgataaacttgataaagaaaatgtggtacatatataccaaggaatactatgcagccataaaaaggagcaagattacgtcctttgcaggaacatggatggagctggaagccattaaccttggaaaactaactcaggaacagaaaacctaaacaccgtatattctcacttacaagttggagctgaacaatgagaacacgtggacacagggagggaaacaacacacactggggcctcttgtggggtggaggtgcatggggagggagagcatcaggataaataactaatgcttgctgggctgaattcctaggtgctgggttgataggtgccgcaaaccaccatggcacacatttacctatgtaacaaatctgcacatcctgccatgtatcctggaacttacaaaaggaagtttaatcaaagaaacaaaataaatgtatcaagtttcactaatgccaagaaataatatggcattcttatgatttcaccttattcaagatctcaagcactaccagggcaagaatttagatgctgtatgtacagcatctaatcaatgtctggcttatcataaatgctcaataagtacttgtcraatgaaatatttaataaaacaatgaaaagcaataaatayaaattgaacatcactaaattttaatcacaaagacctatcttagaatgaataagtggtggtgtatgcgttggctttgaaggcagtttcaaaacccttcagctctgcttgtctccctcttaccctctaaaccctacctgcctgcctccgtgctccaaataccatcatgaaagttgcactcttctgggtttaaagaatgaacggtatgttagaagaataacaataatctatgggattctcacagaagaggtgggttttaatagcaggcagaataggacaaaatgaagcagattagaaatagaagatattattggaactaatggcagtaacaaagatgctcaacgcatgtttcttgaataaatgagtaaattcatgactaaataaaggagagctgagaacgtgtttgttgaaagtaagaaaagtaagaaggttccagcagcagctagaagggatgtctcaggatgtctcagtcctctctccccaacttcgtctccttcarctgagccctccaccaaagccgcccaaataactaaatgcttgataagtaaacatcgttttaatgtaagacgtctaccccccaccatgcctgcacactttcaactagatcaccatcctttaatccttgctgtctaaaatcatttggagctattactggatggtagcgagagccacagacaaaatgtctttcttatcccagtgttttgcctgggacaggcatggtattgagctctggagaaacatcactgtgtccctggggagagggggatgagaatgggtgccaaggatggctgtttgatatatcggagcacagccctgaagaggggaagttggccaagagttggagaaactcattcctgatgaaggccagcgggagacctgggagttttgttttcttggaaaatcaaggaagccagtatggctggagccatgtgggtgagtgggtaggggcaggtcagggtcacaggaagtgagaggcatgacaaaattaagggcttctaacctgccagtgactccacctgattccagtctggctgcctgacacagttcaaccattgtccccagggccccaagaagcacaagatcttaatccccgattccccaaactgctcaagttagtacacttgaggttggtaaatacatcggtgttgctataaagtgaggaatggggcaagagggtgagagaagagaaaaaaatacccaaacaatattaaatccctcagctctgaaccatgacagcattctgagagtggaccacgcccttcctcctgtttactgcagcctcagagacactagcccttcttgctgttaactttctataccacattggttttgtgttagggtcccatttgaataaataataatgagaaggcattgcaagataatctaaagtccaaagtagggattgagtgatgacagggtcaggacagcgatccccaaatatgccacatctttaaaaatggaagaagcaggaagttctctcacacattctcccaccttgttttcctaaagccggtcataagaccctcatatgtgaggggtkcccttcctakacccggagaaaaagaacatccttatctctgaagagaaaaggcaacatatgttgctgaacgttccaatggctatgtcattgytaggtaatatgaatttttcagatctgttataatcttacggtcccaccatcgaatatgcagttcatcgttcaccaaaaccacattatgcagctcatgactgtacttatgactaattgtatacactgcacaaaggcctatatcaccagtgattttcactgcacttaataaattgcaaccttctgaaatgtgtgatggatgaaagaatgctcagaacaaacaaatgaatagtgcacgtctttaatactcagtttcatctcttttcatttaattccattaatttctcagatacatcctgttatacaactgccatagcagaaacttttatatatttgtatcccaaaaaagttcatgagctgtgactccatctgaatgtgtcttccctgcaggccaggccttgcctgcatttggggcttgctttcgtgtgccctctctaaagacaatctagatatgacactttatctgctcacatgtgtctcatcatttcctgtttgtttttctaaatctgctcactagtaacgattttactttcaaaagaagagagaaaggggacacaaaaaatggatttgcttggctatttaggtttttcttatttttgaaatgtgaaaagtacttttcacaaaggaaatatatatttgcataaactcacaaaatatttatgttgaaatgtacaaaacacagtcattcatgattcctyaattagggttttagtggaataaaaatttaattaaaatataatttgttaattcattagtgtcgggttataactcttacactgatttttagtactaggtcctgaaattgcacaatttactagattattttcattgcattctctttaacactttattctttttgatatcactgcattttaaacagggcaaattattaagttaggactcttatttttaaaaataatttagacaatattaccaaatagcctacacattaatgtcaccttatttggaaaatttcctctgaccaccccacaaaagggtgctatatcctctcacaactctctctttcaccctgctttattttgcttcatactattaccatttatcagtctctatatttatttgtttggttgtttcagttttcctactgtagtggaagctccatgagccctgagaatttcgctgcttcattcactgctgtatttccagagcagagcagggtctgacacccagtaagtactcaggtaatgcctagcaaatgaatgatgcttcttacaagttacatgagcaccaattggacagcacatatttaaagacaacacatagataagaatgcartttaaatatgatcagatcactggggtttaaatgaacaaacacttttcttcagcaatcagcaatattcagtgagctgatastatacaggttttaaaagtactgcaaactacattctataagaaaacaaaaataaatagagctaccaaaagatctatgggacctgtaaagaaaatttaaaagtcacagataaccaccctcattcttggtttgcaagtagatgaaaattcaaattgctactgtattcaacaaacaaaaatatatgaaaagtataaaaatgtattttaatgaatcatttgaaacatcagccttaaaatatttactcatgttgtatcaggggctaaggcaggtcaaagttaaataaccctgctccagttcttctgcagtcccccatcttgaggggagatgtgaaaacagatcactatcttactcagtgatgagaccagtaatagcatatgctggtttccccaagaagggtactcaatctggcctgggaaagtcaggaaagacttttaggagactgtaagagctgagccaggtgcaagcagatgagcagttagaggctgagcagaggaggtggatatggaggcaatggaggcattcaagagaggccagcatggtacaggttcagagacaaaaagggaggcagcatggttggtaatctacatgcacagagatgtctgatgtataaagtacragacatcaagtgatgagaagaacaaagtgattatttaagaagccaaataatgatgctttacagtaatagcatgcaaaatttcttaccaaaaaggttttctgcaatactagtatattccatagaggattattcatttggtcgtggagctcattatttgtgcaaattgatctacattctaatattattggccagacaaaatattactggtaatattgcaactaaccaatacattttactttcactttcttccatttctgcaatagtacagtcatagtcaccatagtccatatttctttctcatgaaatgaaccatctactaaattgctgcttgagatttgaagctagtcccaattgttagtttattaaatgtaataagttagaataatgcagtgttgaaattatagcccacaccaacagaaaaagctagagattcccaaatagaattataaaaatcttaacttttgtattttttgacttgtggttttaatattaccaatctaatacactagcacttctcataatgcatttaaaatatataaataaaaatttatgtaaatgaagtctttttgtgcatatataaattacttaatcattacccaagcaactcttcaaaaataaaaattaataacaagtctacagtgattatttctatgaagatgatttctaaacactaaattacctccaatccaatgctataatttgttgatttttaaaaagtattgaatgatgtttagtaaaatgttatgcaacttactgcaaatggaaagcatttgaaagatgttttccattggaagggttaatgcttctcaagagattcatagtaatagatatgaatattgagaagataaaggtctccttaggataaccccacccaccttaattttacagtatgacaattaaaatcttggctgggtgcggtggctcacgtcgctaatcccagcactttgggaggctgaggcaggcagatcacctgaggtcaggagttcgagaccagcctgaccaacgtggagaaaccccgtctctactaaaaatacaaaattagctgggtgtggtggcgcatgcctgtaattccagctacttgggaggctgaggcaggagaatagcttgaacccaggtgatagaggttgcgatgagccgagattgcaccattgcactccagcctgggcaacaagagtgaaactccatctcaaaaaaaaaaaaaagaaaaaagaaaaaagaaaaatctttactccagtactgaaataggaacaaaatgtctacacatatttgcatatacatgtaaatacacacatacacatgcacgtactatatacatacaaaaatgagagttgtgggttggcacaaaatttttatgtcttttccttgtgatttttccaaacccaagttttgctatgttcaacagagttttaatttatgtgtgtttgattacacacacacatacacaatcatgcaatacacattagcttacataaaggtaacttgcttacataaagggacttccatgggaaatacaaaacatattttattctattgattttttttgtacttgaggaagtattagaattggtctgacattgaggaaagattacatctcaagatggtactttaatctgcatgtaagcgaagatattcagttaattgagaaaacaattttacagaattaatagacctctggtcaatatggccaaaactataaatacgggaagaaaaataaaataaaataaaataaaataaataaatgcatagccattctcaaaagtaagataggcaaatactaagtccccagaaatgaaagggaaactcaaatctagagcagtgagcaggagcccagtgaggaaacgtgaaggctgattcacatcaaaagaggttcagaatgtgtgtcctgcagagacgaacctgaaagcacagcacacgggtgccttcacaacccaggccgcgagggcctcccacagaaggcagattccaagtcacaccccaggagctcaagataatagatgagtgtgaaaaagaacctcaaatgagtgacttaaaaatacaatctaataaagatagtaagagaaaccataaagtgagaaaaatataagagtaggcagatctttttaagaaacaaatataaattccagaattgatattcactgaaagtaaatttgaaaaaatttcaacaaattatacagtagattaaactagtaaattattaagttggaagacagagttgaggaaatcacctacaacacacagtgaattaaaaagtgaatgaaacacggtgatttaaaaagatagaaaataagagaacggagatgcagagatgtgaaagctggaatgagaaagcccagctcgtatttaatcatgactccagaagtcttcagacttaaatcagactgaatcccaagcacgataaacctttaaaattcacaaataggtaaaaacataatttttttcaaagtgtttatttcaaagtacagagtagaacactgaagtcagtaatatcttattgatacttgggattgccacaatatgtagatacataggtatgtggattgactacctaaaggtcattttaaaggtaaaatttattatttcttaatatggcaattaaaaaaactgaaatacaagaaaaacaaaagtgtcagcaagctgcactccctgaaatagataaccatttatgaactggcaaaagttttatagagactctcaatttgaaaagtttgtctacagaaattatttgaaccagatcactgaagcagcaaatgtttaacacatactgcataaaggattaagaattatgatctatgcaagcggaagcaatctgtcttaagacttgatatatactctttgaaaggactttcggtttcttccttgaatagtgatctattctagtcaataagcttcttaagaccagaactcatattatgcaggttacagagctcagcaccatgtctttcccattataagtactcaattcctttatgaatagacaagtcactgtagcctgttaatgagatcacattacttctctgcaaaggaatatagtccattaatgcacaaaaatgaattggactcagtgtttttaaatagcatcttgacacgaatctctgacacagtatctcccaacataccacaaaattatctatgaagatacagaaaaagaggaaaatgcaayggcaaatctgtataataacaaatgtgcaggcagaaaataaaaggaatttctacagaaaatgagatcaatggaattgkattggaaaaccacaattcatagtcaacttatgttttgcaaccagaggcaccaatccaaaggtaggtagtcagctttttcatctctcccacactttctgatcccccttcctggcccggtcagaaacataaggtctagaataaaagggtgatggtgggggcgggagggactaggccaccagcctgctaccttgaagtagttgcctttcaagacaaagcactatccacttccattcacccttcctacatccattcacagtcaactcaagaaacaacaacaaatctctgtagggacagagatttctggtaccacattgcattctgtcctagaaagcagtgtgtcccacaagcaaaatgctataggtaaaggcaggcaaagacagagctgggtacctgtgccttttagggattataggtgtttgtgtactccagctatctcagtgtcagaagttacaaagtccccttttaggccaacagaataagaccaggtgaaacatgctcatgctagacactgggtattggccaggtgcagggcagtttacctaagcacagctaaaatttgaactggtggcagtaatggatagatccataccaacaaaaatagaaaacataagaaagctctggccaggcgcggtggttcaggcctgtaatcccagcactttgggaggcctaggcaggcggatcacgaggtcaggagatcgagaccatcttggctaacacggtgaaatcccatctctactaaaaaaatagaaaaaattagccgggtgtggtggcgggcgcctgtagtcccagctactcgggaggctgaggcaggagaatcgcttgaacccaggaggtggagcttgcagtgagccgagattgcaccactgcactccagcctgggcaacagagcaagactctgtctcaaaaaaaaaaaaagaagagaaaagaaagctctgccagaagttaaaacaaggataaagagataaaaatattgagggagataatgatagaaataatagaacagaatataaatgtataatctacatgtaatatttgttctaagaaagaaaacagaaaattgggacagagtaacaataagtaatattacaaaagaaaactttcctcagttgagaaagtttcaagtaagtagacaataagcttactgtactaatggaagaatacacaaaaggaaaagaaaaatacatggaagcaatttttaattacacaaaaatagtgcatttaccaaggctgttaaacaaaacaaacaaacaaacaatacattgacattaaaggaataaaatcaggctagtcttaatttttcagcatatatacatagcatcttgacacaaatctctgacacagtatctctccacataccacaaaattatctgtgaagatacagaaaaaggaaaatgtaacatgcaacggcaaatcagtataataacaaatgtgcaggcagaaaataaagggaatttctacagaaaatgagatcaatggaattggatatacataacataataacatatgttatatgttatacatatacatatatgttataatacatgttataatacatgtgttataatatacctaacataacatatgtcattaatagaatacaaagatgttatcttctaaagagatatgaagggaagcaattgtaatttaagaatgctaatttcaattaaattgtgttttatgtacatgaaagttgaaattttatattttcaagatattcaagaattcagaaatattcaaaccatatacctgttttttttaagtgcttaaaactatgaatgaacagagagagatcaatctaaataagaactcaaaatttgagaatttatggctacaaaggttgatgggttttcttttactcagattagaacccaatcttggaaattctgtaggagtatttgttgtaaagacagtctcttagagtaggggcagaggttggctttaaaatgattctgtcaactctgtccatttctatacttttcccaatagcaagaaatgtgcttcatacataatgaactttgtgaaaatagtagttactctgctcttcaaaaacatggtaatgacatgctcacaaaggcaagcctgcttacgtggttgggcaccataccatgagaattactacaggaaaagccatgtatgtgcatccctgctaacatggagctttgcatagaaacatgtttgggtatctcctttccaaaggtcttagtaatgaccgctgaaaacttaaacctgcacattaaaagatgattgtctttttcgttgtcattaaactggaaaaaactattagaattcctgtggcagtatgtccactatcaatctcctgtcttaattaggaccatgaatgttcctttgagttccttaaaaattatcatgtgaaacacagtttcgacaaaataaaaaacatacatacatgtagaaaaaagacaacaaaaacttcaatagactaaaagttgttatctgggaggatgatactttgactactcaaaggaaaacatcaaacaaagaatgattttcttgttgttgtttacaagcatactgccaatctgattccatttgtcatctgtcaaaggacttttgatctcaatagtgcttcagtaaagagaagagacgtgtgacgagtgataagacaggagcgaactgttcattaaattactaattggaatacaactggagattatccttgggtagatacagaaaattcatcaaagaccaatttgtgtctccaaacagaacattctgacaagcagtgacacatattttgtgtttaaaaattagagtattgatacttctacaacgtcaacatttaccactgagagggtgggcagtgacacatttcttcatgaggtgctaagtgacaatatgggtggcagcttagctttggcacccttaacactaccaagacctacttttcaaccctggtggtcgtctgacttaaaaagcaggagtgatttgtttttcttctagttgtcagtctactgagatctgaaacttacaacatttcttgtttcccttgggtccctggtaatgtgaattgtctttagccaatgccaaacaaatcactgtcacagagcagcagtcgacctttcttttcaatctatacactttccaggagttataaatcagttgactttcaagctcgatgagatggcgtatgccctagtttgaagaacagatggaggcttgggggaaaattgtttctgcaggcttgctacaagcagctctgctacataaaagtgaaccatttgcactaatttctcacataaattatataggcagcagggagcaccagcccattcagcagaaaatctttcatctggttttcagaggtcatctaaccaatttaaataaaagttatttctaatacatggctgtattttcatgctatacacttttaagatgtaacaatttacatcaaataaaagaatggcattaagaatagtacactcattgccagaggattttttttttcaaaacttctggaataagctctgtctattaattaatcacaaaggaaataattgtgggaacgtggcagatctcttgtacaaaaatcaggtaaattgtcacttctcttgtaaaatttgccttgcaaattctactaagtcctattatccaaactcaagctttggcagttatcaaaagaaatagaaacccaggacaattccaagagaacattcattctccttgatgtgaaacaaattattcagctcaaataaatttgcctacaagatttcaaaagtcaatatcagttttaccttaggggcaacagatatagcattatttttttaaaatccttaagaaattgaaacattaagaaattgaaggtaccaagggactaaattataactcaaaattacggaatcttgtgaatattctgatagcaaatggatcgagtatcacatcacagtgtgatttactttaaaatgcagtaatatttacagataatgagctatcctcagttgggctgattttaattgtaagaaaatgtgtgcatatttttataataattatatgcaataactgtttttcctactaggaaattatcagttatgtcaatgaaaacagtcacattgacagagatttttatagttcctgaataccaatgctgctgagaaataaaaagaactagaaaaaaaggagaaaatgccagagaagaaatactgaatggaattgtcagtcaacacataattaaaggtgttgtctgagacaccatcagtggaaattataaaggctgatttatgcatctaattaatttattcacagcatttcctttacttgggtgttcaagtgcaacatatattttcagtcctttagaaagggaagygaatttgtcattttgaaagcaaactttaagggatgagtagtcattggaaagcattcgtgtataacctaaagagcatcctcctggtaaaagttcaaccccctcaagaccgttgcatatcattctggaacctaaagtgctatggattcaaattaaatgtgctgctgctaatatttccattttgctaccagaagaattgatctctgtggcaaatttgtactcaatatttgttctttgaagtattccaccaacatatcaaaatacaattattttaataattatgaaacaaaacttatttgaatgctcataatttaaaagggccatagaaatcacctggtatattgttgtcacttacagataaggaaagtgaggcctacgaagcaagagaaataaaacttaaaaacaatcagctcctgtatgctttacttgcattcaacaaatatccctgggcacctgccctgtgacagtactgttctaggtaccaggaaagtgagtgaataaaccagaaatacagacaaagatctcgccttataggatttcaggatatgcctgtttttactaacattgttactggatccattttgggtccctatggttttcatttctctcatctcttatttttgctgactttatagtttttytgtaagacaatttaaatccgttttgaaataatgtggggtataaatatataaatgacatatgtatgtcaacatttatttataaaaagtattaaatgtgtatagttacctgattaataagtcattttttaatacaaaacaaagtctggagatctaaattttaatcaacaggtaaaattactatattaacctaaggggaaatttgcctccatggtgagatttcatattctctaatagggcagtgaggaagatacatttttggcagtgagtagaggccacctaagtccattctcacatatacctgctcatatgtatcagttctggttttattcatttcaatataggtggctatggaatatcatttacrtgtcaaagaagaaaaaacaagaacgcagaaaggcctctggcatgtctgctactctggacaaggaccatcatgacattgccgggtgtgggttgatcgggtgctgtgcgggcagtggggaaggattttggacaaaatacaagtccattttgagtttctccctttcaaatttgagaggtttgtgattttgttgcatgcatraaagggtggtattctatcctgattttcctagaggattacaggtttatctacgtcctattcaaatatctctgatacctgggacattcttacgcctggttattagaaatttagtggaaaacaagaccgtcttagtgcatgtcatattctgtcacgtagcacgttatcatggagaaagatgacctgtatcaatatctactacatcaaaatgcctagaaagtgaaagattttagagacacctttatgtaggtgtagctgtttccatcttcaaaataaatgaatggtttataatatgatatagttatttctaaaaattaacagtgcctcaggtatttatcttcatctctttctctcgaggtctctattgaagagaccgtttcaaaaccacttgtatgcttctcttcrctctttatttacacagcagaggtagagacaatgggccatgtattttaccaattcatatagcatttcttccctccccaggtgcccatatggaaaacctttacaaagagccccgtccccaccccgatcaccatcattagaagtgtgcgatttatattacagaaggacagaaaattaaaggatggcaatttaagatgagaaaactcaaacacaatttttaaaattccatcgttcatctgattatctgctttgtaacttatccagacagcttagctcttttctcacttgttgccaataatgtggatattgaagacagcaaaagaatcaacagtcgtatttcccaaatgttagaggggtcaaggaaaatgtagcaaaagaaacagattaacattttttttgtttaagtattccttatgcttttttayaactacaaccattgataatcaagaattctttagtgatatttagaaaatgcatatttaaaaattaaaaaaaaagctattcctgggcttgccggtagatttcatattcgagatgagatttattcaactttcatagctcatgaacttgccattgataagtatatagaaattttcactacaaacattttgcaaaacgtttctcacatttactaataaatttatgatatgcatagaaaaccatgacaaaaaatccacagatgagtcccgttttttcactttaataataaaaattctaacacagtgatagccttctatctatctgggtagcagattcaggcatttatttttgactgccattatcttaatctgtagctgcatggtctaatatggtaaccacgtggctatttaaattaaaattaattaaaattaaataaaattaaaaattgagttcctcagtctccgtaggcacatttcaagtgcttaatcaccacatatggccaattgtaccatattagacggtgcagatgtagaacatttccaccactgcagactgttggatcagacactgctgcaatcttcagagatgccacaagaaagagacgaagctgcagagacgatgacacgcagcctgccacgttgttttggcatctggaactaatgaccacttycatgtgcatgaaactggtactgagagcagggcgtgggctgagaaacctaagcatgcaaagacatctgtctgtctctaactcttgcttctactttctgatgttaccatagagtgcctttgttatttcaagaacacacaatggttcctaacctggtgaagatcaggtcagctaatccagaacaaatagaagaggagtctgaggacctggggagggatccccagaccagcacattcacagactggaatgaccgtgagaggctggggcagcctgtgccggggtttacagccagtgcatcctaagtccttcggagccacaggctctggaaacactgataaaagcaacagacctgcttctcacttagttatgtgcatcatttcaggtgctcacaagtccacttggagtctctagggtgtctgaggagagttgagagagggccggtatcctcggagggaagcactgctcctcagcagtcctcagtgagggatgagctatgacattgagaccagaggtttgcatgaccagaaaccggtgctctgcccacacacaagagaagagtgcagggtcttggcctcttgcttttagttttttgtgggggacggatcgccctgcttccttcaacactcaagagttcttccttaagaatggcatcctaaaacaagtccctcctcctacttagcaccagattgtcctttcatcaaatgtgccacgaaataaatatgaaactatggacagatggttcccaagcctatgtttaacaatcttaatgtcttggctgggygcggtggctcacgcctgtaatcccagcactttgggaagctgagacaggcggatcacgaggtcaggagatcgagaccatcctggctaacacagtgaaaccccgtctctactaaaaatacaaaaaattagccgggcgtggtggcgggagcctgtagtcccagctactcgggaggctgaggcaggagaatggcgtgaacccaggaggcggaggttgcagtgagccaagatcgtgtcactgcgctctagcctgggggacagagcgagactccgtctcaaaaaataaataaataaaataaaaaataatcttaatgtcttatcttcagtgttacagtaatgcaattaaaatgtagtagctactgtctaaaagaagtccacagcttccggaataagatgttttcctaaatttatgctattatactaccagtgacagcaaagaaattgtttcttctttttattactttttagcttgctgaatcagtactataatcaatagtagcttaagagaattaatatatccataaaaaagaaaagcattttatatccctgctgactgttggattatcaaagataaagaaaatgattcatctcatatttttattaataatttattttcaaaatgattttttctagtctctacacttctaaaggttgctcataaaattatttgaatcatagtaaatctatataatttattttcattaatacaatttatgtgtaggttataattacctaaaacaccaaaagccactccctttttataaagaattatgacatattattttactcaacaggaatcaggttttgaagaaactccattgtattatcttggagccagtacatatctatgagccagtacatagacaggcaaacacaaaatccatgcaaccaatcaaatatatgaatccaaaaatccaaacaaaactttggaaatatatgcttatattaagactaaagtatgaaagttagttatacacgctataaattttttctcatcatacgtacattttcacataacaagttcacattctaacagacactattataaaggagataataatgttactcacctctttcccacccccccaaaattttatagtaaggtttcctaataaggatactaccaagttcctcttgtaatataagttggaataattctaagttcaataactgatattggatgactgctcaagaattagaaatgtttgataacaatatgaaaatatttcaaaagacatactagatataatgcaataatcctttcaatgtgtctatacaggaaggaaaaatttaattttaatgcacctttttaagctatttactttgatttctctgatttgtacttttatttttaacataaatttatttgttactaattaaaaacaattcctgatttgcttttggtcacgactgctggacttcccagttaaatgtgtcaattgcttaatttaactaatagttggccaaaaccttttcttgtccttaacctgatgtgatactcataagtgtgcacaactgctttgctgtctgtaggcagagaagcccttttagttgataaatatcaccaaaagcaaagtctttgataacaacaataattaaatagcagaagctggttagagaccagcatttatttttctcagattaaatgtaaaagccttctccggttaagagattggcaagtttttacaaataacatcagtgagccttttacaaaggaacacaaccacattagaatggagtcattaggcaatacatttattttgaagccaattaaccttttgtcagaaaaatgtccgtgctgtaatggctttggcggtggaggtcagcctctaacagggcacgtgtgacagccatcgcgcttgctgacacaggcggggacggagaggagagccaggattgggatcggcctgcttttgtattctactctgcatttccagggagcagacaatcttgacctatccatttaggtaattaaagcttccatttggaagtgtcctgcaggaaggtgaaatctgggggagataaatggctgttgctctccgtatccagccaccagttccatcatttgatggactgcctgaaacaggccgggctgccaggttctcataaaaatagagatgaattgggcagcagacaaytctctaaggcaaagcaactctgtcattttcttctttgcaggctataatttaattgttagtcaaggtggatggctgacacaggggggctttctctaagagctttcccaccatcttccatgtgctgagaaatgactccagtttatttacttaagcagccaagtgtgtttggcattgggagatgtcacttcagcgggtgcagctggccggcacagctgtgccctgacttaccttccaggcgattttgtttcctttcgaatcatgctcaagggcaattgggaagtcacctcgctcatagaattttcgaaatgctgtgggcttggttggtctttctttaaatgcccctgcagctggagggcctctcaccttaattggaaaaaaaaaaatagggatcaggttttaagacatactaaaaaaattcataataaaagaactttctgtttttaaagatttcagtttgtataaatatgttggaagataaaaacacattatcaaataagggacaacagaaatctgttaatacaarcacctgggaaagaaaattattttataatcactattaaaagtctactttatttcaagctactttagaaagcattcctagaaaatgtctcttaaaatatcactttagagggaagagaaaactgatattatgtttgtgaaaaacattttaatagaggtgtcttasgcttagaatgttaaaacttttacaatttcaaatacttataaattctaatcttgggtctgatatactttatggaatactgaagtaatttaaaacatttcaatctttctatatatatggaaaatagtggaatatgttctcacattatgaatattaacaataaaactactaaaatgatataaaactaataataaattagtgtagaaagagaaaaaggtggcctactatgtgtgtgtacagcatacatttggtaacatgaattcacaagaaagtaacattagaataggtgagaaattagaactgatgagaaacttccatctccaaaactgaaattttcattgaagaagaaatattccctatagagttatttacaatgaatacatcttttaaatytgtatttacattggaactaattcattagattacaaaattgaaagtagtaagtaaactatttagaaaataaatgtactattctgttccttacatatagtctaaacacgattatttttccctgcttactgaaaaaaggtaaatactagtcattttatatattagcttaataaattcattattactttgctaatactaactatagacaaaataatataacctaatatttttagttattttatatgttaatttgtaatatttttgttaaaaactccaattttaatgaatatattaacatatctaaataacatacaataaataaacatacaatacacatattagatatgaaaaatacattgtatctaatacatatataaaaggattatatttgaaattaagtgtggtattaagaaataccttattacaatgattaaatgctgaagtggagttgaagagtgaggtaacacacatttattagagtttagaatttactccactacatagcacattactcccagtatatgattatatgagtaattgaggcagcattgggtattaccagtaggaaggaagatttccttttacttattgaagattaggaatttgttctggaattagaattaatagccaccattttcagtcaaattcattcaattatcaaataaccacatgtatttaacaactattttgttcagctctttaagctggaggctacataaaaagaacagttttagctatattactatcatggaaactgtagaactgtgattcctggacttctgaaattcatggaggagtaaatcttgaatcacattttttggaaatgataaatgattgacaaatttttatgttgccaaaaagttatttttttttagaaaaggtagatggtaacatctaccaatatggcaccattttaacaccctcaaaaaagtgatataatacaatctaaagaaagaaaatttgaccaagttaaatgagcataaatgtgtgaacaaatatttatagtaaattatgtgcaatagtgccagtgtatagtgcaaatatgtatgtgcatgtgtgtgtgtattgttattgtagaacactgattactggtcagcaaaagcctcatttattttattttatttttcttgtttaactttttgttaagataatcatagatccatatgcagttgtaagaaataacacacagagaacacacatagcctttakttgctttcccgaatgggaatatcctacaaactgtgatactatatcacaataggttattgacattgatacagacaagaacatttctaccaccacaaagttccctcaatttgcccttatacagccacactctttcttccccttaaccttcgtcccctagcaacaactatgtcctcttcatttctataattttgttatttcaagaatcatacaacatgtaaccctttggaattggcctttttcactccacataaatctctgtagaatcayataagttgttstgtgtacagattgagtatcaaaatctgaaaagctccaaaatctgaaactttttgagcgctgacatggttgttcacaggaaatgcttattggagctgaaaaaatcaaaaatccaaaacactttgaatcccaagcatttcagataaggggttgtcaacctatatcaacagttcattgctgtttaatggtgaatggtattccatggcatggatacatcagtttgtctacccatccacctttaaaggtcatatggattacttcctgggtttggctattatgaataaagttgcaaaattttttgtagatgctctttaacaagttgatgacctttccccctctattcttatttttctgatagtttttcattataactaaatgttcaattttttcaatttttttctgcgtcagtcaatatgcttctgtgatttttattctgtcaccttttgatatggagttttctattacaaatgtaatagcctttaaagttatagagctactcaaagaatctgcttcctattggatgacttgcagtaacatgtattttctgaggaattggcccgttttatttaagtagttaaacttacaagtgtagaattgcttgtgttttttctgtattatccttctgatgtctggagggtctctcaagatatccrttcttcatttctgatatttggtaatttgtgtcttcggtttctcctttgtctgtcttactagaagttggccaattttattgatttcttctgcatttccaaaactacattttaactggatgtaggatttaaggttcatggttctatcttttagcacttgaaaaatagtgtgccacttccatctacccttcaaggctttggatgataaatccactctcattcacattgctttcccttatttataaggtgccacttttttttagttatgccacgatttttctctgtctttaattttcagaagtttaattacgatgtgcctttgcatgcatttctttgctttttatcctgtttgaagtttgttcaactttgtgaatctgtaggttcatgtctcttgccaaatttagaaagttttcagtcattatttctttgagtacttctttggcctggcttctttttcctttccttgtagactccaatgacattaatgttagatcttttgttacagtgccacagatccctgaaactttttctttttccagcctgttttctctgtcgttcatattgggtaacttctactgctctatcttcaagtttgtggattcttccttctgcctactgcattctgctgttgagcccaaatatgcttttatttaatttgagttgtattttcagttctacaatttctatttggttcatctttatatcgtctatttcttttctgagactttccactctttcattgtctcaagggtgtcataatattcataaaagcatttttggaagtaactaatttaaaattcttccctagacatttctaacatttctgttatcttgttgttggcacctgttgattatatttttacattcactctgagatcttcctgattcttggtgtcattactgattttcttgtgaaaccwrtatgtttgatacattatattatgagatcttaaagcttccgttttagcttgcttattctgacatttctctggcaaaggttgggggaagggtgctaccttattactgccaagttggggtagaggtctcattactctacttggcgtctgctgaccccagaggagagaatgcttcattaatactgggtgaccccagaggagggagtgccttattaatactgggtggggatggagattccagaacccactaggcctccactgatgccctcctggctggaaggggcaggagtgactcattactgctcccccattgtccacactgacatcataaacrgtgtggcctcattaccctgggcagtggtgaaattcctgactctctaggcagtcctctgacttaactccaatgggaaggagacaactctttcgtcactaagtggggaacaagcccaagctcctcgtgaggtctccactggcactgcagatgttggggcctctttactattctagtgaagaggaaagtcccaaagccccatttaagaaactcaactacaaccattatttagatattttgtttgctaatcatccactaaccaccctttctgagtttttctagaagtcacatagttatttttactgttgataataagcctcccacttactgagttggtctaaaatttgttgagatcatccatctttcccccttttgtctttgcacttctcaaaaaatcaatttctcttttctttttgtctcttatactgaatatactccaatctttctgattctcagctcaaaattcttaatgttcaaacttttgactgaatagacacatttctaacaaagcttagaaggctattcataaatcgatatagataacttatacttcttcctttcaataaattttcatgtaccctacagaaatgattccatgcctgcacttccatggaaagcctttatttagaagagaactttacaaaataatccatggtgatatgtaatcacttgacagtgagaaattctcttcttaagtctctggtatcctctgtctttatatttctgctatttacttatttttaaacactttatactttttgggatctgctatagatccattctaaactaactcttggcatctcaaaagccggaacttgtaacagaagcaagaatgttctcaattagctgtctcggtgcatcagtggcactgaattttatgcagatgctttgtcactactgctgaaataatatttttttctgttccaggtacatatgacatgtgtawccacctaagctttatagaaggacataccatttttatattctatacataatttattccatataatcctaaacatctgtacataaaaaaaatcaagcgaaatataattaattctgggatggtaataaagaacttattattggaaaccatgcagatggttgtagcttgtctaaacaacttttaaaacaagcaaaacgactctgaaaatccttaggtaagttccatatttgtagaagagaaaatattataaattttatttcatgttttaagaattttacctcaatttattataaataatataaagcaaacaagagaccataaatcaaacgagatttgtgggaaaatgcaattagggtttgcctgaatggtaggggcaatctgtaaaccaattgggaagaatggatgttacagcagaatgcttttaataaaatccaatgcacttgggaaccaagatattgaatgcagtttgaaataactacagatgacagaatactttatatgcctacatttacggaatgtggcataatggatttaggacttagatcacagtgtccatcatatggtcacaaaactaataataataaggaaggaatgtaaggctcttgaagtcttcatcatatagtttgaaaatttccttttcactatttttattatttagcataaactgaagctgtttaaaaaagacttttatatcaagcaggaaatttgcattgtgttattctaattggcccatttagccaacccactagaacactgaaacaataggatgcaaagatattgattacttgttttcatcaggttcaatctgaaattctgattcatgaaaacgccattgttataaacgggtgggcaagacctgttgacttgagttctgtcaggactggactgttagtctcaggaatggtaaatcggttaccttcagcgtaggctcctgagtgagaagttctgtaattcagtatctgcctcatttgccaactgtaattgcttcactacatcagaaattttacaatactcaaggtcaccaaatgaccaggacaatgcttacaaaattattacaataagaaaattgtattgtaatagaagataggtgtctcaatgatagcaaaaatgagctcataataccaagtaaaatgattataataagttataacaatataacaatttaagaatttaacaatatattatgatcatgatagtcagaaaagatatgagtcttatttgttacggatacgtagagacattcattttattgcactttggtttattgtgcttcacagatattgtgtttatttagtaaattgaaggtctgtggcaacctagcattgtgtaagactatcagtgccatttttccaacagcatcggctcacttcatgtctctgcatcatgttttggtaatcctggyactatttcaatttttcatcattattatatctgttatggtgacctgtgatcagtaatcttcaatgttactattgtgattttgggggagtaccacaaacaactctcatataaggcaacaaatttaatccataaatgtttgtgttctaactgctccaccaattggccattcccctatctctctcccttcctcaggcctccctatttcccgagacagaacaatattgaaatgagtccaattaataactctacatggctcctaagtgttcgaatgaagggaagagtcacacatctcttcctctgaatcaaaagctagaaataattaagctcastgaagaaggcatattggacaccaggacaggctggaagacctcttgtaccaaatagttagccaagttgtgaatgcaaaggaaaagttcttgaaggaaataaaaagtgctatcccagtgaacacatgaataatgagaaagtgaaacaggcttattgctgatacggaaaaagtttgagtggtctggatagaagatcaaaccagccacaacattctctcaagccaaagcctaatccagaggaaggccctaactgtcttcaattctgtgaaggctgagagaggtgaggaagcttcagaagaaaagtgtgaagctagtagaggttgatttgtgagatgtatggaaagaaaccatctccataaattaaagtgcaaggtgaggcagcaagtgctgatggagaagctgcagcaaattttccagaagatctacctaagataaatgatgaaagtggctacagtaaacaacagatttttaatgtagaataaacagccttctattggaagaggacactgggctgctaaagctactgaggataattcaatgcttggctttgaagtttcaaaagacaggctgactctcttgttaggggctaacgcagctggtgactctaagttgaagccagtggtcactgagcacttaaaaagttctagagcccttaataatgaggcaaaatctatgcttcctgtactctgtaaatggaacaacaaagcctggatgacaacacatctgtatatagcatggtttattgaatattttcagcccactgttgagatctactgctcagaaaaaaagatttctttcaaagtattctcctcattgacaaagctcttggtatccctagagctctgatggagatgtacaaggagatgaatgttgttttcatccctgcttacacaacacccattctgcagcccatgcatcaaggggtaattttgactttcagctttttttttttttttacttaagaaatacattttaggccaggtgtggtggctcacacctgtaatcccagcactttggaagcctgaggtgggggtggatcacctgaggtcaggagttcaagaccagcctgaccaacatggtgaaaccctggctctactaaaaatacaaaattagctgggcgtggtggtgcatgcctgtgatcccagatacttgggagactgaggcaggagaatcgcttraacccgggaggcagaggttgcagtaagctgagattgtgctattgcactccagcctgggcaacaagagtgaaactcgatctaaaaaaaaaaaaaggaaagaaagaaatacatttttgtaaggctctagctgccatagatggtgattcctctgatgtatctgggcaatgtaaatttaaatattctgcaaaagattcaggatttaccattctaaatgccattaagaacctttctgattcataggaagaggtcaaaatatcaacattaaaaggaaggatgattccaatcctcatgaataactttgaagggttcaagactgcagtggagtaactggagatgtagcagaaatagcaaaaagtctagaattagaagtgaagatgtgaccaaattgctgcaacctcataaaaaactttaatgaggagctgcttcttatggatgagcaaagaaagtagtttcttgaggcagaatctactcctggtgaagatactttgaacattatcaaaatgataaaaaaggacaatgacagcaaacataaacttaattgataaagcatgggcacaatttgagaagattgactccaattttgaaagaagttttactgtgcatcaaatggtattaaacagcatcacatgctacagagaaatctttcatgaaaagaaaaatcaatcaatgcagcaaatttcattgttgtcttattttaagaaatcatcacagccacaccagctttcagcaaccaccacaytgatcagtcagcagccatcagcctcaaagcaagaccctccaccagcaaaaagactaagactcactgaaggctcagatgattgttagcatattttagcagtatttttaattatggtaggctcattgtttttagacataatgctattgtaccttattagactataatatagtataaatataatttatatgcactgggaaacaaaaaaaccacgtgactctctgaactgagatatttgcttcattgcagtggtctgaaactgaatctgtgatatctccaaggtcgccctttatatatagtcatgtgttgcagaacaatgtttcagtaaacaacggaccacatataccattgtagtcccagaagattataacaccatatttttaccataccttttctatctttagatatgtttaagatacacaagtacttaccatcttcttacatttacctacagcattcaatacagtaacatcttgtacaggtctgaagcccaggagcaataggctacaacacatagtctaggtgtgtagtaggcaataccatctaagtttgtgtaagtacactgtatgatgttcatgcaatgatgaaattgcctaacaacgcatgaatggatccccacatttaagsaatacatgactgtatttcaataaatattcaatatattggtaagcatcctatagagtctttaaaaataaggcactataggcaacaatggctggcagggaaaacttcaagtgatttgagccatcaacttcccgaagggttttcagtcaaggtctaacagaatggcctgaggtcaggagaatatagagtcaaggtgaatggtctgcatttcaatgcagtggtccaagcatgggatggcaaaagccttaaattaaggtggcatcaagaataagaacaaaacccctcatactgtgttcattgctttatgaacattactggtatcaatttgcaacaaaaccgtatgaaaattatttcacagacaaggaaattgaagagagaaaataaccggctggaaatcaccatgtcagcacacagtcagaaaaagactttaacccccaatctctttgtctctacaggacatgtccctcagtcactgtcctagattattaaattcaagcaaaaatctaaaggattattcggggcacctgaccgattggatgaggagagctacaggcagagatggaatttagatttcaagactacaaagttacaaattgtctatttgtttaaatcatataaataataagaaactgtagaaagcttgcaagaaaatcttattaaatcacttgtaatcctaccacctattaataactttgtgcttttccctttaaacttttcaaaaacatagcactgcagataccatatttttacatttttatgtcctttccatttagtgtacttttaaacttagtttaatatgtttcgatgttgccatttctatcaaaattttgtatttaatagctaagtaatattccacctactatttgccattatatttggaatttatattatttcaattttttgcctattgtaattacattgtataaatattccaggcatatgatgttttatattatttccttcagacagagtctccaaagtgagataatgaggtaaattttttgtatattttatgatcttgataatattattttctaattaaaaaatagatgagtcttcctgttcaatttagattactacatttaacaaaggaggatgagcattttctcattttgtataaatacaatatgcatgcattgtgaatgcgtgttcatgtcttttcctcattaatgttaatttgtatgagatctttatactggaatatattaaatactggttgtattgactgaaaatatcttatcatctttgtttcccattttatttatttagcatttaaaagttttaaattttgtgtaagaaagtctctgtcttttctttatttgctctttttgcctccagctttgctttttctagttgattcctctgtgtgctgcacaatgaatattctaatagactaattaaatcatatctctcatctacttaaaatccatcaatgatttcccattgacacactacacaaagacatttgcaagctgactgtcagtctctcaggttgttcctgcacaggcccttcaagcattagtcacaccaaaatgctggcagtctcaaatatatcctgctcctccttggtctccatgattttccatcagcctgtaattctccctcgtgccctcactcttttcttttctccttccttttctcctgaataaccattaatcaccttcaagactcagcacaaacctttcctaacaaaccacatccctactgtgaagtggggtttgatccttcttcacattaagcttgcaatacctgtggggtaaacaacttggggggtcactgaacaactggacatctgaagagtccttattagagaggtctaagctgttggttatgtttggctgtgaccaagtggtaggttcaatctatggaaacgggcaacttttcccaaagagagagtgtatagtgagaaaaaggctgaggccccaagacagtacctgaatatttaacaacaagaggattctataggagaatagaaagaatagtcagaatagtagcaagaaaatggaaaagggatgataccataaaattcaacaagtgagagagaccattttttttgtttttgttttttaataataaagggagatcattaagaggaggactgaaagtatccatctgaaaatctaaaagcagtagtgacatgatgaggtggaagccagactgtagtgcactgaggaatgggtgagaaatatgaagaaggatctgtattctataggagcctttctaccctgtgggatgtcaagatctgagatgttagcaaggtgtgattgctgaaggaggtcaaaaccaatggtaactggaaataggaaaagagaggtaaattaatggactattacactggaattcataaattatataaccacttatggaaccgcagtggattttagaaaacaagctatatgtataaccaatgcacttacataaaatggccagagaaacatgtaaagtgcagagtaagtttttcaatgttaggagctcataaatatgaatttggggatctatggtcacataaactaaattatttactagaaacagagttaagaaaatagctctaaattagacttttacctatatcatttattcattaaaaatatattgactacttaattttcacaagttactaggtttagtacgagcggggaaaaatacaactcaaatacattagctccaagatatatattattaggagaagagataaaaataccacccacaatctgcacttgaaataagaatatgagaaatgtcacaaaaaayatatagaattctgcaaactcagaagataaacctcttcgatctgaaggcattgttccttttcattagaaaatgttacttagcctttacagagtacctacaggtttcagtggatccagacaaaaacgtattataatttcctatgaacctgaattctgtacaattttaattagaaataattattagaaaattatgtttgctattccctgtatttgtccatttacaacttttgtagttaacagttaaatcagaattaatttgtctgaattttctataaattttataaatttaagtagttattaattattactacaatcttataaccaaaaattcactattgatgagatcaatacactttctaggtgaaatctcttgcaataaaattcatatttcctgttttgaaattcatttgtccaaatgaaaaatctggttgaaaatctaaggtttctgttagacttaaaggaaataatctaaattagtctaaagtacttgcagagactagtttaaatatgatgaacataaataaaaaccaaaattaacatgtgcatattataataaattacatttaaattaccattgccttttgatgatcacagaaaaacaaataacttatgatgcatttttttttctaatcggtgctatgagaaagatgcaatgctatcagtataagatagtaatatgtagaaaattagccaggcatggtggcyyacgcctataatcccagcattttgggaggccaaggggggcggatcacctgaggtcaggagtttgagaccagcctggccaacatggtgaaaccccatgtctactaaaaatacaaaaattagccgggcatggtggtacacacatgtaatcccagctactygggaggctgaggcaggagaattgcttgaactcaggaagtggagttgcagtgaggcaagatatcccccagcctgggcaacagagcgagactctgcctcaaaaaaaaagaaaattgacaaatatttcagctaaaagatttagcacagtttggtactacagctggtttttcagcttgaccacacattgtaagcggccttgtttccagaaagatttaaggaggtccacgaagacgcaggcagttcagaagacggctcagcgcacgtggaggaactgccaggtgtggggattggacccttgcagcctcagcctcctgtaaaatgttcctggctgacctctacgattccttctacacctttctaacttaacatgttgagtgagcatcctacggagtctttaaaaataaggcactacaggcaacaagggctggcagggaaaacttcaatgtattaattcaacacatactgaggacatacartattatcagagcattcacacacttttggagctaagaggaactgcaaagaacacatcaactccttgttttcctcttggtgaactgaaattcaaacaggctatggaaacatatcccagtcgacatttcaaagcatattttcttcagctctattacttaacatctatctccatttcatagataccagattctttcaggtccacttgattttaaaaatgcttctgtaataactgtatgacataaggargtcccaaagattgctaagtaaattgtgagtatgtcattcaaaatttatagataaactgtggcacatttggaagcaatatttcatttcaaaaatgtctctatagtctacaattgtcctgaaagcaatggttaaacaacaaaatttgttttaaattatttttgtttaaaataataggcagcagtgatctttaaaattctccattgtaggagaaaaagaaaaggttaatagcctttcttaacaaaatgagatgcaacaatcaaatgattaaaaaaattcttgacagttaaaggctaaaaagtttacttaaaagctgccttcttcttgcagttaaatatagaaaaaggccacatatttaagtgcccaagtgcagttcttgccttcaacttgtctccgagagtcatcagagacttcaatttagactatgctatttagcatctgtcttgtagaactgataaaaggcctgaatgactgagacagcttagctaatacactgtcacacctaactctaaggccaaaggaatgagtgagccaaatgtgaaaggagaatataaatgggcaagagtgtaaaatatattctactctcctaatacctttaatgttgaaaggtggtaaacagtttatatctaaacatatatcttctgtgtcttgcaagagttatttcttactgaataattagagtaaaaaatgttatttttgtatctattaagagactattaccattcacatcttacatatcatgaatattttaatagaaaatttgaaaatccttgtgtctaatgatgcaaactgaaattctccagaagaaaaaactatagctatttaatagaaaacaattcttagaactgtctacaataaaagatatttatagtagtaagaaaaaaaaaagggtcccactttcccatcattgcactggctccctctaaaataaaatacttagaaagttaacacaatttacagagctatgaaatactctgattatgatttagaaactccaataataaagaaagcaagaaatgtacgaaatatatatcacacacataaagcacacttactacaatttaactggaagataatttaataagaaacactagattggagtcctatcaacctaggtttttcccaccacagtttccaccacagtctattcgaccatgaaagaaatattaagaatataaaaggagaaaagatgaacatgtacctaaacagcatgttgtctgccctaaataaagatagtaatgcatctttcactattcagatgcaaagtatttttattttcatttacattttattattttttagtaaatatgcatttttttccctgagccaaaatcttcatttgtgaaagctggctgaagtttggtcagcttgtttccaaaataaagccaactaatccacatgcagattgaactcctgaccactctccatcaacaagtctgacttggccatttatctacccagtamcagccagacactcgcaattcaccaatccagaagctttgttaatagctttctttacattcagaagttattcttttttgcatagcrttatttactttgatgcatgcatacgattacatgatttgaatagaattggtaagcagaatttgaaatatgttagatactaaaattttatataggcattccatatacttgtatragtaattcacacaacacacacacacaatctgactcagtgaggggtttcctaatacatctttcctttgaaatatgttactgtatttttgatttttaaatatacgatgacatatgagtaaccacagacaagaagctttcactttcaaaaggaaatagaggaggtgttgagcaaatgccccacttcacagcctcctttagtgccttggtacctaacaagtactaaatctcaaaagttaatataatttctagtgtgaacatttctcctttcttcttcttattttggaaatcatatgaatgaaataagatgaataaaaataaaaaggaaccataagcctcacttgctgtaaaattaggagaaaaactgaccaccaaaagcagctaacataaggcacaagctatgtgggaggaaggagagagaggaaatatggtgagtgatggagatcattgagggattctagaaaacaccagaaaaaaatgtatttctggtgagggagaactcatgagggacaacatttgtttcttgtttgcaaaaatgagtataaataaggctcccagtaaaagtcccttcacatccatttgtggatcaaagaggcagaagagggacccacaaacacaaataaatacataaacaaatgacacttgcaaccatcattctttccgacagaatagagagggaaaaggttggatcaagaagcctagacccagaagcccactttaaataagcatttaggaaaaatcaattcaattcagcagtaagtattaaagtgggacctagcacaatatcaaagttactataagaaaaacaatatttaaaagagcagcaaaacttactaattgatgaaaaataccatacagagttaaacactatgaccaaatagcttgccaggaatttttaaaacttggtgaatccctcacttacatgaaaggagaccaagaattatgacagggaagaaatggtgatgtaataggagaagatgaagcataaggcaccagaattcggaaagcaagtagaaataagaaactcaatatataaaaatgaaactggaagaagtaaaagggaaaaatagcattgcaaaaatacaaagaggagagaaaggacagaaatgagaaaaatgaataatgtgaaagagacgtaaagtctggcaagggagtgctaccttatcataattgaagtcccccccaaaaaaattcaaaacaatgagaaaaaaacaaatatttttaaatgtggttataaaaatgttttgaaatacaagagctacttatttattgctgaagaaattattacctgtgggccaggaaaaattaaagcaaacattgcccaatgacatatattagtgaacttatcaaaaatttatttaaaagtcttttgtgtagttatttaaaactatcaagtcacttgtaagagtcaggttgacttcgtgtttccagttcaatgtctcatcccagaagacaatagataagcacctgcaagattcataagaaaaggtttgccaaggtatatatttccaggaaaagtgccctttaggtataaaatctacagataaataggtttttttctgttgttgttgttttttttgtttggtttggtttttgagatggagtcttgctctgtcacccagtgcagtggaatgatctcggctcactgtaacctctgcctcttagggttcaagtgatcctcctgcctcagcctccccagtagctgggattacaggcatgtgccacacctggttaatttttgtatttttagtagagacggggggtcgccatgttggccagkctggtctcgaactcctgacctcagttgatctgcctgccttggcttcccaaagtgctgggattacaggcgtgagccactgtgcccagccagataaatagtttttgaaattcaaaagttcaaagataattgttgctatgaaccactcttgaggaaactctttggagacaagcttgagactctcaggaaaggactggggcaatgtctttgaaaggactgtgtcaagcattcacataaataactacacaactcatcatttagcattggcttcaggatgatagtacagaatgtcaataacacatatcatatgcagatgacacaactaacacaaatcgagagagagatgagaaaaacatgtgaggtatcctttttttttttgcttcatctattatcattgggaggcaaaggacaggatttagagcatggaactatatttaaccagacaaaggtaagcactatgaaatatgatattattgactaaaatcaggtggtactgtagaaagggaagaagagaaagtatattaattatgttcattagtcatattagggaattaatagctatcataaaaaataagggctataggtgatataccgttataaagataaccataaaaacaaaataaacagtgtacatactctttcaaatacacatgaacaaagaaaactgagcacacagagaaagataaaaatagaaaacattacaaaataatttcacagaacctggaccaacatctcagctattaataaatataaaaagactaaataaactttcagttttgatcataaagaaaaacacgtctgtgctaaaaacaaagtgacccagagagattgaaaatgaagaaataaagaaaaatctaccaagaaagtcaaatgtaaagctccaatctcagaaccatgcgggaaaatacaacacacttctactaaaggcaagaagaagatatggatgtcctctattgctgtactatttaacattttaaaaatattcttattggaggcactagccagtacaattaggtaagagaaaaaaaatgaggttaaaacattggggaatgatgagataaaacagtaagtctttgaagattacatgatcatttactcagagaaaaccacctgaaaattggtaagtaacatagaaacttagtaaggtactagcatgcaaaattaacatgcaaaaatctatagttttcatatacaaaagtgctgatcaattaggagatattgataagagactcaattatagtaacaaaaaataaagtacatgggaaaaatgtaataaatgtacaagatctatttgaagaagttttgaaatatgatttaaagtataaacaagacttaaaaattagaaaacacaytattttgtgatagaaggattgcacatcattacacatcacaaaatggttaattttgcaaaattaatttataaacrtaatactatcgcaataaaaatrcaactaggtttttctttttagaaattgagaagatgattctgtagtttacactgaattattttaaaaaattagtcaggaaatctccaaaaaaaaaatcagtgtgtacaggtataacataaggtcactggagcagggatctagttatagttcaaataattttgcatattcaataaatcacaaagttagacctcaaatcagtggggaaacatggacgattcattaactggtgttgggacatctggttagccatccaggtagaataaaattggatcaatgtctttcaatttacaacagaattagttccaacaggcgcatatagtcaatgaaaagaaaaaagaaagaataagtgtcctaaaaagagtcatacagcggccagcacagccttacctactctgccccccacccctcttctctgatctcctcatctattttcaccacagtttactctgcactaaccacactggcttcccttgaacatatcaggcaaattcccagtggagggaacttgctctaggtgttgtgtctgcctggagtgttcttccagatgtctgtttcattacctcatctcttttaagtgtctcggtctccctttcttaatgcgacctaccacaaccaccccatttaaaataacggtctccccaccaagaactccaaacccccttatccagatctttttttccacaatattcatagtattcattcactttctcttttttccatagtattcattcctttctaatgtaccatagaatgcatctgtaatgcttattgtttattaccttcctacctgagctgaattataagctccatgaggaatcattgtttgttttgttccttgttagattaatagtacatggtacagaacaggtgttcaataaatatttcttgagtgattgcataaacttgatcatatgggaaaggtgacattgctgatgaatggggaaggtagttttcgatatatggtgcgggacaactgcatattcatgcaaaaagaaaaactgtatctctgtctcacaccatatatgaaattcaattctgtgtgattaaaagaaatattggaggccaaaccatatgaaaattaacaaaaatgcagaaaaaaatctttattattttgggatagacaacgatttcttaagaaagatagctaaaaggacacaccataaagtataaaaattgataaatttgtccacattaacaatgattgctcatcaagagatgccatttaaaaaattaaaaggtaagccataaactccaaatagatatatacaagcataatcaataaaaattagtattcaaaacatattagtactccaacagatcaacaagaaaaagaaacacaaccccacagaaaagcaggaaatatatagtaacaacagaagagtataactgaatagccaataaaacaaattaaaaatgctcaatttcattaataatcacaggggtgcaaatagaacactaataaaacatctttatgttactagatgacaaaaaaattctggtactgtgaagtgttggtgaggatatggagggatgggaagtctcattcctgctagtttgagtgtaaatggatacactttggaaaccatttaccattgcctagtaaagctgcatatataaaaatgcatactttttaaatttaacttttattttaagttcaagggtayatgtgcaggtttgttacataggtaaacttgtgtcatgggagtctgttgtatagattctttcatcacccaggtattaagcccagtatccattagttatttttcctgatcctttccctcctcagagtcagaacacaagaattgttaagagtgtgctggagttggggaatgacccttctctgcgtaatcagacatgtaaaataaatttctaggaagaagtcttgtatttggacctgtaagatttgctaaagagtccaaattgtacatttttgactaattattaaattccatagcctgacacattgscacccaaatgatggttcaattaatatttgtcaaacagctttatactaatgatgcctgctaaatgcagatgcacatgtcaattcctttcttccttcttcttgtccagatagatggtgaaaggatgcctagaacaatgggcaccatgttccaaccatgaagcaacaagacaatattccaaggatgctacagcagaaagatgcaaaagatatgggtccctgaagaaatcaaggagctgtttcctccagatactttgttatatgagatcattcaatgtttttactctttacttctgaaaaataaaaataaaataaaaatgtacatattctgtggccaagcgattgcattcctaggcatgttccctagagaatcccttatccatgattattgtctttctcaataagaaactatacttatgtttatgagaatgttcatggcagcagtatttgtaaaagacaacaaaaaagaacaacaacacaacaatcytgaataagtagaatgagtgaatactcacagcattttttgaaaatggactgtaaaatggtggtgaaatgaataaactacaaatttaccagtggaaaagtgtcttaagggakctctcgtgccaggaggaaaatcacctgcccttggactgccctccctctattgcaggactcaaggtccagctgagccccagccyactgttcctcctatactcatggccaaccaatacctcagcactctccagaccaaactcaccatgccctttagtcccaataaagtgtaaacactaggtcacctctcattttgcattctggctcctgaatggctctacacatctccttttctgaaatcatctctgccacctcatcaactgctaaaaccattgcactgtgcccctgctgctcacagtcggtcatcaggaaaacctcttttgcatacccttccctgtctcagattgcctttttcacctcttcttgctctaacagaagcctgacttttccctaaggatgctgtctccccagcagtgttggttgttttctctctaaaatccattttataacactgggactagagacgaagtgtctgcctcctctttcagactgttctatcccatttcagggcctgtgtagatagttggaccagtgcttcagcctctctagttccttggcctgttctatcacggtcttgacctgcatcctggccagccaggtttctgacaaataattgcagccactccaaaattccagacttcatatatcccactctaagrctaccatttcttatctttctagctcaatccctctgcaaccctaaccctgaaactttcgctataaaatcctgaaaatccaattatttcccttctcttccctgccccttactcctatttctgccctcctgcctgacccagtttaaagtcatggtcagtcggtacaatctctcccttgcactcaccctgaactcccttaacccacccttagtttgctgtgctttgcagatgctgcctagatcaagctctctgtcaaccgtatgctgaggcctcagcagcccaatgtagctggtgcagaacaagcgatttcaccacacttctctactccattcaattggccatgcacacagatggctattttatatatttcattytctcctcaaacctccaacacctcttctccagcctcattcacagctaatgttcttgctcctagtcattgaatagaaataacataaaggggacttcggaaggctgctaccaccacatctacacacccgtcagcatgtgaaacatcacacaggagcctcctgcaggagaggatgtacgcttgcttctgtgtcctgctgggattgacccccaggtgtcattagaacttgtcccttctaaagcgttccatgactgccctgtttaaaactacacattaccttctgcattccccatcctccttctagaatgcagtaagtactgaatggtgaaattcaaattgatgggatgctatatattttaaataatctagatatgaagcaaaagcgcccacgtggagctagtacaaatggaaagggaagactaagacaagtgacattcattaattcattacacacatatttaccgagcacttgctgttctaagttccaggcatttaggagtgaacaaggcaaataggaatcctactctcctgcagttttcactttagaaggatcaggcaatctataaatacattgtttgaaataacaagaaaatagcagataaaagaagccattgttctgacatattttaaaattacctatggggtagagaaggaaaggagaatcaaaggtgayactaagattttgaacctggaacccaatctacagaaaaaggaaagttagcgcaaagcaaaaaaaaaaaaaacaaacaaacaaactaggagtcagagtggggaaaagagagcaaatgtacccacaaaaacccccattttcagcttggcttccaatccttgcaagcacatatacaatctaagttaagtatctatgtaatagggaggctgcttctctctctatatgtcacactcactttaagacataccttgagttgtgtgaaactataagcatcacatacataaattgaaagcaacatcctaattctacctaactacagtacattctaggagacacaactggctagaaatatcttttgttcatttacaataataaaaaattctacctctttaaatacatatgtttctcctttagaaaaatctgctaaacaaagcacaataatacagggttgaagtttcctaagcaataaatcttgtccctttattggagctatctggtcaaatgtaactcaatattttagaagtggcaagtaagttaaaagacttattcagttatcttccggctttaggttgtcctttgatacatagcgggatcaacgcagatctagataagaccagtcttagagacrttttaatgttaaagcactcttcttccaaaaagaaatttatatcttcagcctacttaggattatataataaattttgtgcagagggaaaatcaggtttacaagggattgggaaaagggatatatacagtaagatgtgtaaagggcagtacgggtgattaatgacctagaaatattgatttatgaggtaagattaaaagaattaactatgtatggaatggctaagcaatatatatatatatatggagaaaactatttgacttgctacaaaacaatagaacactccattagagtatttaaaattggactacagaagggtaaactatgctaagatttttgaacctggatcccaatctacagaaaagaaagacaaagcacaaaacaaaggaggagtcagggttggtggggtgagtggggtgagtgcggggagagcaaatgtatccactgaacctatccatcctatgagcatgcctgcctgaattatttggctttgaaattatacatttttaaatccacttcctgcagtaacagaactgccaatccagccacgctgcattcatgccaacattatgcaagggaaataaagatttttttccaataagtgtttttagatttaaaatctaagtgtttacattttaaaacacttaaacatcatttagatataatttgctacttttagaaagtcatgtgaaagcagactctctctccccacagatacaacacaaaaattgcctactatttgagatctagttctaaaatcagtacttggaaatggtaaaccaatagtgctaaatgtgattttatgatcaggtgttactycatatgcaggtagatatgcagacctggacgacatgattcaaatcatgctaaagtacaacagagatctactacaatactttgatatttttaaaagtggtctaaatgaacttatactctctccagccaatcattttggcacagttatctcaccctggttatttagagggcaatcatgtaaatccacaggaaatcagtttctattgaggaagaccaaaagacttatgagaacagtctaaatcaatacctgataatatattgaaagataattaaagtcatatatgtaaattaatccatgatacctaaatgaatctatttaatctcaaatagctaaatataatatgaagaaaccaagagttaattgaaatagtaagcactccttttcatctctgtaaagaaaaaatgatccttagtgaaactaagactttgaaagttaacatgattgtggatttttatagtaaccttctttgatttttgccttagaagatgagttgttagttccctataaaagtaagcatgttcaaatacttgatgtaccaatatggttatgctacaaaaactaaataaaagaaatttatatatttcaacaaaactttgttacctagcattatagggactcacaactgtttgatagaaatattattaaaaatgattatagcaaagctctgccaaggttcaattattctgaaaattgttccaagcttttaagagtcagttagttgcctcctcactcaatgatcaaaacagggaagaaacatattttccattcttttagatctcttggagataattgacatatctttagttttacaacaaaataaaagaccaaatatttactttaattaatcctttaatattcttattacaagattttaaaaatctagagcatgcactccctggtctagtggttaggatttattattttcatggctgtggcctgagttcaatttccaatcagggaagcttttcttcttcaagagaatgagaagacaagccacggactggaagaaaatatttacaaatgatacacataataaaagcctgttattctaatataaaaacaactcttcaaactcaaaataagaaaatgaacaaccttattttgaaatggtcaaaagacctgaaaagagacctcccaaagatataaagatggcaggtaaacatacaaaaagatgctccgcattatatgccataaagaaatgccaatttaaaaaatgaggtatcatgacacatctattaaaatagccaaaattcagaacactaacaaccacaaatgctggagaagatatggagcaacaggaactctcatacactgctggtaagaatgacaaatggtgccatcactttggaagacagtttgcaagtttcttacaaaactaaacatactgttccctatcatccagcaatcacactccttggaatttgcccaaatgaattaaaaacttatgtccacatgaaaatctgcacacagatgtttacawcttcattcataattcccaaaacttggaaggaaccaagatgtccttcagtgggtgaatggataaataaactgtggtatatccaaataatggaatattattcagcactaaaaaacaaatgagctatcaagccatgaaaagacatggagagatcttaaatgcayatgactagctgaaagatgctcatcttcaaaggctacaaactgtatgattccaactgcatgacattctggaaaagaaaaaactatggatacagtaaaaagatagtggttgctggggattcagaggagggagaaataaatagggggtcacggaagtattttatggcactcaaaaaactctgtatgatacgtaatggtggaaaatgtcgttatttatctgtcaaaactcagactattcaagaatgacccaatgtaaactatgaacatggtggacaatgatgtgtcagtgcaggttcatcagttgtaacaaacgtaccacactggtgcagggagcacacgggaactccctgtaccttttgttgcccaattttgctgtgaacctgaaactgctctaaaaaaataaagtctattaawttaaaaaatccaggttactagtccaacactggcattggactagctttaataatttttcaaaaaaaaattagaggacaggcattcttatgtctccccacttgaacttcagaatataagtttgtattccttctaaattggtgttttctgttcaaaaaatattttgcaaacctaataacatggataccattatgttggttatttataataatagacaaatatataatatcagcttcagacatatgtctgcctagcaaaagagagaggacaaccatatatatatatatatatatatatatatatatmyacacacacacacacacacacacacaataaccatatatatatacacaaacacacacacacacatatacacacacaatagccatatacatatatataccatatacatatataactatatacataatagagttatcatgtgtgtatatgtgtgtgtatatatatatgcctacacatatatgtgagaccycctgctagtttttttacatgtttggagaaattagaaccttaaaaaagagctcagtacaattccatcaatcaaacatagggtattaatctaaaatacttgctgacacaaggaagcataaaaggctcattgttaaagagtgccaatattttgtagcttctccaataggtaataaaactataagtacagagtacatcagcagtcctaataaaattggtrggtcttctcagtctgacagggtgagaaataaagcacagaggagctacccataaatgaataacctaatatcaatcacttctctgctatcatgcaaaagctgagggcagatcacatatttatttttcttcctagtataaactattactcatggcagaaatttcagtatttctactggcaaaactgctactctttcgtataatttaaaatgttatttggaaattttgatcaatatatagtttatcgtgcgctatattagatttactttgcattaacagtgcatttgattttgtaaatgaagtctaagttcagcctaagtgatccaatacaactgaaaaaatttatgactctattcatcctggattcttgaacaattcacaataacaaccttcaaaacattaaaaagtgagaggaagagatttaacaacataataaaaattgtattactgtaaaaaaaaaaaccacttgctattcaaacaatcaaaagccccggtcaactttcattaggctaaactcgttaagattgtgtttcttctgattgaagtccaaagcagacctttctgccttctacttgggcattctgggaaccagcctcctctacactatggctctacccttctctaggtcctaggcgttctctccatgaagttaacttatgggaatgagataatagatggttgcccatataaggcttttatgaaccacaccacgaatagcatacattaattccacacatgttctattggctacaactgaataaaatagatatatctaactgtaagggaggctgggaaatgtagtctagctgtgtattcaggaataggagaaaacgggtttcgttaagagtaattagtctctgctagagtccaccaatctcttaaccaaatctccattttactcctctttttacatgtagattatagtcagycttcacagaagacccacaatcccacccaggcactgtttatacctcaaagctgaggctctctctgagccatctgtaatcaatcctcttcattagttcagatatgctctggtgacacaggaattcagtgggcaccttatctgcccctctgtgtgtcaacacactatggtggaacaggacaaggtaaccacaacaaacacttccctttaggaaaggaaaaactagagatatggcaggccctgccaggaagaccttgcgcaattactctgttgtgatgggagaaattccttgcttaggacctaatgcagctctctggagggggcagccttgtgcactgtcctccacgggtcctggccctgccctcaagcagtctcttacttgtttgttatcctacatggtaggggtccccaatccctgggctgctcaccgctagtggtccgtggcctgctaggaactgggccgcatagcaggtgagcagtgggcaagccagcattaccgcctgagctccgcctcctgttagatcagtggtagcattagattctcttaggaacgcacagcccattgtaaactgcacatgcaagggatctagcttgcatgctcttatgagaatctaactaatgcctgatgatcaaaggtagaacggtttcatcctgaagccatcctccccccacccccgcaccccttcaccccctggccgtctgtgcaaaaactgtcttccatgaaaccagtccccggcaccaaataggttgcagaccactgatcttgggtgtattccatcagaactgggtgtgcaggcccttgggagttgtaccattttcacagttcgcttcttgctttgcaagtttaaagatccaagggtttgtataggaaattaagggaaggcttttttagtcttaactcatggtttctttggcaatatgataaccccaaaatattgcagacttatctatttctttctgtgcagttttatgtcctaataaccacacctaaattgatttccttctcaaattggtttgtttcattgcttccttgccctcatgcacctgcctttctctccctctctctctctctctctctctgcctccctcattctctctttctttgtcaatgtaattgtgcctaccctaaagctaactgaaaaaaaattagctgggaaagccatatatataaaatctgctttaggctgcagggatgagtctgttttcccaatgagaagtttcattgggcctttgtagctaagaactttctcaagcacatttacttgttactaatgctatttgagttcagaagcagttggattttccaaacctgtaaggattttgatcactgaaacatctccattcccatttttctgtgcttgaaaactaaccaattcttatccgatctcacctctttcttgtaatgtcttgctgaaagcaccaagagtagcaaacatacactatcattctgagccttttcaagtattgctctagagccacagtctcagtgagcactgagtctgccttccgaattgtcacagttgacatttaaaaatgtttatttcatagaatatcaatatttttcagcttctcagtcttctgtatctgttttctcatagccctactgaccagttgcttcagatttttatatcacaccactcttagaaccaactcctgcatttctgtcttagaaaaacagaatttgctatgacaaacaacaataaaacaaacaaacaacaaacaaaaaaaaccttcagtgtctgaaaatagtacaagcttatttttggatcacacaaagtcccacactgatgttctttcttgctgcatagccttgaatgtcatctttccatcttgcagctctatcttcctctaggtcctcacagtcctttccacgcagacaagggagatcgagaaattaagataagatgaccatgggctgggggtattagaacaaggactgaaactggtgttcactagctaggacttagttaaatggccatgcttaattaactacaggggaagatagaaaactattcaaaaagaaaagaggtttggtaagttcctgtcacattgttaaacaaagaaaataataaagctctactgaaggacataaaggattacttgaagaaataaaaatttctkgttccacaagatttcatcttgttcttagggaagactcaatattctaaatttgtaattttctcctaattmatctgtaaagtcaatatgattataagaaaactaataaaatatttgagaaatgtgaccaattgtttccaattcataagagtaaaatgtattaaaaatggcaacaaggtatatgaaaagatagtatccttatgttcaatatacacaaaagcaaggagatgaagttttctgttaaccagttgacaaaaatgcattgataatatcaactgttgacaagaatataaaagaaatacacttatatgctgttagagggactccaaatcaagtacaatacttttagagggaagtttaacaataggtctcaaaatttataatgttaataccccttgatccaacaattatacttccaggaatttatactaatgagataattagaaagtctgcagagatgtaagtacaagaataattatcatagcatattttaaaatagaggaaaactattaaatgctttccacatagagatttggttaaataaattatgcccttaaatatagatttcaaaacatcactaaaaaattataatgtaaactaattattagcagagaaagaggtgccaatacataatgataaatgaaaaacagcagttataatttcattttgccagtagcatatatatgcatatgtggagaggagaaagaaaggaggaagagaatgagtaagaatgcttaaaaaatgtttagtacatttttgtgtagtctaaaaatatcattcattttttcagtcaatggttaactaacacttgaatgtattttattgtagtgagatggtgctattttagaattgtgaattagattagctcaaatgtcctcacttttactttaaacaaatatattttctattaaaaatatgcaaatatctatttacctatagtttctaagcaaaatacacattccttccttttaccctctacatattcatttcatgttatcaaattaaggcaatatttcatcaatcacaaaaaaaggatgagcggttatttctggatgttaatttaagtgatttttgttttgtgttatttttatcatgaagttagtggagaaaaaagtggacatagatttagaagaactttttctgctgctttgtgtgacttctgacaggttgttaaaacatacgagtttcagtttcctcaactataaaattgagataataatcctattctcaccaagttgtaagaattatgttagaatatttaaaatctcttagtattaccattaaagttaatatttaaaatatttttcctaaaactttgcttccataaaagcttttgactaagtaatttcttgatttaygcaaactttgggataggaaactctgaattaagttaatatggtccatttttccataacaaattttctctgaaatctcctttaggtaactcagcaaagttccccaaccaaataatgtaaataaaccagagaagtatgtaaagagtgacarttaaattaatcatttctataattattttaactttgtaataaagcatttgatgtttaaaaattgacttctagagaaagtgctatgttttaaaaagaaaaaatcatctaaaatttgaatttcctaaactaatagctgactaattcacactcttaaattttgctctctacaatgtggccttatttatgtctcatttaaataaaatgtaactcagataaaattgttcaattccaaaaatatttcacatcttttgtaataaaaaatgtttgttataataattgcctacatccttactaagtttctatctacttgttccatctgttcttgaggaataggtgttgaaatctctatcattgtggatttatatatttccccatgaaattgtgtcagtttctgcttagtatttagaattgttacatcttcttgataaactgattcctttattccratgtaatgatccttttcattcctagcaatattctctgttctgaaatccactgtttgatactcattagctatcgcagttgtcttttgattagtgttcacatattttatctttttccatgtraattttaacctgtatgcgcctttatagttgatgtgggtttcttgtaggcagaatacagttaggtcttgcttttaaattcaatctagcaattgcttccttttcattggtgtttttaaaccatttacatttaatataattattaatattattgggtttaaatatacatattgcttttttttgtttttgtttcatttgttctttgttccttttctctccttttcttgccttcctttggattactcaagaattttttattattgtgttttatatccttttttggcttactagctataattatttatggttattttcgtggttcacttagggtttagagtaaacattttaaacttatyactgtctactttcaagtgatagtatactatacctcacacacacatataaaaaccttacaacaatatactttttttttccttcaggcctttatgctagtgtagtcatagattttaatcctacgtatgttatgaaccttattacattgtaatttttatctaaacagtagattaattttaaagacttaaataatcagaaaatattggatattaaaataataagaaaaataaagtatgtttactcttatagtttccatttctggtcccttctttcctctgtgtagacacagggtttcttctatttccattttccttctgctggagggacttcttttaacatttctttagtgaatgcctgctggtgagaatttgttttgacttatgtatatctgaaaacaacttgttatttcaccttgatttaaaaaaatatttcttcagaataaagaattataggttcataattttttgcatactttaaagatgctcttccacagtcttttagcctgcatttctttcccaaggtgtcataggtttcatctttcctttatttacattgtgtcattttttctatgtctgttaagatgttctccttattacttattttaagcaattggattataatgggccttggtgtcattttcttcatctttcttgtgtttgsgttttactgagcttcttagatctgtgggttcatagtttttaccaactttggacattttttggtcattatcttttcaattattttatctcccactcctctctcattcagtgacttgaattacatgtatattaggtcaattctagttgtctcactgctgaaaaaatgttctttttttcttaattttttttctatctgcttccttttggatattttctatggctgttctcaagttcacaaatcttttcttctgcaatatctaacgtgcctttgatcccatccagtgtgcttttcatcttagatattgtagttcccaactctaaaaattgatttggatctttttatattttctatgwctctattaaaatgtaagatgtatcttctagctccttgaatatatgaagtatagtcataagaactattttaatgtcctatttctattatctgtaaattctgggtcagtttcaatatattgatttttctctttattttaggctgtatttatttccttctttgtatgtctgataatttttaattggttgccagacattttggatattactttttacaggctaagaattttagtatagctataaatatttttgaaatttctttggatcatggttaatttatagctataaatatttttgaaatttctctggaacatggttaacttatttagaatatttgggattaatgtgagcccaaatattaaagtcttgcctttaagctttgttaggtggtcctaaattagcatttttaccaaggttcatttttccctcttagtgtgggaggatcstttttagaactctactcaatgccccttgaaatattaagttttccactctggctattgggaaaaggaactatttcttactttgttgagccttgacccctgttccaccttactattttaggtgcttctttcccctgcctctgttagtttcctcacacacatgcactgagggggaccctctgcagatcttgagttctctttgtacatctcattcctgtgtcatactgtcctgtgaattctagccgacttaacttccttgaattctaagcttcatcttctgaactcaaggagacagctaggcttccaccctctgaaaacttttcccaggcagtaagttgaggcaattgtaggtctcacctcatctgtttcccatctcttgaggattactgtccttcattgcctgatgtttaatggcttgagtgtcattgtttcatacgtcttgtctaaagttgtttcaggtcagaagaactgctgttccatcttgattagaaatggactacatactatttcgaggtcacattcrtattcattattgaattgacatgcacaaataaatactctcaatacttattctaagagaaggaagwctggttttgctcatgactatcttttccctggcctccaagctccaagactcatctgttataacattgttagatggtttaaaattttgaattctaggtgaagctgttacaatgtttgtttgccacaaaccagggaagcctcagaggagtaaagagcagttcaaataaaagtgaattttctctccctttacagtttgcttgctgaagtatgacaggtgtaccatattgtaatgggagtaaatatcagattatgttttctgtggatttcttgtaaccaggtcaacccagcactgtagataaggcccatgcccttcaagaagtagaaatattttcttttaaaatatagtgttggcaatagcaaagacatgaaatcaacccgaatgctcgttgacgacagactggataaagaaaatgtggtacatatacaccgtggaatactatgcagctataaaaaggaatgagagtatgtcctttgcagggaaacggatggagctggaagttggtatccttaacaaactaacgcaggaacagaaaaccaaacaccrcgtgttcttgcttataagtcggagccgaatgatgagaacacatggacacatggggtgggggaacaacatacaattgggcctgtcagtggagcagagggagggaacacatcaggaagaaccgctaatgggtgctgaacttaatacctaggggatggatccatctgtgcagcaaaccgccatggcacacgtttacctatgaaacaaacctgcacatcctgcgcatgtaccccagaacttaaaataaaagttgataaataaaaataaagtagtgttggaacctcaggggtcaaccccgctaggctcgctctgagcgccacacaggcccaggcttgctggagggttcagggcgtgctgctccacctgccggtctgtattaggaactaaggagcttctccagaaggaaatcaagagtcttggttcagagactgaggcaaggaaatgctttttgttggggaaagttaatgcatttgaatatttgccacttagatttccctgagtctctacattttcaccagggacttcatcttcaacaaggtattttaaacttgagtgagtacataaaggtaaaaaatatatacatatatatattctccgcaacctctaagtttgtattggttgcttttacctaaaatatgtgtaaataaaatgagctgaaatttgtaaaacacctagtatagcccctgacagattatatgtgctttaaacgtgtttgttaaataaataaaaataaacaaaccatataaaaacaaggcaatacctcttacgcttatagcacttatacaaccacaggaacaaatcaaattcccagatcttgtatttaaaacaggaaaaagcacaaagcccccttcccatcacataatactcttttgatggggcagaagctgctccactgccactgagtcagaaccaacgccacaatcaccgtgctgactcacttttcctttagcctcagcgctgctctgccaccgtgcatcgtgcaattctcacacctgtttcctccccccaaaacaccgaaaaaccttcattcatatggcaaacgatgacactattcacctgcagttgttgcaaatgcrtattttacacattcagactgtgtgctctgtgaggcctgaatagtgtcggttagctcacaactacatacttacgggccaaaacagtgtttggcccaaaggatgtgttcactacaaatatgttttgggagaaaggagatggaaggaaggaatgaaagaaggaaggaaagaaggaaggagggtgggaaggaaggaaagaaagaaggtagggaggttttttcttttattagttcaaagcaagtgcagtaaatgttgttcaaatcagctgcatttgaaccatatggcaggattcagttataaggctgtcttccttaagatgctccagaatatgytaatattaaactttaaatgcatctctacagtaaaagtataaaataaaatatttccttatgaaatcacaggcaccaaattaaaaaaatcccaaaactcaaaggagtctactttggcaattttacctagaacttgaggataggaggctgtgattaaaaaactaataattaataataacaataaatagcaccatgaccaaatccaacatctcaccaaagtctctgtaagccctgaaaggacagggtagcatggcctggtctgacacttagtagaatttgggatggtgtgatgggaattctgaaatccggaatgaaaatgttggaaatggcagtgtctgagggatgttatcaataagctgagtgtgtgcccacatggcctacatcagccaaatgccaagccactcagtctgcgaaggtgccacagggaacacagcagaggcctgtgagcacatggccaactgcatgtcccgaagtggagaaaaacaacgtcacacagccggcacgagggagccaagtgagtctgatactgaacttttgaagaggcccctgaagagagatcagggtttgtgcaagtgtgcgacagaacattcacccagagaaatagttggttgatttaatgctagctatttttcaactttattttttatttcaataggtttttagggagcaggtggtgtttggttacatgaataagttctttagtggtgatttctgagattcaggtgcacccagcacctgagcagtgtrcactgtacccaatgtgtagtcttttatccctcatccccctgccaccctttccccaaagtccaacgtatcattcttatgccttttaatgctagcttattaaaaacccagagagagatgtggcttagggagacacaggagaatcacaaatatttttacctgagtacttagcgggtcagttacaatactgtaaattcttagtaaagagaaaaacagtgtctggccttttgcaaggatttgccataggcagaagcagactgactatgaaattaaccaagcttaagctccaagcccctcacttgtatgggctcctaccaaatgctcttctcaggagacccagtatcagccacctgctagcaggttggagcctgggtcacctttcaattctgatgttgaggcccagggcaggagaatgggcggccagcactatcccctgttggcttgtgcctcagaatctggacgctatctttaatcccagagaaggatctgagggggttgctgctctgctccctgctttgaggagcacaaagacccaggtttatagccagctcattgttgacagtgagggtctggagtcttgtttgctggaaaacaaccagggagcaggttgctccagggcttgtgtgacctgaatgaggacaggcagatgggagtcgaagatgtggcaacagcaataataagttgtgaagctgaaagaaacttaactgtcaatagtaaaaagcaagtttccattgacaatgctacaggagaatctgatcatctgtctttgttttccacagaaaatgacattatgtaattgctgtcacgaagtaaagaccaaggaatatgtagctaataaatacagagaaaaatattgcaaagatgtcggggacaatgtaacagtgttattttctggatggattttatttgtggtatctgccaggctcttattttttttctcattcttagtcaatattaagtttctcacctaattttatattccctttcttaaaaagggcttcccaagttatatcagcttcaagccccacaaaacctatatctacctttgagcttagagttatcataagacaaacttatactaactttatataagccctataacttctctgtacctgtttcctcatcgtttaaaatgaaaatgggtggacaaggtgatttctaaggattttttaaatgttaaaatacgtaagtgttagctaagactaactacatggcagaaagttcaataggcaaggaaaagaagctgatatacagaatctgcttcaaaatgattcagaagtgaagataaaacatcactgaaccatgatagacactagaaaacattacacatatcaaaattggatgtgcacataatttgaaaaatagatatgtaaataaatgttacattttatggttaaatctctcttatgctatttattataagcatttcagacaaattacataattacttatgactcaagtacatagttatcaaagggcatttaagttctgtgaaaagcatatgtaataatgcatttgtattatgtaaaattgattaaaattaacaatggataagtatatacctctaacacttacgcaattatctttgtcaaagtctaaaatgttttgattactagtaacaggtaagcacagaggtcaaatgtagactcttgattagggtcttaatctgtttaggctgtcataacaaaatactataaactgggtcacttaaacaatagaaatttatttctcatcgtttcagaagctaagaagtccaagatttaggcaccagcagacttggtgtctgctgcrggtccactttctggttcatatgttataccttctcactgggtccccacatggtggaaggggagaacaaattctctggggcctcttttagaagagcactaatgctattcatgaggcctccatactcatgacctcatcacctctccaaggccgcaccttttaatatcattgccttgggggttaggattgtgatggggaacataaacactgaggccatcgttgggtaaaccctgagtcctgttatatgcagagcaccgtgctcactgactaccascaaaacaaagataggkgagaggcagctccagtcttcagggatttctagtcgggtagggcagatggtcatatagaattaaaatattacattctgatgtctggaataataaaagaatacaacaaagcagggtgcttcagtagtagaagagtgattaattcccactaactaatcagataaattttatgtgtttctaatcacagactacaagaaagctagaaaaaaacattaagaataaaaaagcctaactaaatacagtagagatggagacaatgaaacagccttgaagtggggaattaaatggcaacagagaagatgtaaacacaagaataggataaaatgattatcttgttaatagaatatcctgacttttctcccataccattatttgactatcacacatgcaaaaaattcccaacataatgatcaatcagaaaagatctatgggaaagcaattccataactacgtagcattacaaacatatctatcatttttcctgttaactattcctgatttatgaacatatctaaaggggacttcattattaaagaaacacaattaaatgctttttggctaaacattttgattttccctactaagttgattttccctactaaaggctggctgcccttttgttcataattgagtctgcagctattaattggcaaagctgtacagcttcctgcatacagcatttgatcacttcagagtcggagagagtggggtgggcccatctggcactggggcagtaggagatcttgtttctagatttagtcagtcaattgaaaaaaataccattcgtcaaaagctttccatccatatctaccacgtgcatgtaatgtgggagtaaatatgacaaaacccaaatggtttgaaattaaattacttcaattgttttatgaataaaattgagcacttaaagatggagacagcaaagtaacaaaatattgaattttggtgcagtttayattttttgttcatttttttaaaagcagagctttacctggattaagaccacaagatgccatgaaaattatgtttcttaaaggattttccagcaagaagccaggatttgtctttacatttatatgctgattcctgtaaagacctaaaataaggtttctatttaattaaaaaaaatgacactttgggaggccgaggcgggtggatcatgaggtcaggagatcgaaaccatcctggctaacaaggtgaaaccccgtctctactaaaaatacaaaaaaattagccgggcgcggtggcgggcgcctgtagtcccagctactcgggaggctgaggcaggagaatggcgtgaacccgggaagcggagcttgcagtgagccgagattgcgccactgcagtccgcagtccggcctgggcgacagagcgagactccgtctcaaaaaaaaaaaaaaaaaaaaaaaaaaaaaatgacaagctgtaaaaataccaaatatctaaatttatattttcttccatgatgtaaatactaaccagaaattatctagtattattaatatctacatctatttttaaagtattcgtgctacttattttgtattgcaatcagtttgtgcattttgaaaagcaagctataatcatttatgaaaaccatgacagaattttgtaaaattttctaatattaggatattctctgctgcccaactggaaaacacaaataagatagaaattctcccctctttcttaataaagtctgctcttgaactcattctcagccagctatcaaccttctgtggcaccattccttgcaagtagtattcctaytatctctagtttctctttgcaaagcctcttaaacctattccagtaggctttcacccctaccataccagccacactgttccctgcaagatcaccattgacctccgtgattctaaatccattcttcatctctcagtctttagaaaccaatagtctctataatacttgataataatttctatctgcaattccaccaatatctcaaatgcaaaggcttaaaactgaagtttgagtcttattaactctcaacactttaattccctgtacttcttctgtctacatatccaattctttttcattccctcatattctttcctctgtaaaaactaaatctgtcctctattcctgccacctcttttggaatttatacccctggttcctttccttagtaacttttgtcctagctctctgcctcttttctctagcctactctttgtattgctgccaggttaatgatcctaagacaaaactcctcatcattcaccacttgctcaaatgcctccatggtctctcaatacttggaattcatgggtcagggtaaggtgagccctgtgggccttttcattgttgtctcttaggactctccctcctattgacttttcaaaatgtgttctaacctccttttcctgctttaaggataatttctttttcctyatttctccaagaaaattgtttcccaaattttattttactctttgcaaggatttttaaaacttttgtttgctttggtctttctctttgtgttagaggctttctttaaatatcttgtaaccctttattgcacatcgattttcaggtttctttgattattgcctcagttacacccctggaagctttaccgcatccaacactttgttgctctcgtagttattctcatgctattttagatgtatgctttttaaaaataatttctattattttagtggtgctaatgatggactggaaacaaatcctttggatttcatctgtcatgcctacacagtatttccatacatttttaacaacccaggttaactcattattcatggaaagcattttctgttttctccctctttgtgactttgcacatgcccttccatcttatctttttatcaaatttaaaatatcakgcaaaagcctttcacaaattctttctatcatcaacttccattagaagtgatttccccttctcctggtcccccagagcagggtattttatcctgcttggaaatgtagtcatttgtgcagccgtcwcatctccctactattctccttaacaaggaggagctccacttacctccatccgagagaatgtttcatgcacagtaatgatcaacaaatatttaattaacagaataataaatggaatacacttttcttagatgtatatagctatcaaaatgttcttgagagttatgtattccaaagaaaattactctatttttaaaaatgattacccaccttttccaaagatactaacagctatgaatattcatcataagcatttctttttttcttgacagtatactttgatattgatggttaattttaacatagtttgagaaacgtgtaccaaaaaaaaaagtacaaaatacacctggtcttcgtaaaaatgccattaactcygtagtggatgctgcactgaagactgtagaagccacctccactcccgccttccacttctatcgtcttgataatcacagcactcagaaccacagcaacatgggaaaattggcaaaaacagactccctaatttgctttaaaatcagaacacaatgaaatataaccctggaagaggaatggtggaccactgatgtgggtgtttatctatagaacccgttgtcctccattatgtgaaaagatcatcaaaagtttaaatattagtaggtacttgcatagataattcaaatagtctttacttggagcactctgaaaagacattctacccaagaatttaagttatgatgtaacttraatggcaataacaaggttatttcatcataaagtaactaaaatggtaataacaaggttatttcatcataagtaagaaatatttctaatcttactttcagagtttgtattctatgaatattaagaatactaatgtatttcattgtaattttattttgagttataacaggaatatttgaaaaagtgcyctgattataaactcctttatggtagggattgtcccctagaactaaaaaaaatcccttatataaaaccgtgacaacaaaaaatacctaaatttataaacttaagcctatcaaacctaatcaatataaaattatacaggtagtcaaatctttatcttaccaacatgcagtcacatctttacattaccaatggaattactagggcaccaagttgtttattagtccagaaaatggttgctatatttatgcttattttgtcagatttcttattatttagctcattaaaatcaagtctgttaagcaaaaagtagtgtgagtaatcaaagccctactgagaagaggaggatgcctgcaatgaaaatgcaggtgtatataacaataatcaaacagaaatgaggagaccaaatgagtgacagagcctctgaaaactgcccctgcagttggccatcaagagcaaaagttgaggaaatgtgattgatgaaatggaaaaaatctattttatgtggcttgaaaaattgaacaaagctcatatgccaataatcccaaagttgatttatgagaaagctagagagggttgttcttaacagttaagaactgtggaaaatggagctgatataacttttatcaccagctacaatggatgccataggttcaaggttcagtcagataggcacctaagagctatggccttgcaaatctgggtagttgtgccaagaaatgctcaactataattgtgcaatgaattaaaagattttcaattgaaatagaattatcttggaaaaggatacctggtggaatatataacactgaggagaataaacatttttaaagtctgaaaggattgcatctgtggaattcaagtttaaaaagccttagcagcattactctaggacctatctgtaggaaatattgagataatttaggtggaagggggcattaattggtttgccttgaaattgcatagacttttcatttatttgtgatagccctgaagtcactcataaaaataatgagggccactaaaactgctataagtttatcatttttaaaatctaggagacctcaagaaaaacatctgaaaaatccgaaatgcctaatatcactttaatgtaatcaataagaatcagtcataatgatatcattatctatagcttccttaacctataaattatatgacacttatatagtgtcattttggatttaaaaaagtcttttgataagttttcttttcttttttttttttgctaaccttcttttaagtaggataatgcttgagttcatataaatctactgaaaaattccaagtgaaatttagacattcagagctaaggtaaagatcgctgctcacaatttatcaatgtttatattataccaacatttgtttatacagagacattcttcttaccagtgcatgatcaatatcctctggatcatcatggcatatactttggagtagaaaatactatccctatagacgaggcacaaaaaccatcaaggtaggtttaaaaagctgagccctatgcctaagactacttagtccttgctacaacacgtatgagctttgaacaagtaatttaacctccctaacagtttatcctcacttgtaaaatagaaataatgtttgtcaccagagtaaataacgtttgtccccggtattaggataagttaggtttttttttttttttttttgagacggagtctcgctctgtcgcccaggcgggactgcggactgcagtggcgcaatctcggctcactgcaagctccgcttcccgggttcacgccattctcctgcctcagcctcccgagtagctgggactacaggcgcccgccaccgcgcccagctaattttttttgtatttttagtagagacggggtttcaccttgttagccaggatggtctcgatctcctgacctcatgatccacccgcctcggcctcccaaagtgctgggattacaggcgtgagccaccgcgcccggcctaagttaggttttagagcagtaaaaaaccacctcgaaactcccagtggctgaacaaaataaaggcttattcttttcatggaggaaaagttggctatgtctagaccactccctatgacaactgtctttcttggaggactttaatatactgagagggtttaaataaaaggtgtgcagattacaagtttagtctgtcctcttccgaggagattctcccccatatgctgttttactgtttgtgatgtgacctcaaggcctcttccaggaagctgcctccacatttaccatggtgggaaaagggagccctcagtttgcaatatagagttggattaagacaraaaaatgggcaattgtaagacacaggaagttaatcaacagggttaagcacagagtgctatacaaacaggaagtgtttataacagccatgaaaggtagccaagagagtcttcccacaaatatcaaagtttaagctcacttctgagtttaaattcccaaaataatttggacttaaagtgagcattgtcagtcaaatgtgtggatttaggttatagttagaaaatctgctttaagaaaataagaaaggttcaaaggcattttagaaggacaggtaacaccccccatatattagtatttcagaattcagtgaaaaagtccataaaaactttgatcaacttagactttcttggctgaagagagaatccataatatagaaaatatagctgaacaaattatgttgaaatattttaaaaattaaaatataaaatatctagagcagagaatgagaaagcctaacagttacctaagtcctagagaaatataggagatataatacttgaaaataaaatggctgtgattttccaaattccccaaatgcaataaataatgtttctaatgtattgaaagcacaataagtgaaatcaatgccaagagatcaaagcaaaactgtctgataaaaaagactcagaggaaattagaaaaacatccagagaaaaaaggcaaatcatcaaaaaaagaacaataattagaaaaacagcagacttctcaacaacagaaaccacaaggttgttgaataatatatttgaagtactgagagacaatcactattatcctctaattacatacccagaatatttatctttcagaaatgacagtaaaatgaaaacattcacctgagcataaacagttaatcaccaggagatattcattaaaggcaatggtaaatcatgctctttaagaaggaaaatgatttcagaagaataagatgcaaaaataatggtatgcaaatacaatgctaaacatcttgtacatctctccaatcacctatttaaagtaataaacataacatctaatttgtgggatttttaaaaaggaaaaaactaaaatagtgaaaaacacagattaattcaggggagtggtgattgcagtttgattattctaacatttcctacactgtttgaaaaataaataaaactagtttaaatttagattttattaaggaaaatatgtgtagtaaaaattcaaaaataatggctaaaagaatagaaatagcatgtattaatcctcaaaaaggagggggaaaccccatataataagtaacaaagtaatcagttaaaaataataatttttaaaaatagtcatagaataagaaaacaaaattctttactgataaggcagaaataaatctaaacatatcaatgatcacaataaatgtaaatatgttaaattctccccaaattgtcagaatgtataagataaatgaaacccaacttattttctatttttaagacagccaccaaaaaaaatcacaaaaacaaaaaaaacacctaaggatatgaaaatattgaagtaaaagatgaaaaatatattccaagtaaacgttaaacaaaagaaagctgaaatagatatataaggcaaataggctttaaggaagaagaaacactttaagagaaaaaagggtcaatgcataatgataaaaattatagtcaccagaaggatataatgattctgaactttatgtaaatatagaaataaaaatatataacaactgaaagaaataagcacatctatcataacagtggaaaactttagcccagctctctcctttactaagtcaaatagttaagtagaacaaaaaaaactcttaaatgaacaaattcatacatacacacatataaaatatagaacatatggacaattcaataacgttacattcttctgtagtactcctgaaaaccttataaaactgtatcatgtattacaccataaagtatgtcttcacaatatcatagactccgtgtgtttttccatgttgcaattaagtcaataatttaaaaactgtatatatttaaaaattattaaatgcttcaaaataacacacgggccaaagaataaacgaaaatgcaaatttaaaaatttcacaaactgaacagtaaagaacatactatagaaaaaaagtgtgagaatcagtacttagaaggaaatttatagccttttatatttacattttttagaaaagaaaaacyactgagttagatgcccgacttaatttctatcacagatagatcagaaatttaaaatatgaacatattaaataattttatgcaaccaatttgaaaattcagattaaaaatctttagaaaaatataacttagaaaactgactcaagaagaaatatcaaaattcgtacagccattttgaaaacattatggagattcaagaaacaaaatagattcaagaaacaaaaacagaattatcgtatgatctggcaatcccacttctgggtataaacacaaaggatctcaaatcagtacattgaaaaggtgtttgcactcctctgttcattgcagaattattcacaagatctaagatatggaagcaacctaagggtccatcaatagatttttttaaatgtggtataaatacacaatggaatgctattccatttttaaaataaacaggaaattctatcatttgcgacaacatgagaaaggtaaacctagaaaacatcaagcgaaataagccaggcacagagaaacaaataccatatgcactcacttgcatgtgaaatctaaaaatgtcaagctcatagaactagagagtagaatggtggttaccagaggctgggcagggaaagaggaggcgttggtcaatggggacaaagtttcagataggtagcaggagtaatttctggtgtcctactgcacagcactgtgactatagttaatcataatgtattacatatttttaaatagctaaagagagaattttaaatgttttcaccacaaagaaatgataaatagttgagtgacagatatgctaatgagcctgatttgatcattccagtgtatccacatatcttgacacatgacattgtactctgtaagtatacacaaatattatttgtcaactaaaaataaaataaaacttcttaaaaaagaaaaaagaagaaacaccaagattgaatactcccatagcatttaaagaattcaatcattgtataaaatattaaatagttatatgtgtttatctaaagaaatgcccaaaaatgctccagaaatgttctacawaattagcatttaragaatccaatcactgtataaaatattaaatagttatacatgtttatctaaagaaatgccccccgaaatgctccagaaatgttctacaaaattttgagaaaaagagattattttaatcttaatagctcttctagaagagaaaaatctaaaatacatccaaactggtaccactatgttaccatcacttacgataatggtacaaacaagaggctaaaatcaagaaagctctgactctcccttttccatgttcccacatggaatggacacaggtcaccggtcaagtggatcagcagatgtagacgtggtctcactgttgagagagccataaacaaaaggctcccacagttttatggacctggagggtttagttgggggcgaggaaagggggtagagttgcactggaaaatagtactgggtactgagtcagagtagagtaaaatgytttcaagggtttccctctcccttgaataaggaggcctyagcatgcgtgctggacatttattctacaattggcagacttacaaaaggccaagagtcaaattcaaaatgcatcttagccttgttggctcagataggactaatattcaggcaagcaggtaggtaggtaagtasatacaaagatagataatagatttatgaatagataggtagagagaacaagatgatgatgatgatgatgataaataggtatgtatatatgaatataaatgtaaaagtttggtttccaggccgggcacggtggctcacgcctgtaatcccagcactttgggagtctgaggtgggtagatcacgaggtcaggggttcaagaccagcctgaccaacatggtgaaaccccgtctctactaaaaatacaaaaaaaatagccgggtgtggtggcaggtgcctgtaatcccagctactagggaggctgaggcaggagaaacgcttgaacccaggaagcagaggttgcactgagccgagatcatgccactgcactccagcctgggcaacagagcaagactctgtctcaaaaaaaaaaaaaagtttggattccagaggtttttttaatgtctgttcttacttgtatattaaacatatatttaaatataaaattctcagacatgaagaagacaatctaaggatagtccattcaaatatagcagagatgggaagaacaattagttttaaaagcagaaaatagttaatagataagaaattatatcttctatctctaaatatggacatgggtaatttaaggataatgctgagtttttgctagaataggctatttcaacatttctgcttctaaattgtgaaatctcaaatattattctaataaattagcccattataaatcatttaaatttgtgttgattcagttataaaatattaaaacaatgctaaaaagattaaaattatctaatccataacaccaattattaaaatacataatttttgcaatgaaatttatgatgacaataatatggagcaactccccctcccccctttttttgtgatggagtctcgctctgtcacccaggatgcagtgcagtggcacaatcctggctccctgcaacctccgcctcctgggttcaagcaattctcctgcctcagcctccggagtagctgggactgcaggtgtgtgccaccacaactggctaattttttgtatttttagtagagacggggtttcaccatgttagccaggatggtctcgatctcctgacctcgtgatctgcccacatcgccctcccaaaatactggaattacaggcgtgagccaccatgccgggcctggagcaccccattttaaaagaaaatccaaggtcttagagcagacactttaacagtttattttcacttcaagaagatagtcgagtttttaaaaatacattccaggatttgtttgatatccgtctttagttgagaataacaggaaaaagatgaatcaggaataaggaagaaacatggccgactgaaggttaattataaatgaagataaaacaacgctgtacttttaatataagtcaacagaaaataattcattatttaagtccttgtagcaaagttctggtgcacatctatttcataaagaaatatctaaatactgatgccaccatctacctagatcttgatctcaaagacagtcgatagttaatacacaattattagcttatcaatagttgaaatactgtgatactcattttcagagaacagagcctgtgaatatcgttaaactctgctataatttaaggtaatattcaaaaagggttgtgactttatgataggaaatagtccttsacattcataattcttaagcactttcttttatcattttgctgatgtatgttctattttaaaatcagaaggataatggatgtgcttcttcaactgtaaattaggttttatatcagagccttgtcagcgttgtgacaggtgacctgacagcggtcttgcctccacatccctccttcctgctgcttctcaaggagagagggtcagtcttaaagaaagtgcaggagattgctgaatccctgaggaaacatctcaggtccataataacatttactgcaagccataatcattttatgttctctctaacagcttaaaagcagagctatactctcctgtcacatgtatttttattaatcaagggcatttcaagtttgaatggatattgtaaatttgaaagtctggatacttctgatttgtgtgaggcaagtcctaaaatttagaaaaacacagaacctgccaggatcattaattgatttcatgcaaacataacccacgtgcatttgagtggawgtttttagttaaatgtattcctaaatgccattaaagtgaaaacctggcccattcagtgtcattaaagaaacaacatagtgcacatatatggtaaactagtataaatacttaacatctgaacataaatcaaagttatactttgttgtaaaacaacattataatcaaatcaatagagctctgaaaaacgcaaaactaatctgcttcctaaattgattagtcagtgttctatatgtaaaattgatttttaaatctgatatatttagcatgcaacaagatacaaataaccacctattcacataatgtgaaatagcatgcataatgaaagaackcaaagtcaacatccatggttatccctgccatattaagtgctgttatgaccaaaatagacatcgttttctaaagccttttttaaaaatccctatacacttctggccttttaagctaaaaatcacaagtacaacactaaagaaaaggaatcccaggtacctcatgatcctcactccttaacacccccaaaggctcacctgtgtggacagagatgaagtacaaactccttaacaaggaggtcaaggtcctaagccatccatcatagatgagctctctaatgtcaattccyaatgtttgttccacagaagagaaacatgccttacataactctttggcttttttcactgtgtattcttaccttggagtaaaaggatttccattctcaacctgctgaactctttcttggttttagagagcccttgaaataccacatctaccaaagctccccatcaggattaagttctccttcctccatgtttccagtgccacayggacaatgcctcattcacttgatttattatttattgagaacctactaaagtccagttaatgtcatcaaggatggtgatacaatgaacatgacagcagagctccctgcccacgtggaacttggcattagatctgcttgtttctttgaatgtttagagactttataacatgtaaatttagtgtcactcaggggtttttttttgggggggggtttctttttttttttttttttgagatggagtctcgctgtgtcaccaggctggagtgcagtggtgctatctcggctcactgcaacctccatctccctggttcaagcaattctcctgccccagcctctcgagaagctgggattacaggcgtgaaccaccatgcccagctgatttttgcacttttagtagagacggggtttcatcatgttgtccaagatggtcttggtctcttgacctcgtgatctgcctgcctcagcctcccaaagtgctgggattacaggcgtgagccaccgtgcccagcctcactcaggttttgaaattcactctactgggtgttttatcttcagcaagtcacttaacccttgtgactcaaattctccacctataagattagaatattatcatctaatacatgggactctaatattaaaagagatataactggcacactgcatagcacagacagtagagcagactgagacatgcaaaaccaaaacttcctatgctttctaaagggaatagaatactccatactgacaagcaaataaatcgtgatcctgcscctttatatttaaaaagaattgtagtaagaaataaaaaagaaatataatttttacaacttctaccagctcagctcatctatattgctacagggttaagacccaaccacagatggcattttgtttagcactgccaacaaataattcatttctggataagcagagttggactcagggataaggtggggagctaaatggctttgcttgggttaaacagaggaatctgagtttctaggggcacatgtggtagggaaatctgatctatcctatctaatcacacgaggcgggctggggcatcagccaccatgaggacactgggccctgtggtgaagagtggccagaaagaaggccagaagattctactctgctatgtgatcccacaaatccctagaccctgcccggccaagccatcagtaagtgctggcagttagaccatctaccctgaatttattcacatttccacatctccactatgacaaccctcatctgagtccccatctctttttgcctcaaccactgcaaaaatcctcctaactggtctccctgtttcaccacagagcacaatggtatactctgggcggagtatctggagtgatcctttcaccatgtcactgccaccctaaaatccttcaayggcccgtcccacctggggaaaaagaggtaaaagccaaaggccttcccaagacctctacagcctcacactttctaaacgtcccactatctcatctcagttcctaccatctcagctctacctggctcactttcctccagccacactgacctccgtgtggttcctccatcacatcaaaccatcacacacccccatcggctttgcctgacacataaaacataagcgcctagtttggctcacaagtctcttggtaccctggttctttcctatttccctgagctcctcatctgccactgtcccccttctctcacaaggatcctctcacaatgctccttaaacattagacactcactcctgcctctgacagcgtggcctggtgcttcagtcagcctgaaatccccttctgctgatcaccacagagctgactccatctgcagtagtccacatgtgatgtgatgaaagtgctgcctttgtttatgtttggatgttgatgtcccatgtagatcccagggactcctgtgtgtgccatggctgacagctgacacctgtaaccttttctgaaggatcgtgcttagcatactggagtagccttgcctagaggcacctgggagtcatacaccgcacttggagtagtcagatcagtagccgacaactgactgctgcaagaagagctctcgtgtaccaagcctccctcctttgcctcaaatcaatcaggaatgaaactttggtataatctgtttgtgggatcaagttgaggctcaactttacttgaagccatatccttgctcatcttctctctgccctcttgcttcacttgctccttgcacaaatctatgcacacaattcctgcttcaggctctatttmtggcaaccatagctaaggcacaatcataaatatttgaatatttattttcaagaaaaacagtcctaatatcggacttttagaacagtgtgtcaaacacaaataatatacctgaagatgcatttatattaacagcaaaaataatagttcctatataatcacccattctattgagtgaatttccagtaactctggccatctaagattccttagcagatcgaccacctttatatagccaacgaatacacatctcttgtaccccaaagtatattcagacctggtcaaagtagtgagaaagatatgagtcaccacaactattagtaaagctgggagaataattcctaagaaaatgaaataatggagtaagcatattgtaaaattcatttaaataaatgatacccactattctttcaacattgtgagatgtggatgtgaatctggagcatttattactgcttattttctcaatgaccaagaatattctcagaagtctgaggtaatttgaaaattctcacagctcacataacctacagccatggttatgtgagccacggctcacatagatgtactttcagatgccaaaattctagcccaatacccacactcatcagaagacaatgtatgaattggaaaggcactgtgagtccctcactaacaaaagcattcttactccttgtagtgccaatttgttttcttcaacggaatctgcttttaaaggttaataaacaagatgaattgtaaatagtggaaaacatctgaatatctctgtgttctagggagctgcttctcctcatcagatgaatgttcctccacccactttattcagatcaataataaaggcaattccatgtcaatttatgcagaagtagtctaagttttcttcaatggctagaaacactgggtttcaagtctttaaacactacaatatgaagaactttccaaaatcttataattttttatatagtgggtcaaaatcatgtcattttttagtgaaatatgcttaaatattattcatgttcaagacttcagaaatgtatactgcttttcaaaaaaatggcttattttcaattcatgatatagacatctatatcctcatatgaataaaaatagcaaatgtatatttagcaggtaatggtcttagtgttttgaatagattatttaatcctcatagccccaggaggcatacactcttattaacctcttttataggtgagaaaactgtgaaagagatgaaccaatgcactcagcacatggatagtatatctgggatttccaagccaggtaatctggctctcttgtccatgttcttaatgattacagtacagtgcttctgaatatgcacaacaaacccatattatcatctacatatttttatctacaaaaatggtaccacaaataatgaaccaagtagtcatatggcaactggttgaagatggaacagttcaaaatcaggtaaaaactgatttgtaaatcctatacacaggatgaaaatatgctatagtcaagaaaaaagaaattaagaaaaagagccgttctttcattcatggataacataaatttatgcatatttagggtcatgtgcagatatcagctgtgtgacatatatatatcactagagtctagagcttgtaaagtctataaaaattacacatttcaaatagttcattttaaaaaaggtaatagatcaagaaaaataatgacatgtaaaatcttacacggctgtcagataagaaagctaataataaaactgtagtatttggacacccaagccactatatctttttaatttggtttatatttaattgatgttcaacattttccatccataaaattaataccaacttgcactcccaccagaaatgtatgagagtgcctgatttcctacagcattgccattaaagtaagttttcagactttcgtactattgacaacctcataggagagaataattcgagtataattttcatttcatttgacatggtatttttcaccctcatatttttgggggccattcttgttttcatttctgtaaattgcctattcatatctctttctcatatttttctacagaatattggtctttttattattgatatccagtgtattttatgcattagtcaagccaatgtatcttacttcctcatgcatgtgtagcaaccatgttttattttaattttatttatttatttatttattttttagacagagtctcgctctgccatccaggctggagtgcagtggcaccatctcagctcactgaaactccacttcccaggttcaagcgattctcctgcctcagcctcccaagtagctgggattacatgtgtgcaccaacacgcccggctaatttttgtatttttagtagagacagggtttcactgtgttagtcaggctggtctcgaactcctgacctcaggtgatctgctcatctttcaccatgttagtcaggctggtctcaaactcctgacttcaggtgatccacccatgtcagcctcccaaagtgctgggattacaggcgtgagccacagtgtgtggcccccatgttatatttatataatgtttctttaatcttctaatgccagttttattttcacagtagacagtgatattsraaaagaataatatacaaataaaaattatagatcagtatcaattatgaacacaaatataaaattcacaaacaaaatattagcaaactgatgatcacctcaacagttaacacctagttaagatttaaacttcaaataaactggaaatagaacattgcattgatcatattaagaaaatataaagtaaaactataacaaaattttgatatttataataaatagcaacatagaacataaattcacaataagcaaggcaaaatagtattgttgcagaaatagaaaaatagacagtagaacagaatcgtgagtccagaaaaaaaaatccaagaatatatgagtatttaatctatgataaaggttgtattgtaaagagtgttttagagtttttacatgcaattataggaaagttgttctcagcttaaagtggcctcttataaggaaaagatatttatgtaagtctcatggtgactacgaagcaaatagaataattctacaaattacttttaaaaaggactcaaagcatacaaccacagaaaactatcaaaccacaaagaaagatagcaagagagaaagtaaaaagggaactacaaaacaacaataaaaaaaatttacaaaatggcaatagcaagcccttaccttgcaataattaccttaaatgtaaatggattaaattacccaatagaaagactcagagaatctaaataaatttttaaaaaaagatccaaccacatgctgcctataagagggtcacttcactagtcatgacacacatagactgaaaatgtaggcctggaaaaagatatttcatgcaaatataaactgaaagtgagcagaagtagctacacttataacacacaaagtagacgttaagtaaaaaaaattattaaaagggacgagaagattattacataatgataaaggggttagttcaccatgaagacctaacaattataaatatatttgcacccaatattagagcacctatatacagaaagcaattattaaataatcggaaaagaaagactgcaatactataatagtagaggaccttaatacgccactttcaacaatgaatagattatctaaacagaatatcaataaagaaacattggacttgaattaaactttaaaacaaatggatctaacagacataaacagaacattccatccaacaagagcagaatatacatttttctcaagtgatcatctaacattcttcaggatagaccatgttaggccacaaaaccaaacttaacaaatttaagaggactgaaataatattaagtatttttttcagatcacaatggcatgaaayaagaaatggatgagaaaaaatcttgaaaaatacacaaatatgcagaaattaaacaatatgctccttgaayaccactgggtcacagaagaaataaaaaaaggaaattaaaaaaaaacattttgtgacaaatgtttgagacaaatgcaaatggaaatacaacacaccaaaacgtatggaatgaagcaaaagcagtcccgaaagggaaatttatagtgataagtgttcatatcaaaaaaagaagaaagggctaggtgccatggctcatgcctgtaatcccagaactttgggaggccaaggtgggtggaccatttgaggtcaggaattcaagaccagcctgaccaacatggtgaaaccccgtctctacttaaaaatataaaaattagccgggcatggtggcgggtgcctgtaatcccagctactcaggaggctgaggcaggagaatcacttgaaccagggaggcagaggttgcagtgagccragattgcaccactgcactccaacctgggcaacagagcaagactctgtctcaaaaaatagaagaagaggaaaaggaagaagaaggaggaggaggaggaagaagaaaaagaagaaataaacaatctaatgtcatacctcaaggagctaaaaagagaaatacaaaccaaccactaaattagcagaagaaagaaaatgacaaagatcagagaataaataataaacaaattagaaactaaaagataatttaaaaacaaccaaactaacaggtttttgcaaagatacacaaaattgacaaacccttagttagatgaattagaaaaaaaagaaagctttctcaaataaataagatcacaagtgaaagaggagacatcacgaatgatactacraaaatacaaaggatcataagaaaccagtatgaaaaattatatgccaacacactgtataatctagaagaaacggataaattcctagacacatagaactttccaagactgaatcatgaagaaatagaatatctgaacagaccagtagtaagtaaagagattgaataagacttttacatgcctgtaaaagtcccccaccaaaggaaagcccagcactggatggctttactgtggaattctacaaaacaattaaagaactaacaccaatacttctccaactcttccaaaaaattgacgtaatgacattgtactgccataaaaacagacatgaaaacccatgcatttatggcgaactgatttctgaaataggtaccaagaacacacaatggggaaaatacaatctcttcaataaatggtgttgagaccactgaatattcacatgcagaagaataaaattaggctcttatatcatatgtaaaaatcactcaaaagagataaaaaaaaaaacttaactataagacctgaaagggtaagacaactagaagaaaacactgggaggaagctccacaacattggtctgggcagttattttttggatataactccaaaagcacaggcaataaaaggaaaagcaaaatagacaaatggatggcatcaaactaaaaagtttctgcacagcaaaggaaacaataacaaaccgaagagacaacccacagaatgggagacaatatttgcaaaccatacatctgatggtatatggaactcaaacaactcaaagcaagaaaacaaataacctgattaaaaattggacaaagggcctgaacagacatttctcaaaaaaagagatacaaatggctgacaagtatatgaaaaaattctcagcatcactaatcatttggaaaatgcatattaaaaacaaaaagatatcaccttacatttgttagaatggcttgtatcaaaaaatgaaagaaagcaaattctggggaagatgcagagaaaaaggagctcttacatattgatgaggggaatgtaaattagtattgccattatgagaaatggtatgaagattctgccataaactaaaaacagaactaccatatgacccagtaatcccacttctgagtatacatmataaggaactgaaatcaatatgtcaaagagatatctgcactsccatgttcatagcaggattattcactgtagtagtctattttcacactgctataaagaactacctgagactgggtaatttataaagaaaagaggtttaattaactcacactcctgcatggctgggaaggcctcaggaaaattacaatcatggcagaaggtgaaggggaagcaaggcatgtcttacatagtggcaggaaagagacagagagagagagagtgaaaaaagctacacacttttaagccatcagatctcatgagaactcactcactatcatgagaacagcatgggggaatgatcgaattatctcccatgatccaatcatctcccactaggttcctcctctgacacatggagattacaattcgagatgaatttgggtggggacacagagccaaaccatatcattcacaatagtcaagacatggaatcaacctaagtgttcatcaatggacaaatggataaaaaattgcgatataaattaaatgtaatactattcagccttaagaaagagcaaaatgctgtcatttgcaacaacatggatgaatgtggaggacactatgctacatgaaattatcagggcatagaaagaaaaataccacatgctctcaggtttatgtagactataacaaagttgaactcatagaagtaggaagtatcatggctactaaaggctgaggtggggtgggggtggagagggagggaatgaggagttgttgatcgaagggtgcaaagtctcaggtagaaagaagaaacatattttgagatctactgcacagcaggatgactataatcaataataatgtgttatgtatttcaaagtaagagagtaaatttcaagtgtctccccataagaaatggtgagcaagatgatgaatatgtaattagcttgatttaatcatgccacattgtatacatatatcaaaacatcacattgtgcccccaaaatgatagaattatggtttgtgaatcaaaataacattaataagttttaaataaaaataaataaatacataaatacataaaagcctaaagaaaaataaagtatatggtggaatgaagaacccaagccaggaggatccaaagagctagcatacaaatctcaacaatacattaaacaggcaatgcattatttagactatgtcacacatattattatgtattttaatatttttctgctaaagcagatttgtttagtgtctggtactacatacgaaaatcaaactaaagtaactacaacattattctcgtcctcaacactctagagctaaagtgtgccaccacattcagtctcttttcagccaaggtttaaagtacatagatgctatgttctgttaacctttttcagcaggttgatgccttttgggaaacattggtttcctaagacaagacttgtggggctttgggaatattttaattaaactataaagtcacagataattttctgcatttgtccttgtcacaatcaggaaagcaatggaaacctccagaaaattcsaggaacttgatgttactggatactggtccaacagaatatgtgctggaaatctccaatcctaactcccccaactcttgcctctactgagggtcattttcctcttcctggttttgatttcctcttcattcttttggtcagtcttcacatacttgcctctcatatacaaaaggcaaactttttaaaaacagagttcatctttgctttcacacagtaaaatgcataatattgctttgcgtgtgtgtgcatgtgtgtgtatgtgtgtaaaatagagctttgcttcttcgaggctgtctttagcatcagatgttaaaaattcttcatctgaatttttggaacttgtttcgtgtcttcttggtcagaagttgaaatgtttcagatgactggcttctaaataactgatattttaccatacttcatgttttttccctaagatgtgccatgtaagtatgaataaaatggaaactaatttcattccatgtaaaaattatagttcaacatagaaacaaattagaaatgtgaccaaggcattttatgtcagatcgatacagaagactaatactgaccacaaagcagtgttctggagagaagcattttggggytggartgtgaaaatgttatcaatgtattgttcaaaatgataggcatttaagatggcagacaattataataacagcasttcttctaccacatttttctttaaccagcaatacactcttccagtttccacagtaacacaatcaatttctgattacaaatgcaagcacagcaatttaggcctagactagagaaaatgaagagcatatttgtagttcagagaaaatttgaaattagcctatatccctcatctgagaagctctatttgatattgacaattaagattgagaataagaacttaaaaggaaaatttccaactgaatgtaaacttgattttatagaaaactcatactttttatcatgtcttacaaaaaaaaaagatttcagaactgctgctagatgaatggtatttaattacatcagttgaactgaattacagyagaaacaaatgacaattagacaccaatatgtgagtgactaatgggaacatgaataatctcagtaggctctatttgtttggattaatgcacagttgccaaattataatctaaaatgcttagatatgaaattttttcttctttgattttttattacttcttttaaaaataaggatcatcctcactcattataacagaaaacagaaataccaatatggttagatgttatgctaactctgaagtgctttctaaagagtaaaaaaaaaaatcatttctaaaatggcttgtatcatatgcataaacacaaataaaaataatgtatatggcttggaaacatctttgactagtgtaaaaccttcaggagaaggactcttccttattgaattaagtgcatttgtaaacgaaggtaaaggccaatgaagtcattagacaaacatgaatagtaccttactcactcataagcattcacatgccttcctgagcrcgtaactcacgaccactagtggctaaagcatcaagaaaaagattagaatcctataaaatccctaaaggtctggtttataggacaggacaattatatgttaatagatttgtgaaaaatacaaaactacctaccatctgagcacataatacctgtgacttccatattgctgagcamgtaccttgtacttcacaataacatttaatttaatctctctgaaaaccctctgaagttgtggcagtagtcttatttactgatgaaacccaatgtcacacactggcagtgactatatgaagataataactgtggcaaatcatagcacttaaactgtaaacagcattgtggacactatcttaaagagtttccaataattttactctattagttgaagatggaaaatataattacaaatgcctagtctagctttccaaaataagattttatcatcctgcagtcaggtcaaatcaatgatcattagaaataatctgttgatttttcaagccttaggaatacatggtctaacttatgatcctagaataattttaatgagtaaaatgacagtgtgaatgtttgagaagtaatttttccaaatgccataaaaacttttattggttcattattccagtttaatgtgctatcattcaaattttcaaaactcacagactaaattgcatatatgcatctaggttggcaagaaagccagcggttggcctaaggctgaaataaaatttatggtttcttataaaatgtgaaagactcctaaggtatctttgaaagaaaataagtgaaggcagacataaatttaagttttatgtacacggaacaaatcagtatcaacaaatgaagcaaaatgttaagtactatcatagtttgtaaggagaaacatcagtacacattgggtaatcaacaatggagacagtgaatgcaaatgtaaatatacatgagtggaaaaattatggggatttggttttcataatctgatgacatttcaataaagcttctatagaaactatgtatttaatagcatatataaatcaatggtgaatgttcccataatatgaaagtattactatattcagtgatacagtttacacttattacagtaagaaatatgtttccttggctgggtgcggtggctcacgtctataatgccagcactttgggaggccgaggcgggcagatcatctgaggtcaggagttcgagaccagcctggccaacatggcgaaaccccatctctactgaaaatacaaaatcagttgggcatggtggtgcatgcytgtagtcccagatactcaggggactgaggcaggagaatcccttgaacccgggaggtggaggttgcagtgagctgagatcacgccattgcactccagcctgggcgacagagcaagaccccgtctcaaaaaaataaaaaaagaaatatgtttccttttattttgtgccccaggagaatgatcttcatgtaataagcaggattatacatactctgtaataagtataaactatatccctgtaagatctttcgtatgtctcagggatggcaaggatattcttgttattgccattaataacttcatgtgccagccgaggaaaagctgacatggtggagttttgatcctctcaccttcttgacagtcggtgcagctagtccactttcagayatttagccaaatgagataaacatacatccatgcaaatacttgtacaacaatgttcagagtatgtacttgtttttaacaatcatgcactggacaccacccaagtcaacagcaggtggttaaacaaagtatgctatatccatataaatggaatcctttccagcaataaaaaggaataaagtattacatacaaatgaatgcatctcaaaataattctgatgactaaaaagatccatagaaaatacatcctgtataatttgatttatgtaaactctacaaaatgcaaactcattgatagtaaaagaaagcagatcattggctaactggagaagsggggaaggagtgagtgtgagggattaaaaagaggggatgaatatattcattatcttgattgctgtcaaggcttatcacattctataatatatatggtttattgttgatacctcaattaagcttttgaaaaaagtagtagtataagcatattacgtagagatttgaaatggttttattttaatatttgaaataaaaaagggttaaatgtggtagaggtgaagggatgtgaacctgggggaggggagtaggctgcggtcagggattgataggttcagaaaagccattttctatactttacctgttaactgtgtgcgtgaatctcattgatactttagaaaataattattgatttgagaagagattttcaaatctgacaatggaaaattgatgatatggattttccactataaactgaatacaagttttttggtttgtttggtttggttttgtttttttgagatggagtctcactctgtcgygcaggctggagtgcagtggtccgatctcagtcactgcaacctccgcctcctggggttcaagcgattctcatgcctcagcctcccgagtagctgggataacaggcaggtgccaccacgcctggctaatttttttgtatttttattagagacggggtttcaccacgatggccagactggtttcaaactcctgacctcaggtgatctgcctgcctcggcctcccaaagtgctggaattacaggcgtgagccacagccccggccctgaatacaagttctgacttggttttccaatattttaatacgtttcagcagattcactccaacccactttctttaatgacaaatgccacttatcactgagtgattgactagagttagagaggtgagatctatggttaaaaaaccatagagtaaaattaataggttgaattaattattttagaatagtaaaacttaaattgttatgaaaagtgctaacatcagcacagcagtctgaaatcattttttagcccacttatcatctgcactccagaatgttctcccttctttccagaaaatatgatgttagcccaggtgtctcctaatgggagactaagaattttaaggatatttgtggattaagatgaatctctacatttcctgagccccgtctcccattactaatactcttggctggatcttagtttaccttgggatctaggtctggattctgagtaaaattattgtctatgtgaaatcaccttaaactgtctcctctgtcttggtcagcttaagtcctatcctggctcgctcaatctggttgattggttgattctggctttccctgcattagctctgggtaaacttggtgtttgtactacgtaggtcactagaagcatttcaattttgtctaatatacccagtgtactggtgctgatacatgcttttgataacctcctgtattagtcaggggtctctggagggacagaactaatggaatatatatatatatatatagttttacatatatatttatagttatatatatatatagttttacatatatatttatagttatatatatatatacatatatatatacatatatatacatatatatgtatgtgtatatatatatatatatatatatatatatatatatatatgagcaaggagagccagtctgagttccaaaactgaagaacttagagtccgatgttgttctagagcaagaagcatccagcatgggagaaagacgtaggctgggaggctaggccagtctctctgttcacatttttctgcctgcttatattctagccgtgctggcagctgattaacccgtgccactcaggttaaggatgggtctgcctctcccagcccactgattcaaatgttaatctcctttagcaacagacacacccaggatcaatactttacatccttcaatccaattagcactcagtattaaacatcacacctcccaacatttctggtttctttggttttactaaaacatcattcttgtcaatttgttgcagtatcaagtgttgataagtttcaaatcaatcaaattctgcacataaataagaaggccaagtgtgatacagagaagggtccttttatatatctgcaagatcctagtcaattaattacctcttttttcctgtaagttatgaatatgaaagaaatgtaaaacaggggatggacattctgagcggaatcactttcacacactaagctagaattwaaaaatccagaacacttcttactgagcatctcctatgtctatgacactgtgcaaagcaccgaggggaggggagaccaagacactggctatttatgcttcattctttgtatgtaaaagttatatttgatgactgcctaaaacgtcttcatatttactcctaataatgacagaagataattttgtgtgaatgtgtgtaccatctagtgaaatcatcagcaaatataacatttccttaagaaatttcaatgggaaataaaccataaacagaggcatccatcattaccgtttaaagttactagtatttaccttatacaactgttactgttctgtctataatcactacatcatataaaattctaaactatatttaaataccgtgttatattcaaaaaatttttgtgctcaagtgaaaatatttaacactgtgtcattttactcaattttaaaacaatgttacagttttatcatgcaaaataaccttaaaatataaattgcaggacacagaaaatttggtaaaggatttactgcttatctctgggactatttattcatagctactttaatttagaatagacaacctgtgaaatatatttctctgtagattttcttctaagcaaaaaccacaaaagtaaggtagttagccatgatctatcttgtatttattattttatttggcatttattacataatttttttatagtattactttctctaatctatgtcacatcaatggctaacttgaactggtttaggaagataattctaaaatataaattattatttatacaacataattattatgtatgatattatcagtttacacttttttcccaaaatgacagtaactttgaaaaagaagcaaattcatgaataayaatatcttaaatttgtgtttaggctatgattcttccatatacacaaaaaacttaaaaataaatctctccctaagcagaacacttcttcactaccacagactaactaattacctcacacaggcttgaaagtttcagttgttggacctcaagtattaaatctcaatgtctcttgtcttattttctaggtactacaaaatcagcagtcatcctagttattaaaccttgatgtgcttttcaccaatataagaccactgtctggtcaagtatgtgtcctcacaactccctcaatgtcgcatasagatttttattttatttttatttttattttaaagttccaggatacatgtgcagaacaagcaggtttgttatataggtatatgtgtgtcatggtgatttgctgcacctatcaatcaaaatctagattttaagccccgtatgcattagctatttgtcctgatgctctccctcccctcaccccacatcccccgaaaggcccctgtgtgtgttgttcccctccctgtgtccacgtgttctcattgttcaactcccacttatgagtgagaacatgcagtgtttggttttccgtgtctgtgttggtttgctgaggatgatggcttccagcttcatctgtgtccttgcaaaggatacaatctcattcctttttatggctattcagtagtgtatatatggcacatggatttttaagtcaattcttactaaggaagcagaagcaaaatgatatatatcttcctgaatctttttaaaaaatttcattttaaggccattaaatatgaaagttatccattgaatgtataaatatatattttccaggaaataaataacatagaaaaagtctagaatgctgggcccaaaaggaagtataaataaatattgttacctattgtcaggtcattttcagagctcctgaaacatgaatttgctaggttctgtgatatggttaaaaaaagacgaaaaaatacattttgatgacattttctccattgttttctgattattgtttataacttgttttcttttgcattttctacttactgatcaaaatcacaaaagccataaacattacatgatatcatttgatttttagcagtgagtcatgtttttaaaatctttaaacaattttttatggattactaaatagggatatagaaaataaacagaagggaataccaaaacttatgtacctatttcaaatatgcctaagactgaccaaattcttactatacacaacttatatttatgaaatatatatatataaagagatggggtctcgctgtgtcactgaggctggagtgcagtgatgatcacagctcactgcagccttggtctcctgtgctcaagcaatcctccaacctcggcctcccaagaagctgggattacagttatgtgccacaatgcctggcttatttaaaaaatgttttagacgggggtctggctatgtttcccaggctggttttgaactgtagcctcaagcaatcctcccacctcagcctcccaaagtgctgggattataggcgtgagccaccacacccagccaggaataatatstttatatagatgtctctgatatctttcccactgaaacaaatgatctgcatttaatgatccagaataactacagacaaaaaaagtctttttttcaagttttcataggaacatttctagaaaatgatcctattctagaccaaaactctaataaacttcaagcagcttagactgtagaaactaaataaccatcaagcaacaattgtattttttaaaatcataatcaaaccataatcagaaagccccaaccaataggaaaaataattcctcataagtaacaaccatataaaagagggaagcaaaaatacaattacatatcttttaaataacaagaacaataatttctattacaaacaaaagtatttcaaaagacaaatgtctagaataggcaaatttctagagacaatagcttaacaatttcctagagctgggaccaataagccatttggtggatgataattaagggttttttttccttagcatgaggaaaatgtttcaaaattgattgtggtgatatacgtgcaactctgagaatatactaaaagccactgtatgttacactgtaactgagtgaattatatgtatatgaattacatctcaataaaactgttaaaaagaggcattaaataaataattcaaaaactcagtaaaaaagtttaataatggaaagcaaaagaaaaaaatatgtgagagtagaaataagaaatccattatcaaaactggaagaattggtatgtcagttcgagagatagcatacaaagaaaaccaaagcataaataaatccaatcaaggaaaaaacattaataaattagcaatgagaatatattggtcatactaaaatgtaaaatatagtatgatatatgtatgatatgactccaattctacaaacaaaaaaggcatgtagagatgtgggaataattcaagagtgattaacactaaaaaatgagatttgagatttatcttttctcttttatgtattttcttaagactctacataagaatttttctcttttacaatgaaaataattgtttaaaattacccaaaatagtaaaagaaaaacatgaactcaaataactcaatagcaaaagaacaaattttttaaagtgggcaaagggactgaatagacatttgtcaaaataagacattcagatgcccagcagatatatgaaaaaatgctcagtaccactaatcatcagggcactgtaatttaaaagcataatgagatattcacacttgttagaaccgttatcatcaaaaagacaaaagataactagtgtttgtggggatgtggaaaaatgggaacccttgcacactgttggcaggaatgcaaaatggtgcagctgctataaaaaacagtacggaggtccctcaaaaaattaaaatttaaactaccatataatccagcaattccacttttcttctttgaacctgtattcaaagaagatattctttgaatatcttctttctattctctttgaatcagtattcaaagagatagcttcactctcatgtttattacagcattattcacaagagccaaggtatggaaacaacctaagcatccaccaatggatgaatagttaaagaaagtgtagcatatatagacaatggaatactattcagccttaaaaagagaaggattaaaactactacaagagtattgtaacacaaagagtaagtgcttgagggaatgagaaaaaaaaagaaatcctgtcatttatgacactatgatgaacctggagaatatttatgcatgtgaaataagccagacacagaaagacaaataccacacaatctcacttacatgttgtattagtccattctcctattggtaataaagacatacctgagactgggtaatttataaagaaaaagaagtttaatagactcacagttccacgtgactgaagaagcctcgcaatcatggtggaaggcgaaaggtatgtcttacatggtggcaacaaagagagaatgagagccaaatgaaaggggaaaccccttataaaaccatcagatattgtgagacttattcactaccacragaatagtatgagggaaaccactccccatgattcaattatgtcctgctgggtccctcccacaacatgtgagaattatggaagctaaaattcaagatgagattcgggtgaggacacagccaaaccatatcatacgtggaatctagaaaagccagactcacagaagcaaagagtagaagggtacttaccagaagctgggagatgagggagttgggatgatgttggtgataggacataaaattttagttaaataggagaaatagattcaagagatctattgtacaacatggtgactatagttaatcacaatgaattgcattcttgaaaatcactgagagtagatttaactgttctcactgcaaaaaaattatgagtatgtaaaaaaatcattaaaatctaataaatattttttgtagaatgcaaatgtggtacacacatttagttttctttccaaaggaaggtttttgatttcttttagtttatagaaatattgtttcattctggcagccaagaactccaagagatggtccttcttccagtcttgacagatgagccaaacacagcaatcccatctcttacctgatactgactgtttgtgttccccaaaattaatgtgttgaagctctaatccctaatgtgaagtattttaagatggggctttgggggtagtaattagggttagaataggtcttgagaatggggcctttaggccaggattagtggctcwacaagaaagagagagagagagagagagagatgctctcctcacaaacatgtatggaggaaagccatgtgaggacacagcaagaaggtggctatctgcaagcacggaagagagccctcaccaagagccaaaatggtggcaccttgaccttgaacttcccagtctccagaaccatgagaaataaatgtttaagccacccagtctatggtattgtgttatgacagmcccagcctactaagacactaccctagcaataatacctgatcttgaagacactaactaccctagcaataacacacagttttgaaaagactaccctagcaatagtacctcatcttggaatgatatgacaaaagcaccttgtggtggatcactaggaaggactttgctgcctggtaaatcagagacaccaataatttatgcttgtttttttaagctaaatacatcatgattaaataatgtaaaagaatataaggataattcagcattagaatatatgtattcacataattaacgttaacagactgaagaggaacaaatcttataatcatcacaacagatgcagcaagtgtctgataaaattcaatactacttccaattaagaaaaacacccttagcaaattaagaatataaaaaattgaaatggctgggcgtggtggctcatgcatgtaatcccagaactttgggaggctgaggagggcagatcatgaggtcaggagatcaagaccatcctggctaacatggtgaaacccccgtttctactaaaaatacaaaaattagctgggcgtggtggcgcgggcctgtagtcccagctactttggaggctgaggcaggagaatcacttgaacccagggggcagaggttgcagtgagctgagattatgccactgcactccagcctgggtggctgagcgagtccatctcaaaaaaaaaaaaagtggctcatgcctgtaatcccagcactttgggaggccaaaggcaggtggatcgcgaggtcaggagatcaagaccatcctggctaacacaggggtgttactaaattttttgtactaaaaatacaaaaaattagctgggggtggtggtgggcgcctgtagtcccagctattcaggaggctgaggcaggagaatggcgtgaacccggaaggtggagcttgcagtgagctgagatcaygccactgcactccagcctgggtgacagagcaagactccgtctcaaaaaaaaaaaagatgattgatattgtcccacaaattgcaccttgaataaaattctagttaaaatctccaaggaaattttcatgaaacttgaccgcttattctaaaattcctatagatagtaagaaagcaacgacgtcaactaggatataaacaaattgggggaactcatctcgctaaatacaaaatttgtaaagctacaacaataaaggcagtgtgatactggttcagasacagacaaagagactaatgggacataatacagagtactcagttagtattcatagatggtactgtcttggtggctctccatatggaaaagatcaaaagaaagccttacctcccatcttaaaagtaaatttgcagttaaataattaacaatgtatgtgtgaacattataagaataaaacacatagaagaaaccttacaatattaggatcaaaaaaattcttttgaaactaggcaatttttttttttttttttttttttaaagatggagcctcactctgttgccaggctggagtgcagtggcactatctcagctcactgcaatctctggytcccgggttcaagtgagtcccctgcctcagcctcctgagtagctgggactacagacacctgccaccacatgcagctaattttttgtattttagtagagatggagtttcaccatgttagccgggatggtctcaatctcctgacctcgtgattcacctgcrtcagcctcccaaagtgctgggattacaggcgtgagcaaccacgcctggccgacaaaaattttttaaaaacaccaaaaccataaaggaagaatgtgataagtataaatacctaaagttaaatttaaaatttatgtattaaaaagatgtaaaaataagtataaagacaagtcgctaactgcaagaaaatatgtacataccatatccagaacatatccatatctagagtatgttaagtacagctatatgtcaataacaaaaggactgacaatgtaacagaaaaaatgggcaaaggctatgaatatgcacactaaagaggaaraaatctacatgataaaactcctataaaaaggaaacatgaccactagtaatcagagaaatgcaaaattaaaacaagatattatttcatatacttcagattggtacaattttagtctgataccaacaatttatgatcttggaaacaagcatttggaaaaaagaattctcattagctgttggtcacaatataaatatttatatactactttgaagagaaatttgacaaactctattaaagttgaagttatacctcatctttcagcaattccaaatctggtgaactttggccttcatgcacaaggaatcctacaataggatgttatgatactgcaatgtagaaacctaacggaccctcagtatgagaatgaactaaaaagctggtttattcacacaatggaatatgacatagcaggtaaacaaatttgctattaacaggacatgcattcctggagaaccaccatttaacaaaatggctaactagaaatatcaaagtgtatggggaaacctatggggaaaataatgtttacaaagctctatacatacatgcaactttgtaaccagagcatttaataatcattctaattaaaatgaactaccacagttaaaatattacattccttacctttaaaaatgaaatattggagtaaatacagtatagtgctatgccttttgaaaaaatgatagggacattgtaaggatctacaaagattgggcttgcctcacattagatgcttccaagagcaagtgcacaaacagaactaggaagaagaacccatagcaaacaggtataatctatgacactattactctgtgtcactctgcatttagctgtgttagtataatttgtacccagttgctgttactttgtgacacaaaatactaacaagatggggaaagtcacatctgaacgtcttacgtacactgatagcattctgctattaatgaactgaatatgacctgaaggcattacagaaayctgcactgtaaccaaatagctcagatgaaaaagtaacctgaagaacagttcttgaatttctattatctctatatctctgcatctatctctgtatccatctatctataggatatacgaatacatatatattcattatgcatatttaggaataatgtatacaaacttcaggatcctgcttgcctctaggaatgaaaggacagagtacaaattaagctgtggctctcttagtgaggttattgttttacttataagaatataatgttacaattaaaaatattgtttattaaatctagatggtgaataaatgcctctttttctatttctatatttatttgtagatttaaatttttcaaaatgtagaagaacatgattaaaataaaatacatgcaattcagtgaaaacattggttagtgagatggcttggtataaaataaatataaaaatatttattaggaaaatrtatacctataagcatggaatgataaattatattactataagtgaagactgttatacaatgatcattatttgctagtgagttatatgatcatttccaactcaaaatgatgttcgactttacatcttattaaaaggtcatttggaagattaaaccggtaaaatgttaaaatttaaaataaacattctgggaattaacaggataaattagccccaccaatttctaaaacatattaccaagttgtggtttaattaccacaataattaaaactgtggacattcgttaaaaattcctctcaaatatctctattatgtagaattatgaaacacacaaaaagaaaaagaacacacaaagcaatggggaataaaatattacataataaatgtctttgggaaaattgagtagccatctagaaaatagttttctgagatcttccccatcatactatgtacccagatgttctcaacccctaattaaagactaattaaatcaaccccagaacacttagaagaattaaatgggaatctttcaagtgattacaatttgcaatctgagaactacagccttagatgtttgcaaccccctcatttgtatcatgaataggtttcagaggtgctgagatcctgaccctcaacactggcagatgaggaggtagacagcaggcaaggtccgggaagtcaaaagccccttaggcaggccacaggaggagctagaataggcacattcaagcacagcaggtggcagtattaataaaaccttgattggggttttaagattgataagctctctgacccagtacatctacttcagaaattgtatttcaaggaaatactgtaaaatacagaaaaaactttttatagaaagatactaatttcaaccctatgtatacactaatagtaaatacttgaaaacaacctaagtgaaagacaaagtaaattatgacaaattcaaagcatagaattttatgaagccttttaaatgcttatgagctttcaacaacatgtaaaatattagcatattagaaggaatccataaaattccatataaggtattataattatgtacattgcaatctatacaaacatacaggtaggtatatacactctatatgctctcaaaatatataaaatatatatgcaatctaaataatttttaacatgtatataatgaatagaacttacaacataattatttatggcaaaaaaaaaaaggcagaaaataagattgaaaaccacagtagctgggagcctggtctctctcagcctttgcacactcccctaggtccttctcaactgttatatttcaccaaacatgattcccttcaggaaactttcctggactcagaccctctcaggtcgttcagctctgtgctcttatcatattacacattttctccctgccaactacaaaaacgcagctatcttgctcccatcatgaaatgaactgagaacaataactaaaatatatacaatctacacatttctgtgagcactgtaaattccatttccagatcaaattggaccaccgaaagtctacgtacatgtactacaacaatttaatatcaggcaaaatccaatttgccaagatacattttaataacgtgtacttagctctcactgaaatcttttgtggatgatattttcactgcatttcttgcaaaagataaaaatgtagatatggtatgttgcatgtatttaaaatgtgacatgaccaatttctcagagagttcagtgtagagaaagcttcagttccctatagggattgatgggcttctccttttgtgataatgagatgtgtataatgttctcctttcagcaacagatgccaagaagctcagaattaaatttgaacatccattgataaatatactgactcttatgaatgacaaaattgatgcttcttttcttgagcccaagctttctactttaattacactttattttattatttctctgttgtttattctatttcatttccaatcgctccaatttattttccaagtcatgtgtcttaatgtatatgtatttcactgtgagctagttgaaactggttgaggaaacattatgaagaaatacacaagtatgtttgaggtaaacatttttcttcacaaagtatgtaactttaaaaagagcaataaaagccattattgagaatggaaaggaaactcacagagtgggtaactgtagttgcaatacatacaatactagacaagtgcctcatatcatttagaatatagatggaaaaaagtactacaaataaataaaaaaccaaatcaagccaagagaaaaacagtcaaaagtcttaaaaagacacttcaataaagagtatatccaaatggacagtaaatatatgaagaagttgttaacttcattagtcacaataaaattaatattcaaatgacaaggatataacattacatacctactggaatacttaaaatgcaaaataaagaaaatattaattattggtgagactgtagcacaaacagcactctcatatagcactggaaagagtttaaatttgaaaaatcagttgggaaaacagctttagtttagttactaaagccaaacaagcatgacttagggtccagcaattccactcccagaaatatgtccttggtcatgcgtagatactttctccaaaaaaagtgtaaaaattttcctagcagtgctatttgtaacagttctaaattggaggtcacacaaatacccatcgaggaagcgatggataaataaattatggtatatccaagaaaatactagacagggataaacatgaaggatttacttacaactatagttgtatgcaataatgtgggtgaatctcacaaacagaatgttgatgaaagaaactggacacaaaacaattacatactttatgattccatgtatagaagtacaaaaacaggtgaaactagtctgttggccaaagtcagaagaaggttagcatgtgggaatgttgggtagtgactacaaagagacagatggggttctgtggtgttgacaatgtttctggatttgggtgttggttgtatcagtgtgtttggtttgatattcaccaagtgattcacttacaatatgtgagagaactgttgtaagaaaaacctagaaatctaggttccagtccttgctctatcctttaataagtatctctaaacaaccacaaaatagtaaattgtttgagatttatacattaagtggaaaaacacagtctactctgccttttcataagattggttggaaaagccaaatggaatgaagatcactagccctattatatatgaaagaataaatatatgacattaagtaatcaattattaataaagttacttgaaataataaaaacatagcactgatatattatttaaattggataggaattcctaaatttgataggaagatgtttgatataatttaatttaagtatataaagggtaatgtaacaattctctggccatttagggaaaataagtcaaaatttataccttccaaaatcaaaatgacttaaggtgaagcaaactttcaaaataaaaaattaaaagtaaaacagaatccaggaaaaaaagactgaattttttctcatcatcttagacaggaaaaagcttttctaagccaaaccactttaacttttttcaatgaacatgtgtaacttttatgatactgcataaaacagctgcaaattattctcatttctagatttaatatctatataacatcattggcattttctttggagccactgatttgaagatgattgtctaattatagtataaaatatagtctttcattaattcaactgatcaaaataagataaatggcagctactatgtgccataaatttttcttgaggtgaggatgcagcaatgggtgaaataaacaaattcctgcccttctggggcttactctctggtagaagaaaaacacaggctcaactaaattaatattagagggaaaaatataaaacagggaagggagatgggagtgctggagcagggatggaagggattgttaagggtctgaagtttaaaatagagtggtcaggaagaggctcactaaatagctaatttttaaacagaaatttgaagcatcaagagatgaggacacacagggtaaaatgcatttcaggcagaggaaacaggaagggcaaaggcgtggcactaactgagttccggaggcagggccagcagagttgcataaagcagcaagggtgggcagatcacacagggccttcccaatagaggaagcttagcttttactctgagtgaggcagggagccacctgaggggttgaggtgacgaatgccatgattcggccttctcaagttttaaagggagcttctgggctccacaattagagaggatggcttaaaaaaattcaaaatagagacaaataacaattataataagaaagtaggagaatatgagataagaagaaagggtagaattgctttccttcattcatcaaatatttattgaatacactgttaggttctggttaagattaaaaagtgacttagatgtggatactgccctcacggagaatttacataaggagataaaacatgagcagaaatgaccataatacaaagtagaacacaatgaataaaggataactttctatgtgggtgacaggaagggagaattaaagaagtcttcttaaagcagttggcattttgctggccacaaaaatataagcttcttgacagcatgtgttctgtcttttgctgactgctaaattcctagcatttaaaacagtgctttgcacatagtctgtgatcaatagatatgtgttacctgatgatagaatgaatttgtatatgcagatatgtagggagaagggtgttcgagcaaagggaacaacataaacagaaacacaaaaataaagaatatgagtttatttccttggttcagattgactgaagcaaatgagaacagtgggagatgaaattttagaacacagaatgggattagatcacacaagaccttgctggccctggggaagtatcttgactttttttctataagaattgggaagctccaaaagctctgaatagtgataggagcagaacattgtaccagaaagattagtgtaattgtactgataattgattgagggagtcaaccaattgataggtggatgatattgtacaagcctagacaaaaggtgatgagggcacccattagttcatcgccacttggtcccttcatcattagtacttctctgccagagacatctgtttatttgtattgtaattattttacttgtctctctccttttcttcactaataatgtagcacatttagcactggagctagacacttctaattatcccccaatattccttggctacagtaataaaacattgtgagtttgagccggacacagagctaccagttaaagactacatgtcccagcctctcttgcaactagctgtggccataagactaggttttggcaatggatttgagcaggagtgaggattgctgtttctgggacatgccctcatagtgaagctgtttgctcttcatttcttcctgcctcattcttgcagattgctccatacccatttttctctcctccacctgaagtaggtgttggagatgatgcccttttggaactacatagcttccttcatccttttcctgaggagacaggtacgtgggcttgggagttgcttcatgggtcaagctttcataggcttttgcaaaaagggaaaatgtaggtgtatttattactaggttctggccagttggatgagaatgaaagtggggtgctgtgtctgggtcatgcacataatgggaagctctctgcttccactttcctccttcttgagggcaggtatttgaccctggtggtctcgagccccccttgtctcaggtgtcattttacaggatgcaaagaacaaacatgctcctatgcccctgcacctgcctcatggggaatgctgcccaacctcctgggattgcctacaaaattgaacttctattatgagagaaacaacttccatcttaattaagctattgttatttggtcagtgttacagaagccaaattaatattttaatatataatttataaatattgatgattaccactacgtgttaaatgagcacatgattggtaaatataaaacacactatacatgtaaagtataggttgaactatcccttatctgaaatgcttgggaccagaagtgttttggatttgtttttgttttttgttcaaatttggaatacagtcatccctcagtctccatgaggaattgtttccaggacctcctgcagataccaaaatctgcagatgctcaagtccctgatataacatggcgtagtatttgtatgtaacctacacatttctacctatatactttaaatcatgtctatattacttataatatctaaaacaatataaatgctccataaatagttgctatgctctattgtttagggaataatgactcaaaaaaaaaagtctgtacatgttcaatacagataaaatttttatcccaaacatttcaatccaaggttagttgaatccatggaggcagaatctgtacaaagagctgactatatctgtattatatactgatggtcacgccagttctgaaaatctgaaatccaaaatgctcaaaagagttttctttgagtgtaatgtcaacactcaaaaagttttgtattttggaccacttcaggtttcagacttttggaataggaatactcaacctttaatattaaaaaaattatttattccattcccctaaactttgagcataaagcatctatagtcttttgagaaggaaagctgtaatagaaagcttaggctgaactcaacttctctgtcaccataaccctgggtcgattttctaacttgcttcgtgataagcttgttcagcacagaaagtatctgacaagataaagacaacaaaatactgggttactagtttctggtcatgggctctatcacaccccaaacaagacttttaaaggaaaatgaactatgaaatcttcaagttgtgtatctcatatctctttataggcaagcactataaaaatgtgaatttgaatattatttcrttgcagggcttttgtgatgcttgttttcttatagaatgcaacaaaaatttcatggaaagaaagtctagtttctattgaagaaaaatatttgacattgagattttaaaaattttgccatttacatttatcattattttttcaataatcttgcactctcatatccagattgtttaaataagcatttctgcttgcacagcccatttgatgaaacatatttattatcaagtttatgtacttgtatcactatcgcactcagagaaatatcaggagtctctgtataactccttatgatatatacagttcttcatgttttaggtggaagagcattggaatgttgacttatctaactggaaaagtggtttggagggtgttggctcttggagcatgaggttgcaattaagaaaagctggaaattggcatacacrtcctgaatcaaaatacaccttcagaaagagatgaggacattttcaccttataatgctgagaagtctatactgctaaagataaaaatggtgaaatgtaaatattggttatgaaattgaaaatttttatttcctgtaccactgaagttattttgtataaacggtattgtccagccttcttttatcaagatttgaatgttgttattttggttttcctcggagtactaagggcagggactttgctttgctgatcccaaatccccagaactgtgcttagcaaacactgggtattaaaaaaaaaaaaagagagagacagttgttgactgaataaatagatgaatggataaataatgtttgcatttaagaattacgatttccaatggcaagagaggtattgctagtacaagattttcctttagaacataaaaagagaagataatggatctcaattaagttgtttataaagaagcctgcttcataatcaatgttttttttaagtcatgtaggcatacttattacatttggcaatacagaaacatcagattttgcagaactatctctttaggtgtaagattatattaaagaattaatatgatacaagaattatgaatacaggtttaggaaaaaacagaaaagaaccccaaccagtaaaaaaaaaattaaagtataacattaaaaaacatcaaaattgtaaatattgtgtagaagaaaaactaaatgattaacctgaatggttatggtattgctgataaatgcatcatcttgactcctaggagaaccaatttatgtgaaattccatgaaaaagaattagttacaacaagcagaattttagtccatttccaagaattttaactactgtaaatcacctgacacacttcccaataattaggatatcgttttgcatagccacatgggaacctggcctagaggtctataggtaatctgtttcattcatgtattttaagtatgtcgtttaggaataagttatcaggtttgcaacctataagcaaaggaaataatgtgacactggaaaacaacactattcatttaacataatgaattgccatgtaataactcagatcttcccagggkgtaaattacacaaatttgaaagatgcatttattatttaatgcctcattcccagacagttgcttactcagtagcaaaatctgtcttagcataccaagtgtaaagctatttaacaaataggaaggtttaaaaaatatatactatcatgcagacagctaaaatatttgtatatatttttaatcttttttctctaatgatacttagaatattttatttttattactacaaataatagagatgaaatatgaattgtattagtagcagagatatatgagctaaagcttgtattgtttaaagcacatcatcttaaaaggcctgtcaggaaacagtgttcatattaagttggctttcagtactctaagaagatgacatcattttgtaagagacaagtgttgttagagcaaatgctaggatattctaaaatttcctaggttgaagtgaagaaatttctcattatagattatttcatgagtttatgttcccggttgtatatcagctcatgttaaattttgcaagagtttatgatttctaagaactcaccttctataaggccctttgctgagtggggctagttaggaattagtaagtaaaggggatcttttttcctcgtgtaaatagcttaagagtaattttgggcggtccagaaaccataagttatcaggaaggtgcttataaatgggcagagtacatcacttgcccaagattctaacaacctagcctgccccccacacactgtggggcaccgtttgctacttgccaagtaactgccttttttggcaaagaccacccaggacatggctcagagtccatcctarggctggccaacctctgtaaatctcgtgtcccctgattcagagcgagtgcatttaattcaggaagatcacttacgactgagtttttcatcatggctttgactgtgaaaccctcagaaaccagagagtgaggctggtgcaccgggagcggctgttgtgccagcagcttggtcctcttcggcatcttgtctgggcatttgtttaagctcagggtctctttttctgccaccatcttcctagaaaatgtcttgttctcataaaaagtgtagtaaaagaatcagtgggctttacggatgtgagcaggaggtctggaaaaaaatatcaaaaggcgcgataatggtagaaattcaacccctcgtagtgcccaggttgatccagatgtttggcagctcctaggtgaagggagctggaccctaggggcggggcgggaagagggcaggacctkggctagagctgcaacaagcttccaaaggtarrcctcccggttgctaagcgactggtcaacacggcgggcgcatagccccgccccccggtgacgtaagattgctgggcctgaagccggaaagggcggcggtggggggctgggggcaggaggcgtgaggagaaactacgcgttagaactacgactcccagcaggccctgggccgcgccctccgcgcgtgcgcattcctagggccgggcgcgggggcggggaggcctggaggatttaacccaggagagccgctggtgggaggcgcggctggcgccgctgcgcgcatgggcctgttcctggcccgcagccgccacctacccagtgaccatgataggtacgtgggtacctgccaggtacagcctctctgcgccgccccacgccccggtatggcgccacgccccgcctcggccgaccaggacccccggtgccaactgtcaatgacggggccaaagtgcccgtgccgtccccggcccgcgccgccgggctccccagctcagcgacgcgggtccggggccccagtgtgtgcgttcgaagccctcgcctgcccgcccctgctctgagcgttctcatgaagaccgcctcgacggggacgccaggcggccccgcacccccgctcctcgttcgcggtcccccggaccgtgtggggtcccgaagccttctccccgccgccgcccctcaccttcgccccgccgccgcccctcaccttcgcccctcacctcactggccggttgtggtgcggttcaggacccatcgagacccactctctgtggggctctttcaggaaaccgcagcaaagcattaaactctaatggaaggcacctggtgagggtggctggctccacagaaactcctccagatagatctaaacttgctccctcggatgtttccttttaaacttctcattggagggctgagatgaaagaaacattaagagtaaatagtagccaagattaaatctattgccttttgcaaaataacctttcttttttttttttgtaaaagaacgaccgaggtgcaagtttgtgaacgaaacttagtggcatcagagttgttcatgaacacttgatgtgtaagatgagcaaaggtcctctcttccagggttgttgagccaaaagttactttaggggctatccctgaaaattaatggaaatgcaccatatgtttgaaaaacagtgctagatggggtttcattattgtggaggtttctccaggttatgtatggagggtttagtgagcttgtttattcctgaggagggtcctttacaaaacacttttgattgcagtaagtacgttcgaagtcagatgtggtctgtccagaagaaagatgagaggtggatttataaagtatatgatctttatgcactgaaaacacttcttacatctgtttatttgtgaagttattgttaaaatgtaaacattctccccatcagtgggagaatcaagccagctaactggcatggtctttgtggtaaaacaagaatgttgtccaacttttcttccctttctagcatggtctgacttttggtgaatgacttgaaagttaatcaaattacgaaaaaaatattttttatgagtcttcttgagctctttttaggtgacatttacgtaagattcacttgcaagcacaagtttgaactgaatcagaaaaccaagtagaagagattttccaatatctgtgctgtcagtctacaggaagaaaatagcctataccttattttgaagacagttaaatacattttattttaatttaacttaatctagtgcacagataattttaagagaaacaaatttattgtaaagctatataaagacaagcacttaagatctaaagaacattactcagttataagttatgacctaataagtgattatataaataactttattaggatgaaatgtgtttggacagttctgtttagttttatctggaattcttccaataaggaagaaatatctttggagttgatgattaaacagttatcaattactggtaatgacatggagaatataaggttggtttttaaaagtgttatttctctcactccagccatggttttacatagtgcaaataagtgtgcagtacaacataaatgattaaatccatgcctgctttccctaggaaatgtgccttacatataagatcatggacaatgtgcaataaaatattcaactagttgcattgcctaattctgaaattagacacacgtcttttttttttttttttcctctttttgagacaggttctgtctctgtcacccaggccggagtgcagtggcaccatcacagctcactgcagcctccaactcctgggctcaagtgatcctcccatctcagcctcctgagtagctgtgactacaggtgtgtgccaccatgcctgccaattttttgttatagtttttgtagagatggagtttcataatgttgcccaggctggtctcaaactcctgggctcaagcaatcctcccgcattcgcctctgaaagtgctgggattacaggcatgaaccaccacgcccagcctcattagccacatttcagtaaacatctgaatggtcagtttgggatttgggtgtcgtgaacagtgctaaaggtaggtgaaagtgaaaaccattaaaaggaagccttggagtgatgggttttgtgtttttgtgacaaaaattcagagccaggaaagacattatagactttatccagtgatcactaaaatgtaaatagtatgtatctgggattttctgttaaaggtaagagtgcttctcaaagcttgctcctttcaggcctatgctttctctaactattacactcaccttgttgcgggattcgggagtatgagggagacctcaggttgaagcaggagaatctttattgagtgtactcaggcccagctgactcacatccaaaagactgggcccagaataaagacagtacttgacttttatacacacttcacaaacggaggtgggctagcttgaagcaagcttacagtggcgtgaaagcagggatacagaggcaggacaaagacaggattgcagatgaccattgccaagcaacccagatgttcgttttctaggtttgcctgggcacaggcttatcctataaccttctctgtggtgcccaggcagctgtagttcaggcctactcaggctttttatgaccttcgttgtactacttagataaaacagaatacttgaaatcactagttacagagaacaagagtctataaactcattctgtaaaacaaaggaaaatttgtttttcttctccctgtgttgagggagtgctgagagagtctccagagcatattagataatattatcaagacttttcctgggtctaggctgtgcctgttgctgcttctggaacaagttagcctaaaacaggaaaacttatttctctttctttttaattttattgttctttaatttcccgcctcaaccttactgcgaataatattctgccactttatttaaatcctggcttagtttaaggagaaacgtaaagatgggtttcctggtagaataggagtaaacaggactgactgtgacctcactgctaatgacatgtaccttccttttactttctcaaaaccgaagattcccttattggcatgaggactgtttcaaaagtacttacatttcccacctgcattgtgattgatgtgttgaatgccctgacccaggcagctacagaaacataatttaattgaagtcggttaaaaattgtgcctttgtggaaagtgtggagaaggacttcaagatgatataaagcagaatagaaaagcttaaaagaattcaatttagaaaaatgtaatttttggtacctctattaaaaatatattttgacttttttaaaaatgagcaattctttgtgtttaaaatggaatgttagtggggatatttgtggtatgttctaaatgttctgtagaactggatttaggtatttgagtaacagcagatattagagtgcatggttatatatacaacaatgttgtcagtattgaaatacacattcagtgtcttagacttttaagaagatttttgattgacaaaaaccattcattggaacatagtctcttctataccttgtttcacttagcatctctttgagaatttacatatctgcatgtccagatccactccacagcgattcctgcctagtcttttataggatacactaattatgaaaatatttaccaataaataagcactcattaggtttacagacaactgttgtcagaagtgtttgtggccatatctttttacttgcacatgtaagcatagatgtaaaataaaaatcgtatgacaatttgagttaaagagtttgtagattttacattttcctaggtatttcaaaatttttccaaaataagttgcccaattttacaagcctatctaaagcctccactaatacaacatggtagtaaagagctgccctgcccctctgggctgaaaattgccaaaagacgtccttcctgagactgactcagctttcactagcagaacgcctcctggatctccggtcccccacctctctctcaccctaggggtagtgcctttcagtgtacaagctgcacaactgtccttggtggccctgccctccctttcagtgtgtataagagtgcccatttcctcccatgtgccatcgaagattttttatttttgccgtcttgacagatgaaaaacagtatcttttaacttttcaaattaatttagaagaaaacttctcattctcatcttatagtgcgttagttttgcaaaagcagatccagtgattccagcacctgctatgtacccttaactgctctaggtgccagggaaacgagggaacacaacagaaaaagtcccttgccatcaggaatgtatattccgacttcaccatttggctacacatctgcatatttgttttcaagcttgtgtgcagtgaattttaaagtctcaatttatatttctagttgaatatactgtgtactgctctttgccctgccattttgataagttgatgaaaaccagctctatgcctaagtaccccaaagcttctgtttataatgaggtaaaattgtgtcaaaaataggctctactaaagttttgcatagaagattttatgtaattatataatagttcttccttgggtccaaaggctctaaaatgaccctttgccctttacaattttggccctatttctgaggatgtttttgaagtctgcattttttgaaacctcatagtttcattgcctgaaaatgatacaatgaaagtactttgtattaagatatgtaaatccattcctacctccaaagtttctttgaaaaatgcaaaaaaaagagttcttacttcgaaatgcttcatattcatgaaagcagttttaatgcaaaatactttattctgttagctattagttctttgatcaatgaaaattgtttcttacctgctgtttctgcagcctttaattgtagcccagtgcttattcaatgtttctgttttaatttgcatttaatgagctcattttaaatgtttcttcgtagtaatctgaatggtttctctccctcaattttgtaatattaaagagactcatgtgacagtcggctgatttatgttgcagctcacctccctggcttatttacttcatcctgtagcatagaatcttggttaaaaggaattacagtaataggattcttttcccccagtaatttcctaattacctaggactcttaacagattaactcaaatgtctgtttttcaccaaatagaaaccttttttccttgaatgaataggtatttatgattattatttcagtgtcatttctttataccatatgtattagatggtgctgggtagggatgggtacacataggttgtatttgtctatatattgcctgtggggaaggtacatagaaatgaccatttcttcccaataagtttgtggcctagttgggctgattaggcttatattggtggtatagattgcaccttcaccaccacagaagaagagtaattagaaagatgtatgtacatatcagcacacacatacatgcctgcaacacgtgatttttcatgtttcttttgttcatttgattctcgttgatctgaatgccctttctttctgttgaacatctcaaaactactgttcatcactcaagatccagttccaatggcaccaactttatgtgaaattttccatgtcacctcttaccctctttttagtgtgaggcaattagcacctcctttagagtcagccaacattttagtaactacccttcatcaggtccttgttcatagtctagaaggggtacagaaaagtaaagatttacaaacctgaaaggtgggtatcataatataggtttatacaaggaagtactggaaaactcagcctatagagcttggaagatccagctgtttcccagtggagccattccagttttcctgcaggacaagtaggagttaactaggtgaaggcggccttctagacaggcatggaggggagagaagagaatagaatgaaaggtatctggtgaggctgcaggcacaccagataagctttgtcaaggaggtaggtttaaagttggcgatagggaggagtcactgaaccattatctacaaaagagcattatgaacaggttgtattttagaaagatgtctgtggcagtactagaaagttatgaaatagaacgttgtagaaaatagttacactagtgccagcaagtccagataaagtgttaatagaggacttctcatgaccttcattgtacttcttagataaaacagaatacttgaaatcactagttacggagaacaagcgtttataaactcactccataaaacaaaggaaagaagtccagataatgtttaatagaggacagtctt

SEQ ID NO: 96679 - DNA, 21975 bp, Homo sapiens
  misc_feature (1)...(21975): n = A,T,C or G
ccccgggagccagtgaaaactttgtgaagggagtgattactgcgggcgaaggcgcttggcacagccacaactgaagctcagccgtcggatgtgattattgttgctattgttaccgctccgcctggactgggtgcccggtcggaaagtcccgctccccgctcctcctcccaggcgcggaagcttcgcgccgcccgcctcgggggacacctcccgcgccatctcgggggcactggagataaggaaaggaacctcctccctggctgggatggctgcccgggcgcgggaggagggccggggacccggtgagggaggaccgtagggcccgtgggggcttcacgcctggcaggcggccggccaggtgagcagggccgcgggcgcgccggggcgaggggcgggcccgcgcgggggattcggggctccgcgggttcaggcccgggggcggggcccgggggccatcttggctatgggcggaagttttcttcagagaccgagggacgggaatccgttgccgcccccggccgggcggcacgaccccgatttgggtataggagagacgagcgtgggaactggcggacccccatacaagtaaaggcgggcggcacggggcacggcccacccggggaccccctggatgcggcacggcccccgcaactcggccgccctcctgccgcctcccgtaaccccgggcgcccgccagcggcgcagctcgcgccaattctcgtacggtttcacgccgggtgcggcgctggactgcggagccagccgggccgctgcgcaatttgcgtagcgaacggcgcccgcgcaggcgcggagggggaggggggcggagcagcgggagccggggagccggagccccgggtccccacgacctgagccggctctcccatcagcggcctgaggacctggcgtccgcctcctccctccccttgaggctggagcgtggacgcggtgggggagggtggggcgggggcagctttcgagaattacgaggacaggaggcagaggccctccccatccgcattattggaggagagagagcctcccccagcttggggagggggagagcggggcattgggcgcccctcgcagcggccgctgccctgacccgacgggtatcagccggctctccccctccacccaggacgacatgaacgaccgaggccagggagtcctctccttgggcctctgcatccccccatccttggctctggggtaggcccagggaggagacacccccaacccctatccggtctgtcctggagaaaagagactgcccttccatgcccctgagtgaggggcctggggcccaggctgcctgtgttccccaagggcaagggtctctctgttgaggaggaggggcctgtcagccacaacttctttcctcctgagcgccccatctccctctctgcaccctgcaattcccacccctccgtatttatttccctggtcccgccgacagtccctccttgtctgtctccgggattcaggcctccctccctgacatggagagtaacctgtctggcctggtgcctgctgccgggctggtgcctgcgctgccacctgctgtgaccctggggctgacagctgcctacaccaccctgtatgccctgctcttcttctccgtctatgcccagctctggctggtgcttctgtatgggcacaagcgtctcagctatcagacggtgttcctggccctctgtctgctctgggccgccttgcgtaccaccctcttctccttctacttccgagatactccccgcgccaaccgcctggggcccttgcccttctggcttctctactgctgccccgtctgcctgcagttcttcaccttgacgcttatgaacctctactttgcccaggtaaccaactgtggtcccgggtggggggcgggaggtggcaagcctcaaggacccacaggagtgaagggcatctctgctcctaggtggtgttcaaggccaaggtgaagcgtcggccggagatgagccgaggcttgtaagtactcgggacactggtgggctcagcctccaggtcaggggcaggtgacagtcccatgtagatcccttcccacctctcagggctgagacaaaggcaacccagggaatgtctgtggaagatcttggaaaagttaaagcacctggcgcagatggctcagcagaggccttgcagatctgcaaggcacaggaataggaatgcttgtggtagtgtgagggagagggccccagtgtcatccaccatggagggcgagctggaggctccagcccatggaagcaccaaagccatatgcactcctgggtgacctggggccgcaatgccctcgtcatttgtacagtgtcttacggtttataaagagctttcccagccatcttttatttgtacaatttccctgagaggctactatcctcccttgagagatgaagaaactgaggcccagccaggtaagacagcaggatcaaggtcgcagagctggggctcagacagagacttctgactccagttggtgcaccttccgaagtaccatggctgtcagtcaccttctgacctttttgggcctcagtttctccatctgtaagagtggaggaacagggctcagactggatgccctgagttttgtcgacattggggtttcctgcaggaggtggggcaggtggtgagtgctgagggctgttgagggcccgcgctgactgtgctgtggctgcaggctcgctgtccgaggggcctttgtgggggcctcgctgctctttctgctggtgaacgtgctgtgtgctgtgctctcccatcggcgccgggcacagccctgggccctgctgcttgtccgcgtcctggtgagcgactccctgttcgtcatctgcgcgctgtctcttgctgcctgcctctgcctcgtcgccaggcgggcgccctccactagcatctacctggaggccaaggtagggctgcagcactgatgcccaggtgtcttttgggtctctcggcagcggttctcagggtgtagaggaagctgggagccttctctccctgagggtcctctgttgttacctgtgccaggggaccagtgtgtgccaggcggccgcgatgggtggcgccatggtcctgctctatgccagccgggcctgctacaacctgacagcactggccttggccccccagagccggctggacaccttcgattacgactggtacaatgtgtctgaccaggtgggcatacgcatgtctgccacctccttagtagccgtggcaccttggccccagctggcctgggccctgtcccactacccctttggcgtgactgcagactggcaccagcccctgccttcccacaggcggacctggtgaatgacctggggaacaaaggctacctggtatttggcctcatcctcttcgtgtgggagctactgcccaccaccctgctggtgggcttcttccgggtgcaccggcccccacaggacctggtaagggtctgctccctcttctgtggggccagtggagggggcggatgttgcaaatcctgggttggagtctggggttgggcctgggaggccagtgcaggacaggagtaagtatcgatgatggcttcctcccccagagcaccagccacatcctcaatgggcaggtctttgcctctcggtcctacttctttgaccgggctgggcactgtgaagatgagggctgctcctgggagcacagccggggtgagagcaccaggtaggagccgtggcactgcctcagtacccctgccctacccgcccaccccgctggctccatcaagctatgggggaccgagatagccgggtcttgccttccacccctgccatggcctttgcttccccatctgtactaggtgaggtcccctgggttcctattgctaaagcctccacctcttgcctagagatgtactttgtcctgggccccgaaggtctaggtcacaggggttctgttctaagcctgtcttcctcctgcagctcttgtgactgtggccctggtcactgtcctgagactgaccctgtttctctgctgcagtatgtcgggcagtctaggctctgggagctggtatggtgccatcgggcgtgagccgggctggtatgggggcagccagacgaagaccactcctctgctcttctcccaggtgccaggaccaggcggccaccaccacagtctctactccaccccacagacgtgatccccctccctcccccacagaatacccaggccccagtccccctcaccctaggcccctgtgccaagtttgtctgccgcttcttgcccaggatcctgggggtcgtggctaccccctcctctggccggctccttgctgctcctgtcatagtgagcttgtgccgtccccctaggatggggggcatggccctggctgccagatgcccacagcaccctggcatgacctgccacctctgcttccacaccggagccagctacctctcctgtgcctgccactcaataaacagtgtctgcgccccacagttgtgcacctgtctgtcatctgccttgtgttcctatcacttttgcctgtttggcctaaggctgaacagacactagcccttgaagtgggctgctaggctgggcaggggtgacttaccccatcaaggctggtgggctgggagaggtggggcctgcagtttgcaagggaaggagaccacacaggcctttgttctcaaagctctcctggcccagaattgccccactacctccagatccctctccacttgaacagttgctactctttcctcaagacctgcgtcaactgttacctcctttaggaagccttctgtctcctggtcaagggacatggcccctctgctgggccccacagctccacattactgattatgtggccattgaggttctttgttttgttttgttttttgaagcagggtctcactctgtcactcagactggagtgcagtggcacgatcatggcccactgcagcctcaacctaccaggctcaagcaatcctcctgcctcagcctcccgagtagctgggaatacaggcacatgccaccattcctgactaattttttaatttttaattttagaggtggggtttcaccatgttgcccaggctggtgtcgaacccccgggctcaagcaatccacccacctcagcttcccaaagtgctgggattacaggcatgaggtaccatgcctggcagcttctgagtcttaaccccaatggattagactttctggaggccctgtttccctatcaccaccccaacctggtctttaggagtcaggagttagtccagggcttgctggggagttggcgcagtgactgagcagcccccatcttcctaccagggcgtgggtttgcccagatgtacaggtggtcccctagctatgccctcccgttagccctcttctccactgtccttagtagcatagtcactgccctctgcttccatggccctggcaggtctgtctgatggctaggagtcctttgctggagggtctgtcccctgcccacataggtggttgtcccagcttttcagagttcccttggcttatcactgggcctgcttcaaaaccctttacttgggaccatcctgggcaccaggccctcagggcctccagagagggcatctgagactcatagagaatcagcttgaagctggacaatcactttttgttgaaataaaaactgctaacgtttgtggggcactttattgtgtgtgccaggctctgttttgaggatttctaaacactggcctccttaatgcccagaacagcaccccgaagtgatgattaatcatcccttttctgtaagtgggaacagggagactccagagtttggtaacctgttcaggttccctaccagtagcgggtggtcagcctcaaagcccaggctgaaagccatccagcatgagggctgaggaccccagcaggcaccagagggtctttggagaggtcacaggttgtcaagtgggtgagaacagggcggggcaagttcaggaccagccagggcctgggtgttcaggcagtgggagagtggatgctggcaccagtgccatgctgggatctgcaggcagcttcagccacagccttccggggctgatttctgggcatggaagtgagaaccaaaagctggggcagggagcaccctggagggatagccggggagcaggtagagggccaaaacctggagtgggggcaggaggtgctccagcagcaactcccccagaggtgggtcccaacctccacgtcggccaattccaggtggccccaccgggtttcccccacccctttgtcccgcggagcccctccctcatgagtgctgagcccaagggccaggctgtccccaggggcggagagttgcggrcccttcccgatccggtaatgggcctgggagatgccagattagcgtggtgcctgtccggagagacgggccagctgatgcccaggtcggggccctgccgctggccacactgggctccggtccaaggctagaaggctggcccctgctgcaacccctctccggctcctctgccacccacctcccggggctggccggctgtggggagccaggcggccgcaggtaaacggcttggggcggcgccggcggcgagggcgctgcacggagggaagcgcggcgccggaggggttaaccgcgggaggaggggggcttctgccggcgggaggggggtcccagccccggcggccgcccgctccgcccctgccgcctccgcggcccagtcggcaccggcgaggccgtgctggaacccgggcctcagccgcagccgcagcggggccgacagtaagtgcggtgcgggctccggtgcgcgggcaggactcaggggcagggacgccccaggggcgactggccgggcggggtgcccacctctcgcgcgtgggcgcctccgggagtggtgtggccgccggtcccgccgcccgccacgctccgaggcgtcgctgtgcggacgcgggggaggcggtgggagcgagctgcgggcgctgcgcggtggccctgctgtctggcgtgtgcacgctagtgtccacacacgtgtgcgtgggctctgggtgccctggcgcggccggcacgcccatgggggccggggatgccggggcgtctgcggagagtgcaggtggggtgcgtgcgtgcagcggggcggcgcggcgctgcagcctcgggatggagcgtgggcgcgcgggtctttgtgcccgcgcttggcggcgcgtgccggggcgtgtgtgcgcgtgggcgccgccgcccgctgtctcggactgacagctgtctcgggggctgccgccccggtgtggcctttgcggacccccgccccgctttttccgggaactgggcgtccccagcacccctcctcgcctgggtgcggcggccgggacccgcccctgggttcctcgaaagcccggcggggcgcgggggcaccctggagggccagccaggaagcagggcgaggcgagaggggacggagaagccgcggagatgctgtcacagccgcagcgggcgagcagggacccaccattcccctgtccccgccttgcgctgtccggcctctcctccgggtttcccttcggacgcctccgagccccctcagcctcctcctcgagggccagctccccgcacccccaccaagctccacacatttcctcgctcgccccgcttccccctaggcaggcttaggctctctttcggcctcccactcgccttcctttcccttctcggwgccctcctctctttcctcacccggtagtcccagacaggggctgagggccgggcagcggaggtaaggggaaggctggagataggagggggactgggtgtgtmcagccagagggatgtctgtggacagtgcagctgggggctttatggatctttgggtgtgtaggggatagaggaggagggtgtgggtgtcaggccagctcagtgaccccagcatccctggttttgcccgcagtgacgacagctccccaggagccccccgcccggcccctccaggcgggcagtggagctggcccggcgcctgggcgcgccatgcgcagcaccacgctcctggccctgctggcgctggtcttgctttacttggtgtctggtgccctggtgttccgggccctggagcagccccacgagcagcaggcccagagggagctgggggaggtccgagagaagttcctgagggcccatccgtgtgtgagcgaccaggagctgggcctcctcatcaaggtgcgtgggtgggccgcagccccttcagctgtcacccatcacccctggcgctagctgtgtgccagtgaggccctgtgccagtgctgctttcagatcagtatccctgaggacgggtgcagtgggaggctgtgggacagaggctggggaccaggtctctgtgttttcaatagggcaactgtggggtcatttgttttcctggagagcctggcacaggactgtgcacctataatgtctccttcagggtgtgatggtggtgggatgagggggaaatgaatgaatgaatgaatgaatggccatagcrcatgggctatgttacatttgcacaggtctcactcaccggtctagattgccacacaaaatccaagactctcatttaaacatgaattacagttaaactgcaaatgcctttttttttgagacggagtctccctgtgtcacccaggctggagtgcagtggtgtgatctcagctcacagcaacctccgcctcccagactcaagtgattctcctgcctcagcctcccaagcagctggtattacagggattcatcaccacacccggctaaattttgtgtttttagtagagatggggtttcaccatgttggccaggctggtctcaaactcctgacctcaagtgatccacccgcctcggcctcccaaagtgctgggattgcagacatgagccaccacacctggcccacaaatgcctttttaatacaagtccatcccaagcaatatttttgtttgctaaatctggcaaccctacctacaccggttcccatacttttcttggagtcatgtgccttagaaaagcccaagaacatggtgaacacaccccctccccctggaaaagtgtgcatatgaacatgtgcaggtgatttgggagggttccaggatccatgccaccaggaatgccaggtcaggtgccccttcccccagcatgcatgcttaccatgtggggagaagggggggtgcgtcagggttccctgaggcacttctggtcagactccaaccatagactcaagaaagtgttggccgggcacggtggcttatgcctgtaatcctagcactttggaaggctgaggtgggtggatcacctgaggtcaggagttcaagaccagcctggccaatgtggcaaaaccccatctctactaaaaatacaaaaattagccgggtgtggtggtgcatgcctgtggtcccagctactcgggaggctgaggcaggagaatcgcttgaacccaggaggcagagattgcagtgagccaagatcacaccactgcactcactccagcccagcctggatgatcggtctcaaaaaaaaaaaaaaaaaaaaaagaaagtgttgggctgcagccttctgggatacagtcaggcaggcacgtctgttactttttctgatttcggagtcactgtcatacaaaaaaattaagatttagctttaataaattaatgtctattatttgaaattgaagagtaccctttgttccctgcctgttctttgtggagagaggggccattggcacggaggcctcagtgttccagcagattctcaaggcagcaggactcagggcagagatgagtgtggggtggggttgggacacagaccacccgacagcatctctgacacttacagaatgccagtggaggctcagagaggcgtgggaagaatgtatctggccagaccacagggcagagagagggagggagggagggagggaatctgacctagtttgtcttcacaatggaattgcttttttcctggataagaaaaaggaagaaaaggagaggcaggacctagaagggtgggtgacagccgctttatttctcttccacagtaggattcactccctgaattagttgtgcagcaactgtgcacctactgtgtgctaggtgctgtagtgttatatgccaaggggatattggagtggatcagacacagggtctgccttggagggtgtcacatctaggcaaggggagagatccatggtcagacagatcactgtaggattcagtggaaaggaagtttccctctttctgttaagcaccaattgtgctagaccttgagctaggggctggggacaaggatggagatgtcaggggcctgagggatgacctggtgattgaaatacaccaggcgagaggggtagagagtagagacgaggggcaagagatgcccatgtggagagacagcatgggcaaaggcgtggaagctggaaagttccggagcattttgcagaacctggagttagcagatgcctagtcatttgaagcaaaaattagaacacacaggatgacaaaggatttttcccttaagtcgtgaatttattggaaaagtgttgcaaaatacacattaaatcacttttaattagctatttcgcttcttgcttttattaacagttattacaggaaatggaatcatctcagaaaatctggggggaaggttgctgtaacatggggtgccaaattggagtcccagggagaagactaggggaaggggggtggggaccagtttgaaaaaaggaatgctggtctggggtgtttaggcctgcaaggagtggggagccatggagggtgttgagcagccactttaggaagattagtttggactaagtcttgctaatgaggacttcagtcagggggcgaagaggtgctttatgatacgccccacagacaccattctggtaccttgacactgctgcttggggaagagtctctctgacttcctctcacctagggcaagcactctcaaaatagtccctgcccatgggacctgcatgctggcgagagggggagacacccaaatagggacattacattcatttaataatatgtattggctggtccgaatacagtagtgtttacaactaattgatcacaaccagttacagatttcttggtcccttctccactcccactgcttcacttgactagccttaaaataataataatacttattgagaggtgctcaatcaatatgatttacacwgcagcacagggtttggcttgggcttcctcaggggtgggatgtgtgtgtttttgtgtgtgcrtataaacctcctaaaaattgggagcaaaattttgtggcatataaaccttcctggagagaaagtccctagctttcttgagattttctaaggaaagggactcaaattcagcttccataggtgcaatgggagtggtggggttggaaagctggaaacacagggtgtggtcactgcttgggaacttactcaacagtcagtgcttactttgttgcacgttcacaaaaaatctgggaggcagatgctgtcactatccttcccacttgagacatgcagaagctgaggccagagagttcacttgctcaagtcccatagcaccaacatttgaacccaggcagtctggtcccagggtctgtgctcctgaccatggtaaaagtggaaatttgttgtctgaagttaggggccagatactgaaaatgtttctcaaacattgtagaagtcaaacaaactcacctgcaggtagactggacccagtttgtatcttctgctgtaagggactgcctcctgggagaccaaagggaaggggagaacagggaggagcagggaaggagccaccctagagactggaggggccacgagttgccctagacaggagggaagaactgaagctcctccttctgcaccttgtcctgcaggaggtggctgatgccctgggagggggtgcggacccagaaaccaactcgaccagcaacagcagccactcagcctgggacctgggcagcgccttctttttctcagggaccatcatcaccaccatcggtgggggaggggattggcatgtggggggcggcaaggagcttcctcatgggggaaggtgcagggagacggaggggtcccagrtggcccctagacttcctgcatcgcccctctgcccaggctatggcaatgtggccctgcgcacagatgccgggcgcctcttctgcatcttttatgcgctggtggggattccgctgtttgggatcctactggcaggggtcggggaccggctgggctcctccctgcgccatggcatcggtcacattgaagccatcttcttggtgagctgctccatgccctgcctgcccttgtgctgggctccrgctacccttccccatgtccctggcacatragcgcgcccccaaagaccataagcctctcccacaggctcctgggggcgggagtggggagtatgggagtggggattgttggtgtctcctgggtcctgcctactgccccatcccgcagaagtggcacgtgccaccrgagctagtaagagtgctgtcggcgatgcttttcctgctgatcggctgcctgctctttgtcctcacgcccaygttcgtgttctgctatatggaggactggagcaagctggaggccatctactttgtcatagtgacgcttaccaccgtgggctttggcgactatgtggccggtgaggccgcccttcttgtgctgcactttcccatctactttattcctgatcaggggctctgcactcctgcctttccctccagatcccatgtggttgctctaacccctgcatccatcatggaatgcaccatcacagccttgcacacacaccagcgccttatgcacactcacattcttatatgcttgagtcccatgcatgctcacacatatattaaatgcacccctcgcatgtgtcacattcttgcacgggagcgccccttcttgcatgcttttatcttgcacactttcaactcakgcacaccactcattttcctgcctgcactcacacactcaagcacatacccattgccctagggagggcaggtcctctccaggaactgggaggggggcactgaaccagagctcacaggcttgccccacaatccaattctttctaccttccctggtggtatcccaggcgcggaccccaggcaggactccccggcctatcagccgctggtgtggttctggatcctgctcggcctggcttacttcgcctcagtgctcaccaccatcgggaactggctgcgagtagtgtcccgccgcactcgggcagaggtaggcgccccagggttggcactgtgcstgcgcactgtggtgcaaatgtgctgttccctagcagggggttgatcaggctgtctcctatccagggcgtgggctcctgaggcaggggctgagtgagcctctgtgtgtgccccgcagggaacagaggggtataagtttgtgggtaccttcaccacctcttccttcatgggtaggattgccggatttagcaaataaaaatgcagaaagccagcacaggcaacatggtgagatcccgcctctagaaaaggcacaaaaattagccctgcgtggtggtgtgtgcctgtagtcccagctactcgggaggctgagatgggaggatcgcttgagccaggggaggtcgaggcagcagtgggtcatgattgcaccactgcactccagcctgggtgacagagtaagccctggtctcaaacaaacaaacattaacaacaacaacaaaaacaaaactcagttaaatttgaattccaaataaataaaattttattatggcggggggcagtggctcatgcttgtaatccgagcattttgggaggctgaggcgggtggatcacgaggtcaggagttcgagaccagcctggccaacacagtgaaaccccgtctctactaaaaatacaaaaattacctggacgtggtggcgggcgcctgtaatccaagctacttggagggctgaggcaggagaatcgcttgaaccggggaggcagaggttgcagtgagctgaaatcacaccactgcaccccagccgggatgacagagctagacttgtctcaaaaaaagaagaaaaaaaaaaaaaaaaaaaaagcatgtcccaaatattgcacgagatrtatttatactaaaattttatttgttgtttctctgaaattcacatttagccaggcgatttgtattttgccaccctgctgggagcacccagtggaggagcccttccatccttggggctggctgaggctggaggaccaggcagaaaagagggttggggtttgatccctgctggtgaaggggcaggttcccggggggtcgcggagggggtctagacctctagtcgagggctgctttccctctccgtgcagatgggcggcctcacggctcaggctgccagctggactggcacrgtgacagcgcgcgtgacccagcgagccgggcccgccgccccgccgccggagaaggagcagccactgctgcctccaccgccctgtccagcgcagccgctgggcaggccccgatccccttcgccccccgagaaggctcagcygccttccccgcccacggcctcggccctggattatcccagcgagaacctggccttcatcgacgagtcctcggatacgcagagcgagcgcggctgcccgctgccccgcgcgccgagaggtcgccgccgcccaaatccccccaggaagcccgtgcggccccgcggccccgggcgtccccgagacaaaggcgtgccggtgtaggggcaggatccctggccgggcctctcaagggcttcgtttctgctctccccggcatgcctggcttgtttgaccaaagagccctctttccacgagactgaagtctggggaggaggctacagttgcctctccgcctcctccctggccccggcccttccctcacttccatccatctctagacccccccaaggctttctgtgtcgctgccccgggcgggtgtatccctcacagcacctcacgactgtgcctcaaagcctgcatcaatraatgaaaacggtctgcaccgctgcgggcgtgacgctcccggacgcgagtgggtgtggaattgctttcctcgggccaccgtgggggcacctctggcctcccgtgacccccaggccgagggtccccgggcacccaggtcggtcaagtctcggccctctcaggcccgcgtctctgcctggaggagactgtgtagggtccggcgtggggatcagccrggatgggctgcgcgtctccagcctctgcacacacattggcgggtggggtgcagggagggagaggcaggggagagagaatggcatctcgcgtggagggctgtcgttygaactctcccagcgcgagagaccctgccccgcccccttcctggagcgttgactcccttctcgtctcgaggcctgtggcgtctgggtccgttggggcagaaccatggaggaaaagccttcgaaagtaagacgtctccctaggccccttaccctgtccgctccaacccacccttggtccgactcgggcccctggcgctatttcttactcagccttggctgcccgcagcccccacccaaccccacgttctacgggatccccaacccggcccggctcagttccccagcccgctcttccttcccgctccagccatccgcgacccttggctccctccttgtatgtggcccacaggtgtcgctcaagtcttccgaccgccaaggctcggacgaggagagcgtgcatagcgacactcgggacctgtggaccacgaccacgctgtcccaggcacagctgaacatgccgctgtccgaggtctgcgagggcttcgacgaggagggccgcaacattagcaagacccgcgggtggcacagccyggggcggggctcgttggacgaggggtacaaggccagccacaagccggaggaactggacgagcacgcgctggtggagctggagttgcaccgcggcagctccatggaaatcaatctgggggagaaggacactgcatcccagatcgaggccggtcagtgtggcctcgccaggccgtgggcacccgcagggcaataagctggccagggactcaatttctggagctgtaaaatggggggaagctgatgggatccaagtttctaggattctctgggagaggcgcccgcgccaatctttcgccctttaaatccgccaggcattcttggagcgccccctcccgggcaggcgttgtaacaggcctttcggtcgtgacgcgcagagtccggggaaggacgcaccaaataaattgcgcaaagaccccgtggtaggacctgcggggtttttttgtttcgtttgttttgttttgttttgtttttgagacaggatctcactctgtcgcccaggctggatggagtgcagtggtgcgattatagctcactgcagttcaagtgatcctcccgcctcccacttttttttttttttttttttttgagacggagtctcgctgtgtcgcccagactggagtgcaatggcacgatctctgctcgctgcaacctccgcctcccgagtagctgggattacaggcgcgcgccaccacgtgcggctaatttttgtatttttagtagagacggagtttcaccatgttggccaggctggtctcgaactcnnnnnnnnnnnnnnnnnnnnnnnnnnnnnnnnnnnnnnnnnnnnnnnnnnnnnnnnnnnnnnnnnnnnnnnnnnnnnnnnnnnnnnnnnnnnnnnnnnnnnnnnnnnnnnnnnnnnnnnnnnnnnnnnnnnnnnnnnnnnnnnnnnnnnnnnnnnnnnnnnnnnnnnnnnnnnnnnnnnnnnnnnnnnnnnnnnnnnnnnnnnnnnnnnnnnnnnnnnnnnnnnnnnnnnnnnnnnnnnnnnnnnnnnnnnnnnnnnnnnnnnnnnnnnnnnnnnnnnnnnnnnnnnnnnnnnnnnnnnnnnnnnnnnnnnnnnnnnnnnnnnnnnnnnnnnnnnnnnnnnnnnnnnnnnnnnnnnnnnnnnnnnnnnnnnnnnnnnnnnnnnnnnnnnnnnnnnnnnnnnnnnnnnnnnnnnnnnnnnnnnnnnnnnnnnnnnnnnnnnnnnnnnnnnnnnnnnnnnnnnnnnnnnnnnnnnnnnnnnnnnnnnnnnnnnnnnnnnnnnnnnnnnnnnnnnnnnnnnnnnnnnnnnnnnnnnnnnnnnnnnnnnnnnnnnnnnnnnnnnnnnnnnnnnnnnnnnnnnnnnnnnnnnnnnnnnnnnnnnnnnnnnnnnnnnnnnnnnnnnnnnnnnnnnnnnnnnnnnnnnnnnnnnnnnnnnnnnnnnnnnnnnnnnnnnnnnnnnnnnnnnnnnnnnnnnnnnnnnnnnnnnnnnnnnnnnnnnnnnnnnnnnnnnnnnnnnnnnnnnnnnnnnnnnnnnnnnnnnnnnnnnnnnnnnnnnnnnnnnnnnnnnnnnnnnnnnnnnnnnnnnnnnnnnnnnnnnnnnnnnnnnnnnnnnnnnnnnnnnnnnnnnnnnnnnnnnnnnnnnnnnnnnnnnnnnnnnnnnnnnnnnnnnnnnnnnnnnnnnnnnnnnnnnnnnnnnnnnnnnnnnnnnnnnnnnnnnnnnnnnnnnnnnnnnnnnnnnnnnnnnnnnnnnnnnnnnnnnnnnnnnnnnnnnnnnnnnnnnnnnnnnnnnnnnnnnnnnnnnnnnnnnnnnnnnnnnnnnnnnnnnnnnnnnnnnnnnnnnnnnnnnnnnnnnnnnnnnnnnnnnnnnnnnnnnnnnnnnnnnnnnnnnnnnnnnnnnnnnnnnnnnnnnnnnnnnnnnnnnnnnnnnnnnnnnnnnnnnnnnnnnnnnnnnnnnnnnnnnnnnnnnnnnnnnnnnnnnnnnnnnnnnnnnnnnnnnnnnnnnnnnnnnnnnnnnnnnnnnnnnnnnnnnnnnnnnnnnnnnnnnnnnnnnnnnnnnnnnnnnnnnnnnnnnnnnnnnnnnnnnnnnnnnnnnnnnnnnnnnnnnnnnnnnnnnnnnnnnnnnnnnnnnnnnnnnnnnnnnnnnnnnnnnnnnnnnnnnnnnnnnnnnnnnnnnnnnnnnnnnnnnnnnnnnnnnnnnnnnnnnnnnnnnnnnnnnnnnnnnnnnnnnnnnnnnnnnnnnnnnnnnnnnnnnnnnnnnnnnnnnnnnnnnnnnnnnnnnnnnnnnnnnnnnnnnnnnnnnnnnnnnnnnnnnnnnnnnnnnnnnnnnnnnnnnnnnnnnnnnnnnnnnnnnnnnnnnnnnnnnnnnnnnnnnnnnnnnnnnnnnnnnnnnnnnnnnnnnnnnnnnnnnnnnnnnnnnnnnnnnnnnnnnnnnnnnnnnnnnnnnnnnnnnnnnnnnnnnnnnnnnnnnnnnnnnnnnnnnnnnnnnnnnnnnnnnnnnnnnnnnnnnnnnnnnnnnnnnnnnnnnnnnnnnnnnnnnnnnnnnnnnnnnnnnnnnnnnnnnnnnnnnnnnnnnnnnnnnnnnnnnnnnnnnnnnnnnnnnnnnnnnnnnnnnnnnnnnnnnnnnnnnnnnnnnnnnnnnnnnnnnnnnnnnnnnnnnnnnnnnnnnnnnnnnnnnnnnnnnnnnnnnnnnnnnnnnnnnnnnnnnnnnnnnnnnnnnnnnnnnnnnnnnnnnnnnnnnnnnnnnnnnnnnnnnnnnnnnnnnnnnnnnnnnnnnnnnnnnnnnnnnnnnnnnnnnnnnnnnnnnnnnnnnnnnnnnnnnnnnnnnnnnnnnnnnnnnnnnnnnnnnnnnnnnnnnnnnnnnnnnnnnnnnnnnnnnnnnnnnnnnnnnnnnnnnnnnnnnnnnnnnnnnnnnnnnnnnnnnnnnnnnnnnnnnnnnnnnnnnnnnnnnnnnnnnnnnnnnnnnnnnnnnnnnnnnnnnnnnnnnnnnnnnnnnnnnnnnnnnnnnnnnnnnnnnnnnnnnnnnnnnnnnnnnnnnnnnnnnnnnnnnnnnnnnnnnnnnnnnnnnnnnnnnnnnnnnnnnnnnnnnnnnnnnnnnnnnnnnnnnnnnnnnnnnnnnnnnnnnnnnnnnnnnnnnnnnnnnnnnnnnnnnnnnnnnnnnnnnnnnnnnnnnnnnnnnnnnnnnnnnnnnnnnnnnnnnnnnnnnnnnnnnnnnnnnnnnnnnnnnnnnnnnnnnnnnnnnnnnnnnnnnnnnnnnnnnnnnnnnnnnnnnnnnnnnnnnnnnnnnnnnnnnnnnnnnnnnnnnnnnnnnnnnnnnnnnnnnnnnnnnnnnnnnnnnnnnnnnnnnnnnnnnnnnnnnnnnnnnnnnnnnnnnnnnnnnnnnnnnnnnnnnnnnnnnnnnnnnnnnnnnnnnnnnnnnnnnnnnnnnnnnnnnnnnnnnnnnnnnnnnnnnnnnnnnnnnnnnnnnnnnnnnnnnnnnnnnnnnnnnnnnnnnnnnnnnnnnnnnnnnnnnnnnnnnnnnnnnnnnnnnnnnnnnnnnnnnnnnnnnnnnnnnnnnnnnnnnnnnnnnnnnnnnnnnnnnnnnnnnnnnnnnnnnnnnnnnnnnnnnnnnnnnnnnnnnnnnnnnnnnnnnnnnnnnnnnnnnnnnnnnnnnnnnnnnnnnnnnnnnnnnnnnnnnnnnnnnnnnnnnnnnnnnnnnnnnnnnnnnnnnnnnnnnnnnnnnnnnnnnnnnnnnnnnnnnnnnnnnnnnnnnnnnnnnnnnnnnnnnnnnnnnnnnnnnnnnnnnnnnnnnnnnnnnnnnnnnnnnnnnnnnnnnnnnnnnnnnnnnnnnnnnnnnnnnnnnnnnnnnnnnnnnnnnnnnnnnnnnnnnnnnnnnnnnnnnnnnnnnnnnnnnnnnnnnnnnnnnnnnnnttgactcaagcgcggcatccggtccatccccagtggtgtaagaccggacgcggcgacggtgcggggcggcgctggccctgaggtaggcggcggtaagaggggccgcccgcggcccccggctcactccggcactccgggccgctcggcctccatgcctgcccgaccgcgctgccggagccccaggtccgggggcggatgggagcgctgccgcgggggtgggcgggcggggcgcgggggccatgtgcgagcgcggcagggaggcgggcggggcgggctgcaggcggggtccgactctggggccagtccgggccacggttgggacccagtcgagggtcggactggtcagggttcaggcgggatccggcgtccgagtcctggtgggccggcctggggcaggatctggctctggctgcgggtcctgactcgggtcagggttgggcctccgatccagcccgctccggggcagggttcaatcccgcatttgccgaagtccctggggctggccggggtggaagacggggagggctctatgtctgggaaggggctctgaagaccacgtgggggcgctcgaaggggcctggggccaccctcctctctgggtcaaaggtcatcgcaccggcaggggagaacttcctcctccttggctctccccacttacttcctgataacctggtagaggtctcccgcgggcggggagggggaggcgtagcaactttaggcaacttcccaaaggtgtgcgcaggttgggggcgggacgcggcgccccgggaggtggcggcctctgcgacagcgggagtataagagtggacctgcaggctggtcgcgaggaggtggagcggcgcccgccgtgtgcctgggaccggcatgctggggcaggagggcagccgcgtgtcaggtgtgaaaagctctggaggtgttttcatgagtccgtgcctgtgcgtgtggatgtggggagacctagtgagagtgtgtgtgatcatgagccttgactgagttcgtggatggggtgtgcgctccaggagaagtgtgtgagcacaagtgtgagcaggagtgagcacgggtttgggaaggccggtgcaagtgtgaaagccctcagcagagagcgagcctgcgtgggcttgtggggctcctgagcaccccggtgagtggagtgtgtgaactcggtgtgagcacgtccactggccttgggtctgctctccaatgcagaatacccagatgagggcagggtctcagaggtccccccaacatctggagaaaactgggaagtatcctgctcctggctagggattccaggtggggttgaaggttgcctgggggctacggttaccctgctccctggcctgggtgggagtaggggctttctaagcctcccccaggttcccaagggggagacctgctgtcagttactggccctgaagactctgtttccatggcaacagctaggagggggcagtgttcctgggcagtccttccttggactctgccccccttcttccccacttgctgggcttggaagcctggccctaggcccgaggttgggcaacccgtgtggcagggtgtctcccatcccccataccagtgctttcctgcgaacctatgggtctctccgtgcaggtgaccagcgccatgtccagccaggtggtgggcattgagcctctctacatcaaggcagagccggccagccctgacagtccaaagggttcctcggagacagagaccgagcctcctgtggccctggcccctggtccagctcccactcgctgcctcccaggccacaaggaagaggaggatggggagggggctgggcctggcgagcagggcggtgggaagctggtgctcagctccctgcccaagcgcctctgcctggtctgtggggacgtggcctccggctaccactatggtgtggcatcctgtgaggcctgcaaagccttcttcaagaggaccatccagggtgagcccccagcccactcccctgtcctttgccctgcaccctctgggtacactgctgggtgcaataggccccctgatggctgtggcaccgcttgaggctaacaatctggtgtttccagtccctctacctcccagagacactctttccctgagaagtatggtaaaagcaccgggtgtgctgatgcattgcagtggatgtgagtgagttcagggtaccacctgggtactctaggcccagcaccttctacagtggctctgaaagagtccaaggcagcctctgtctgttcctaagctttgttcttgtttctggcagcttctgac

SEQ ID NO: 96680 - DNA, 14568 bp, Homo sapiens
catcaggcattctcattcgccacgaagttaccgccagtatcgcaggtcccagtgttcagatggggagcgatcagttctctcggaagtgaagtaagtgggcaggccagagtacaccatcaccatcatggctccaaaacagtgcagtctaaaagaactttacttgctgatggaaatgttttatatctacactgtagttctcttccaacttaatttatgattctagatactgttccagtcactaattctaaaactcattctctgcagttcaaaaacagatcttgtaccaccacttccggtgacccattcttcggatgctcagggttctggggatgctacagttcatcaggttagtaatagtaaggtttgaagaaggtgttgtattgatgacaattttgagaagcattttgtgctttggaaagttcctttagggaggtagggcaggcaatgaaaccttaatgtcattctgagattctgtattttaaaagaacgtggagaaatcatggaaggaaaagtgcatgatcaagaaccctggcacaatctgggaagagttaggaataacaggtagaggtagtggggcacagctgaggataacaaagattgtaagaccatttggagccagaataaagaaacaattgtttcactaattaaaaagcgatagtaacaacaggtattttgagccagagaaacaaagagaaagtgatagactcactttgttaactgatagcagacagaagaattacttaagtcctgttttatttctgtcttctccatcacaattaccttaattctggaaatgtttttaaaatgtagttaaaaaggaattcagacagaacacctagctgccttaacaaaatcactttaacacttagctgaatttgataatcaggggaacactgtagcaaacatagttcaggaagagtttcataccgcctctcatgatgtattttttaataagatgggaaaaaatgtgggctgaataagacagttagatggatttatatctggttaaacaaccactgtaaaactctaaaaacaaagttgatgtgtctgatggatcagggtcagcccgttgttcgtcgtgttgtggttttcagtgtcatttgatcatggatcctttagaaaagccagttgtatctactgactctcatcccataaaaatgcatgtaagcacatgtacagtttttggaccacgtaagaagcctgacaccagcagtatctatcatgtatggccctttttgtttttatcaatgactggagcaaggcctgtgctaatttaggttaggttccctagatagattctgaaatggagatctgcatgcaggaagcttgttggaaagtgcccacgggatccatagttgttggggagaaagtcaaagacgggtttgggcagaggcaagagctgatccgcacagggagctctagagctgagatggctcttcaaattcattctactttgggacaagggggttgaacttttacacattcacactcaccccatagaagtcactgggtaagggatgttctgggaagggggatttctcttcaactgagggcagttcctggggaggggctcagttttgagctacacggcaggcaacactcccagcagctagagaatgaatgcctcagtctagaatggcgatctgcatggtaaacgcagcttctactataatctgcataatatttgatgagatcagcctgggagagctaataggttgtccaaatagacgattggtttaaagttgacagtactttttcaaaattatattcatgattaagtttaggctttgcattctgactgacctgaatcatttgtgtttcatctctgtgtactacttgtgtaactttaatactgctaaacttctaagcctcaatttttatacagtgtagataacctacctcctagggttattgtgatgattaataagcagttatctttcggtgtttttttttttttttttgtcttaaattttagttggtttcaatacaagtagtaatttttatttccactcaggaattaaaaaaacttacacatattctaagttggaagaatagctttcactttgcgggatacaagaactcacatgcatcttctgatcagtggcactgattctaagcctgtctccaggacactcttgattttgaattcagtaaatatccagtgagcccatctaaggagtgttgagcactggtctgagcaatcagcaaaccatggcctaagggccaaatctagtctgctgcctttgtacagcccagaagccagtaatggtttttacacctttaaagggttgtttaaaagcaaaacaaaataacagtaacacgtgacacaaacaggatgtagtttacagtctggctctttataaaaaagtttgatgaccctagcctagacctggaggcataaaagtaaacagttaaaacaaataggagtatgcattacaaagaaatgcctgagctagagaagcaacaaagtgacctcactttacatgtttagggtggtcagagaaggccatctcagagagtggcatttaaagctgagacctggcaggtgaggagctagccatgtgagtggctgcaaggctgatgtaatcagagtgaggaatgtagggaaaatgctgactctggagagggcctgggtatttgaggagctgaaagaccaacatgcagtgagcttgaggggaaaggcagataacacagggacttaaaggctgtgggaagcgtttggatcttactgttttattccaagtgctaaaaggaagccactcatctggctgccaagcggagaaggggctggagtgaccagtggaagctggaaaggtacatttttaaggtacaactttaagttctaatttccaccacaatgccaccagagttctggcagtgacctgccttacacctcaccttgccttttcacgcaaaggctgctaagaatggggaagaatagcaacttaatttcttaaggtctgcagagtggacagattcaatcctagacaaacttacaacatagtacttatttcaggtcctctcctagcactttttttctggtaattcttctgctgtattctcctctcacattcactggtgttctcttcccacctctggctatctagaaatcttccatcccaaatagatgggttcatgcttcccatgataggcagaataattattccatcagtgctttttgaatgtcagtaaaacaaattaagccagtcataggaacagattaaaggtagctgcattttaagagggatttatttatttttagctcaaacaaatctcaaaatagattgggacggtatagcccattatttatgggaatatacatttggggaaggaaatatgcttgccagcctgatacactgacaatgttagaccatccttggaagtaagaggaggaggggttcgcataagaagtagtagttgtgagttagtgtcattctcagagcctccacccgtgatgatgggagatgtgtaaaacctaagttttacaaactagtggatgtggtgcccaggctctggtaatgagctgccctgtttctccgtatgagacaagtgataggggctcacaagacattgttccattcattgactactgaaaatataatcaggggattataaattgcctccaagtctccatcactatcctgtttggaagagtgaggttgagagcctggtttgggaattgttaacaaaagtaatgacactgatttgggtgaattatgcctaatattcatgaataaaatcgttatgcatgtaaatgtcagactaactttgtatattaaagtttaaatacaaactttattttgcacagctatttagagggaacatttattgaatagcttttggtattatgaaacttttgaattaactcagtatcttaaatttaagagcagcttggtttctgatgtaattaaaatacttcatttggctgttttcttctgaatctttctacatttttcaaatatattttattttagagaagaaatgggtctaaagatagcctgatggaagaaaaacctcagacatctacaaacaacctggctggaaaacacacagcaaaaacaataaaaactatacaagcttcccgcctcaagacagagacttgatcctgatgaagggtcaagggtaggggtgggaaggttgtgtgcgccactggtacttttgaaactgtgaaataggtatcttaattcaaatctcagacctgcaagtatttcttcagcatgagaaaatacattatcttttgcttctttttttttttttttttgagatgttatcactctgtcgcccaggctggagtgcagcggcaccgtgtcagctcaccgcagcctccacttactgggttaagcgattctcctgtctcaggctaccgagcagctgggattacaggcgtgcaccacaacacccggctaattctttttgtatttttagtagagacagggctttgccatgttggaggctggtctcgaactcctgacctcaagtgatccgcctgcctcagcctcccaaagtgctgggattataggccatggtttaactacagcacagttgtgctgaaggacctttttgttttaactggaagaataagtattttgtaaaaattcacttgataccacattttcatttctggaacaggatagcaatcattcatttctatcttgtgtctgtgtccaccacaaccaagaccagatgcatctgatgaacattctggaattctgaactgcagctagcctgctgtgcaatagtacaagtgggaggacgtcttcccagggctgggctggttctcaactagtgcccagatgcaaaaggactgaggcatcactttcagactgcatatatttttattcatataaagttctttataatactttattttgtggtgttaagttccaccagttatttacaaatgatgtaaaaagctttaagtgttgttaatttctaaagtgttcttgcgttttcagaagtgtaagtggatctcagttgatctgtcaccccaaacctcaaatgatccatccaccctgcttggccatctaattcacctgctctccccagtgactattttgtacctttcctctccatagatgactttgcaatctacagggaaaatacttatgcaggacatcttatatctcccccttaccacgtacagttctctccacagctgccagcagccctaacctttttgtctctccacctgtgctttggatgctcttctcccagccttttcaggatctttgtctgtcctcctatattaatgtattcaattattctctcagctagatccttgctacttggttttaaatttaagactaagattaaacaaaactatctttcacaaccacaaaccccctcccgccaagcaactaagattttcctctcattctcagccagttttcttgcaagcagtatctttagtcattgccctcaattcatctaatccctatcttaagctatctctaacatggatctttccctctactccactaatatcaatcactgtgttacttaatcccagggagaatttttaggacattcttttgcttctttaatataatcctattttgctcctaccactgaccatcctttctggcttatcatgctttaccttgccattaattagtggagtttctcaaacttcagaccctaggccctcttcctctaccaccagcagatctcatttatacccatggccttaaggtttatttctgtagtttagactactgagtaatgtgctactgcaaaaagaccatttgggtttctcaaaggtaatttaaaaattcagctgtttaaatgctgctccccagctgaatctagggtcattatgctcatcagtgtgcaagctggacacctagcagttatggacacctccactattaccacgtctagttggctctgtcatccaactataaacgatcttatttcactaattttactagtccaagctggtctcttgtctagacaacaataagcaacctagttcaactaccttttcttgcaaatctgattttccaccatggatttatcttgctttaataaagccagagggagcctgaagtggtctggcttctttacctacctcttcagcctcattttgtaacactctcacctcccataatagccatcttacaagcctcagtaaggactcagttctaaaacagggcactgaagagggaaagcagccaaaactgtctcaaaagtaagtggactaacggtatcttttttctagcccaagcctctgtatatgtcattcccccagttttgccttgtgaaaaatatgacacatacctttagtctcaactctttctcaggtttccctaagaaaatcctatcacggaactcatctcatagtgaagttttacatttgtgatgacattccctccacttatctatgtttccaaagggaagaactgtgttgtgctcatcatcgtgttctcagctcctagtacagtgctttcaataaattttttgaatacctctatacattatttgtcgtttcctgcaaagcaaaggcagaagatatggcaacattaaatgtacaatttagttggaggaaaaatacgcattgagtgcagtaaagcacacctgtcactagaaatcagtctagttctagccacgatttttgagtcactggaagaaagtacatttctctttgggccaaacacaagctattttaaggctattaattatggtgacagcagtgaatactgatcaaaaaagaacccctcctcccttataactttttagaaatagctgtttctggcagttaatcacttaaaacacaaatgccaaagtgcattaatatatttattcacatcctcactgtcttaaatgtgtatttacagactccagcaggtaattatgtcagtactcctcagactcccagaaatttcaaatgatccaggcaactcttgtgaagatcaaattttcaaaatcctcaccaaggacatcctaagagaaaaaataaagtactcaattcgacagcaaatatttttgtattacattttaatcaagaacttggtaatatgcctgcgatttcacaagcttttaaaaaactcaattactacacataaaaacaaatcttaaagagatgcagaatgccagtactatgcgtatttatttccctgggcttctcaggaagtatcagcaaaaccttcccaaaaataagctgtggaggctatcccatttattaactcaccttaatagctacagacagagcaacactacgaatgtaccactgacattaaaactcactagagaaggaaccccaatttaaaaggtgataaaaattcccattacaaagtgctttaagacatatcaccctaccttcaggtcacctttatgctcccagatggtattcagctagcagcagtctacacttcaggcatccatcttccacctgaacaaaaattagaactggctaagagaaaccatacacttmaggctagcagggtcaagatcacgcgtgkaaacgtaaaagcagcaactgttacttatgcagctcctacaccaaaggtatcaaatttaagggcaggaaaaggctgcaaagcgtttaatttacgccttttttgacaccacattcactagtttccaaagtgaatgggcaacacaaaggctgacactgcgtgaggtaggctttatggcataaggttgctgactggctgasagtaatgccgattacagcctaaaaacggacaatacatttcagagaaattttctcacgatttaaaatccgacttaataatgaaaagtgaaatgcgatgcgttttaaatggcgactggtcttgcacgaacgtgaaaactcacctgtagggtaggtgatcactcccgacgagcaccgcacgtggaaacagctgtaaccaggcacgctgcttttaagttattttatacgggggcagggcaagcataaagtcagttatacggtaaggccttttcactgacgaaaataaaaccaggcttatctggagaactccctggcatagtcgatgatgtaaacacaaatcgacgaagctccccgtttccaaacgtgggaacgcaggcctgaggccaggccgctgcccttgttcacggccccggacacttcggacacaggccgccgcagtcgactcaccagactcagggtggccgcgttcccccgcccggcgcccctgcgtgagagaccacgcggccacagccaggcgccatcccagaggacccagagmaaaaaccacagcaagctcgcaccaaaaggaagaaargacaggcttccgtcccacaatgcttttctacaagtggaaggacccactgtccgagagcgcgaggggggagcgggctgtaccatcggccgctgcgctatggcgagacgccgccgtgtggccggagggagaagtgccagtgagggaccgaggggcgtgtcaccaaagggaggaggagcctgggttctcagcccgagtcacctctgcggatgtgtggccagttctttccacagaggaggtatccagacatccccccacccgaccagggtcaagagcatatgatcagtgctggcagcggcaggagcccaaaggactttagaccacgtattttgggacccgacagaattcatgagtccagctgaggaagagtagagtcattcattcgaaagatatttagtcagcacttactatgctccaggccctggcctgagtgcctgggaatcaggtgtgggtgagccaggcaaggtttctgtggtacattctgcttgggtgagtaggccactgaccaagtgagcccggatgctgaaattctacaatgtaagtgccaggagggcagcaaaagagggtcatgccatagggtagcgctgtccgatggaaacagtgtgagccatgagtgtaattttaaattttccaattgccacataaaatgtgaaaagaacgccgggcgcggtggctcatgcctgtaatcccagcactttggcaggctgaggcaggtgatcacctgaagtcaggagttcaagaccagcctggccaacatggcaaaaccccgtctctactaaaaatacaaaaattacttgggcttggtggcgggcgtctataatcccagctacttgggaggctgaggcaggagaaatggcttgaacccgggcggggtgggggtggaggttgcggtgagccgagatcatgccacttgactccagcctggacaaaagggcgaaactccgtctcaaaaaaaaaaaaaaaaaagtaaaaagaaacagatcaaattaattttaataataacccaacatattttaaatatttcaacaggcaatcaatatgagattattaataagatatttcttttatatctactaagtcataaaaatccggtgtatattttatacttccagcacatttccgttcagactagacacatttcaagtgttcagtagctcatggggctaggaataggaagactggaagtgaactccgagcagatgtgtgaaggcggttatgcaagatctggagacagcaggccttggccagtgtggctggagtcgagtaaggagtgtagagtgacaagatgcagctggagagccaggcaggagcaaggcacttagggtcttgtcacacagggcaaggtgttgggattttatgctgaaatcttagagttgattaattatcaccacaaaaattaagcagagtttgttaattggcttttttcctgataaccataactccttgaagggacaggacaagtggcagcaagacaagttgtatgataacaactaggtctccatgtttctctaagtcctagcagagattcatccagagaccagttttagcacctttcgttgtttctttgaagcctacttctataaaagaaagaaggaaagagaagaaaaggagcttatctccgaacacatcaagttatatacattaaatacagctttttgtatctcaatcatacctcaataaagtggtttaaaaaaaaaagaaaattcaggctcacagcccagtggtcatcacacaaggactagcatgaataataaccaaatcaatctggagaaaatgactgtacagaattagtaaatgtataattattacaagaaggtaagtaactccagacttcattaggaagtcactgtaacatctggggcaaaaggaagtttgcagaaggaaggcagtaacacgaagattgtcctttaaagacagcgaaaggcacagtgtggggattataacatgccttagtcttgccttcttgctagggaaagtcagtgacatgttttggctgtgtcctcacccaaatctcattttgaattgtagttcccatactccccaggtgttgtgggagggagctggtgggaggtaattgaatcatagggttggttaccttcatgctattttcgtgatggtgagtgagttctcaggagatctcaccagatctttgcttggcacttcaccttcctgctgccatgtgcaaaaggatgtgtttgcttccccttccgctatgattgtaagtttcctgaggcctccccagccatgctaaactgtaagttaattaaacctttttattttataaattatccagtctcgggtatgtcttgattggcagcagcatgagaatggactaatgcagtgagagagaggaaattttcttggactggggcagccagcatatataggtttagtttatatctacctctgatatttgttcccttaggtatgtgaccaccattgtgagcctgagtttcctcatttaaaggtaataactacacacatgtactatatgggttagtttaaagaattatgaaaggtttgtggaatcacgtagcattgtgtgtggtacataatgacatctaataaatgactcaaatgagctagacatttcctctcttttacccctaccccaaatatggaaccttcttgtattgagttcttatgaaagggggaaacatgctgtttttcttctaatggctttacattattgctcccactttcctcttttctcttcttccctttgtatctcttccctaaactttccaaaattaggcagaggaaggcatttgttccaattactggatcagtgttaggttttaggaaatcaattcaaaatccttcctctcccctgtctgcttcagcctcctgaatcctggtacagaaaacccaattactaagtacaggtaagcagaaaggacatgagaagaagatagtggatattttctacctagtctctgcttcctccttgcctgctgggctgaggcactgtgtaaggatgttcaagccacacagtggtagtgcaaatgtgaagcaacctgggtttccctgtgtggaaggcagaataataatctctccccaaaagatattcatgtcctaattctcagaacctgtgaatatggtgcattacatagcagaaggggctttgcatatgtgattaatattaggaaccttgagatagggggataaaaatggaagaaggtagcagaagagttagagatttggcagaagggaaggcaggagaaatagacatgagaggggctcaaccctccattgctggctttgaagatgtaggaaggggccacaagccaaagaatatgggcagcctctagtacctgggaataaccctcagctgacagcaaaggagcagggatttctgtcctacagagctgtgagataatgaatgtatgttgttttaagccactaaatttgtgttaatttgttatggtagcaagagaaacctaatataacctataaggggtagagagtaagtgagctttatttgttactccaccatttcttgtcccatctcgattttctcattaggagtggaaacgagattttgcagacaaacttgtgcacatttcattttaaaataattaatccatataaagctgacttttgcttatagtgagttctagggataaccagttgctctaaggtggtttatcaatagcccatcctttctacacagatctaccatgccaccatcatcatagatcaggttgttttttttttttctttttgcatggatgtacctttgcactctctattctgtcctactggtctatttgtctctcctgtgtcaatattacgctgtctcaattactatattttttataatgtctttatattttcggggcaaataccctgccctcccacatccatatcaccacgcagacaccatgatctttttcagggaagtcttggctattactgtcccttttctcttgcacatagtttttagaattagattgtaaagttcaatgaattgaactggttcacttggactccttctcctttttggtagtcattgtttgattacgcttgtcttcaggattgtactgctaaagccatatttcatcatcttttcactgaacttcacaatctaaagattgttgggatttttattggaattgcattggatctgtgatcaactgaaggagagttgacatctatatgaaaatggtatgtgtgatagtcgattttatgtatcaactctggatcacaggatcttcagccatctagctaaacattatttctgggtgtgtctttgaggatgtttccagaggagattagcatttgaatcaataaactgagtaaaggagatgtacttcctcaatgtgggtggcatcacttaatcctttgagggcctcaatagaacaaaaaacgggataaagaaaggattcgcttgctgtctgcctgactctatcagctggaacgttaatcttctgccctcagttctcctggttctcaggcctttggaatctacaccacctgctctctggctataccactggccttcttgggcccctagcttagagacagcatcttagcacttctgagctaccataattgcatgagccaatactcctaatgtttcagcatgtgtgtatggtgtgtgtgtcatttttatgcctttcttattgtttgttgggttagggaagtttccttctatttctacattgctaatagttttttttaaattaagaatgaatgttgaattttattattttttctgcttctattgagatgaacatatgggttctttttttgttattatggtgaattgcattaatacattttctgatattaaaccaattttgcatttctggaagaaacaaaacttgtcatttcaaaaagtattctgtttagagttactgcagttctgtttatggatgagactatagttatttttttcatactgttttaaaaatttgatattaaaattatatacatatctacttaacattaataatttgtttctgaaaatcagacgttctgatcaaaaacagagcccatttctctttattttaaatggcaaaattataatggattacttgtgaacccaaactaatttcctaaaatgtaagtaaaatatggtaaacctatattaaatttgcttcctggcccccaaataatatagttgttgacaaataattgctttgttagctgtaatatagtttctttcattgtaattgcttttctgcttgttttgcttccttttctataaagttctttaacactttcttgacttttattcagtctcattgttataattagggaggaagatgtggtggtggggaagaaatatgaaagtcactctagaaatgtgtcagagaatgattcacactgaggatgatacagtaatgcctcttgtatcatcagtggcatttgtgtggaacatccctgtcactgatattcaggatgcttttggatatgctgacacatgatgctgtcatattactaattgtgtttgtgatgtatctcaaagcatttgatacacttttttttttttggttgttgctaaaaatgttgcattgagttttgggagctaaaatataatttttttctatgtaaatatcatctgaaatgttgtttgagagatacatatgttttgtgatgttgtggtcctaaatacaagaggtaacttctgggaaaatataaatctgtggaatatgcctgtactagctttataaagtaatctgaagaactattcctctttttctcttacctgaaagtttttgtgtaatgtcagcattctttttcttaattaaaaaattccacttttaagattaagtctagtattttctttgtgggacaattttaaactactgatttcagtttccttaatggacataggaccattcaggtgttctagttctttggtcagttttgttaagttaaagttcctagaaaagtatacatttcctgcacatttttaaatttgttgttaggaagttgttccttacagtatctgattatcttttgaaatctctgcttttctttcaggtatgtttatttttcattcttaatgtgtgccagaggattgtgaattttattagtaattatttagtattttaaactgtattgatgttactttttctgttagcacaatttatgtccagcatttatgtcactttagcaatgatgaatcactccacatttgttaattaagttatattttatttcagatttaaaaaaattttgtgggggctatttatgcttgcacagtgtaaaatggacattccatgttgttccaatttttgcacaatataattttttcatgctgtgcctcattattaatatcatgtcttttaaaatttccctggagatttagaagagtcatgtaaattatatgtaa

SEQ ID NO: 96681 - DNA, 325510 bp, Homo sapiens
  misc_feature (1)...(325510): n = A,T,C or G
ttcttgcagcagagggaaaggaatgaggctccgagccaggccctgctgcaggggtggtttgaattgagggaaaaaaagtaatcatatgtgagagtttgtatgcgtgcgtgcgtgcgcgcgcatgtgtgttgttggtcttggacttggcagagctagagcgcctccccctggggcaggagcaaggcagtgcttggcctccacctgcctccaggccagggatccaggaagcgggatctgcatccggttgacccgctcttcctagaggtggtcctggtgacagccattcctgagcagcagaaagctaagaggcattcctcacgtgacctggccttgcccacctcttctggacgcgggagatcaggctgggatcacaaggttctgcttgggagccaggcgcctgcttgctaggagtaggaccatctgcccaggcttaggtgggggcctgtgtgaggagccacgtggctaacaggtgaactcagaggctgcttgttgcctcagtgtgaccaacagtggacctcaaacacagcctggaatttgcaggacacctgacaagaaggtgggtggaggggggcgtctgctgggccgggcagctcctttaggtggggacgagggcagaggcgctgccttcactgcctgtcctggtggtggggactgtggtgcagcctccggccctgccctctttgtgcacagctgggggaggttggagggtgggggaggggtgttaaggtgcacacagccctaggtgccctcagagaaggccaggagctgcccagggtccccagggaacctggctttctcctccggttcctgcagctaggctcctgttacaagccgtcagctcacatcacctctccaccaaggtgcctccttgctgctggggcaggaggcctcacgcacaggcggatgcactcacgttccctctctcacctcccacagccctgctggtttaccgtgtcttcaggaacgaagctaaacgcaccaccaaggtcctgcacgggctgctgcacatctttgcgctcgtcatcgccctggttggtgagttcccgggcgcggccttccccgccacctgcctgcctcttcaggtatggcaaacagccgcttcacctgctctgttccctccccagagctgtgatgggcccgcccccaccccaaacatcccctgcagggccactaggtgctggcagccctcgagctgggactaaagcccagaagtcccgctagctggttcccctgggtcatcttacaccttccttttccacatccaaccctgtcctcatatgacctgtctctggcccaggcttggtggcggtgttcgactaccacaggaagaagggctacgctgacctgtacagcctacacagctggtgcgggatccttgtctttgtcctgtactttgtgcaggtgagtccttccaacaccccgggcctggggccacctaccagggaggtgggaggaggaggggagctgggctgaaatgtacctcatggaagggcctgatttctggggtgtgtgcaggtgagagagctgccttcccaggcctgtgcgggtgcaaagctaggattggcggccaagggtgcccagctcccaggcgccccatggctgactcagcacttttggccacaagcccagctttctgagtgtgccaaggcctcaagcgttgggggaccggtcccttgtccctaagcgcttagtgctcctcccaccactgtgctgaggaggaaggaaaccaggcagggctgaggggctcacagtcgccacgtgggcacgtgggtgtgggcctggccgacctcggctgctggggtgtccggccgccctgtcccggaaccgtctcctttcaaatcctagtggctggtgggcttcagcttcttcctgttccccggagcttcattctccctgcggagccgctaccgcccacagcacatcttctttggtgctaccatcttcctcctttccgtgggcaccgccctgctgggcctgaaggaggcactgctgttcaacctcgggtgagtgtcctgggtgggagagggcagggcctgggccacccttgcacagacctcaccctgccttcagcttccccagctgtggcttcctgagccgcctctcgtggcgtcacaactggtggctgtagttatgcttgctaagatttgggtgcttggggcttggctttggttagctttcttgattttaccctttcaaagaaacttctgggctatgggcaccctatttattcccaccacgcagcaggatctgcaggacaactgcttagagctagaatattgatctaggtttttacattgcccatctctttttgtctgtgagccatagctggagattgctggttgggggcggggggatggttgttctcttcaggcagggcagggaggcaggggctggtgctggaatccccatggcatctttaaggcccaggatacaaagggcatttggcctaattgtgaccccttgggcagcttctcccttcctctcacccctgcaggggcaagtatagcgcatttgagcccgagggtgtcctggccaacgtgctgggcctgctgctggcctgcttcggtggggcggtgctctacatcttgacccgggccgactggaagcggccttcccaggcggaagagcaggccctctccatggacttcaagacgctgacggagggagatagccccggctcccagtgatgcgcccggccggccctgggggttcgcggggtgtcttcttgcctgcccctgctgaggcgtcttcaggactgcaggctccggagagtggctctggcagcaggcgggcgcgtgggtgcagctgcatctgtttgagtgctgctttctggggtcaggtctccgcctcctctgcttctcctttctccgctgctatagaccagttcattgtgtgtggctcccgtgtctctgttgcccccttcagtgcagaaggctttgggtaggacttcgggtgttcggtcctggtcgcagagcacagatctttaaagaagcgagagaggaggccccaccctcctggcagcagatgcctggggcaaggccaggggaaactgggggggcctcagggacaggcctggaaaggccacgatggctgctgaattcaaacaaggagtccctccagcctgaataacacgtggcacaaatgggcccggcctttggcagaggagcaagtgatatgatgtgtaaagtatgttggtggtgaaagcaaggttccccaggagaggggagggactggcccctgggaagctctgagatgaggctgtggcccagctgtagtcctgaccttcctcttctttaaccctttagccctaggatggctttggtgggagaggggatagaagcccatgacttcagacagactttctcttggcagatgcaggcgggcctcctcccaggctgctccagacatgggggttggggatggggggcaccttgcagccccttcctgctggggctccctccttgtagcaccccccttgcggctcagctctggtttcctctcccaggctcacccaggctctgctcaggctgggaggcagagggcacaaaccttataattttttaaatgaaaaaccgctgctgctggctgtggctagagccccctggggctgctggagctgctgcctctgttctggaggacgagccttctccttatctgctgcccatctttccaggaagtcaggatggagtcagaacaactacagtcatcccccgtggtgtctgcacatcactccagccccataaagagtgtcatgttagctgagtcaccatttggcttcggcctggaaatagtgtgattagaacactgatcgtgtgcgaggccaggagatcaagaccatcctgactaacaaacacagtgaaaccccgtctctactaaaaatacaaaaaaattagccaggcgtggtggtgggcgcctgtagtcccagctacttgggaggctgaggcaggagaatggtgtgaacccgggagatggcgcttgcagtgagctgagattgcactccagcctgggcgacaggctcaaaaaagaaaaaaaaaagaacaccgatcatgtgcttcttggatctggtgactgttctctccctgttttcctttctttttgggtgtttgaggagcatggcttagcttgagacacacacagacactgtgtacttcagtgaagggcttaatatacagtttccaaacctgacgactcttcttcttgtaatggctgcccttttcctacctgaggccgtcttagagaaaggggccagtctcctctaatgctcagatttcccatagttggcttttgctgtgtctcctgcctcaggcagtgtcatttctgggagcaggtggttgtagtccaggcccctccccagcagggtctgcccaggctccttcgagcccctttccccgcctcctctcagcctgtccggatgacagtgttcgcctcctgtttagactgtacactcttcaggggtaggggtgccgtcagttcttcaatcagctggcacacacttgtatagtgaaatgtttacatgtgggaaaactccgccttagacaaactaccaaagtacaatcgtgtctctctctagccggaatgctacagagagaaatggaaccttagatttgcaacaaaagtctgtaaactggtctgtttgccaaagtgaacactggatgactaaggagctgaagaaggcccccagaagcggatttgtggtgggttattttattttgcctgtggccaatcttctgtgaaatacaatgtgctgttggtgcaacagatgattcaataaatgtctacagcagacctctcgcctgttatcttcctttactgtggtaataaaaggagccggagcttttagcagccagacacatgacgttagctctaggcctgagagaaattgaatatccgcaggctgggcacagaaggtaaagcgattagtgatattgatcatggcctaggggctgaaaaggcccagcggttgtccagtctcgacccagcagaggcagtgttgtttccacatggttagataagccctttcctctcagcctgagagggtggcctggatggtggagctgcaagagcctgataagagccttggcaaggaaggtcccccagtgtttaatggacccctttccctttgaaatcagtctttttgatccttaagaagaggagcaaagcttttggaacgagctgagattccactttagatccacgtacgtggctcaggcagaaggtgagtttttggcaaatttgggtgggatcgtactgtgcgctttgtgccttgtcacttaaagcagtggccgccaacctttttggcagcaggaacaggttttgtggaagacaatttttccacagaccagggctgggggtgggggatagttttgggatgattcaagcacgttacatttattatgcatttttatattattacattgtaacatataatgaaataattatacaacttaccataatgtagaatcaatgggagccctgagcttgttttcctgaaactagacagtctcatctgggggtgatgggagacagtgacagatcattcgattctcctaaggagcatgcaacctagatccctcgcatgcgtagttcataattaatagggtctgcactcctatgagaatctaatgctgcagctgatctgacaggaggcggagctcaggtggtcatgctcacccgctgctgctcacctcctactgtgcagccaggttctaacagccacagacccatactggtctgtggccctggggctggggacctctgacttacttaaagcaatttaaaaactcaccagagctcactatttaaagggacccaacagcaaatcctctaataaggtaacaggagtccctgcttccccgcgttggtctcaactttgtcttctgcattgtagctggtctctaacgtgtaggagccagaacggagaggtctttccttagggcacctgtagagtccctcctgaatcaaggcttccatgtggacctttatttttattttatttttttgagacggagtttcgctcttgttgcccaggctggagtgcaatggcgcaatctcagctcactgcaacctccgcctcctgggttcaagcgattctcctgcctcagcctcctgagtagctgggattacaggcatgcgccaccacactcagctaattttgtatttttagtagagatgatggggtttctccatgttggtcaggctggtcttgaactccctacctcaggtgatccacccgccttggcctcccaaagtgctgggattacaggtgtgagccaccacgcccagctgagtgtggacctttatttactgaaaagcattcaaagcacaaggcttgatacatgtcacaaactggttcctcagtcagcatctcatttctgttttttttttttttttttttttttttgcaccagcctctgaatcttatgggtctctgtgaatattgaagtgatcccagtcaccaagggatgatgcctccctctccagccagccacttcacctcttcctctacgaatctctggctggataatagcagggacctcattttcttactggggtcccaaagcgactcctcttgactgtggcatagagttatttctccaaacaagcacgcggcatttcccaagccatcctcctggacccagcgcctgcactccgtggggcgccattcgggttgcttgctcttttcagaccatcccttctgagagaggaggcagcgtggtggagggaagagctgtcagtgtggctgattcagaggcctacctgtgcctctgtgaccctgagcaacttcagctctcaggatctgcttctgcatttgttttggagacagcagtgtcgtctgtcgaggtgtgaggaatacattagggaacacatgtgaagtccctatcacagtgtctgggacacaatggacctcccaagaggatggcctgttagaatggactctgagcaccttctcttctatgtgggccctctcttcatcacagggccttccagacatgatacctgttatcagtgccccatcttattcctgagaatggaataactcagctgccaagactccaagctcctccaacttgtttttaaagctgaaagagggtgactccattccccgctggttcgcctacccattcccagccgaccgcaggggagtttggccaccatgtgcacgtgcgtactgtgtctgcctgcagttaccaaaaggtacccatgagcagatatccaggggaagaaagtctgacttacttagtgcttcggaggatctacacagacttctgctgagtttgctgtttgcttctactctgagtagctttttattaaggttgagggtaaattctttttaagaagtattaatattttaaatgaatcactccttttcctttcctccaatgtcccaggacttcttaaaaagctgggggtttggccaggtgtggtggctcatgcctgtaatcccagcactttgagaggccaaggcgggaggacagcttgaggccaggagttcaagaccagcctgggcaacataacaagactccatctctgcaaaacaaaacaaaagttagcagggcgtggtggcatgcactgtggtcccaggtacttgggaggctgaggtgggtgggtcacttgagctcaggaggttgaggctgcagtgagctatgatcacaccactgcactccagcctgggtgacagagtgagactccatctaaaaacaaaacaaaacatctaggtcgggcacagtggcttatgcctgtaattccagcactttgggaggctgaggtaggtggatcacttgaggtcaggagtttgagaccagccttggcaacatggcgaaaccctgtctctactaaaaatacaaaaattagctgggcatggtggcgggtgcctgtaattccagctactagggaggctgaggcaggaaaattgtttgaacctgggaggaggaggttgcagtgagccgggctcacgccattgcactctagcctgggtgacagactctgtctcaaaaaaaaaaaaaaaaaaaaaaaaaaaagaaagaaaaaatataaattaaaaagctggggttttgccaatgactttttttttttttttgagatggaccctcgctgtgtcacccaggctggagtacagtggcacgatctcggctcactgcaagctctgcctcctgggttcatgccattctcttgcctcagcctcccgagtagctgggactacaggtgactgccaccacgcctggctaattttttgtattttgtttagtacagacggggtttcaccgtgttagccaggatggtctcgatctcctgacctcgtgatccgcccgcctcagcctcccaaagtgctgggattacaggcgtgagccaccgtgcccggccccgacttacccattttttaatgaaataactggagcagcccaggaatggttttgagattgagcaggtggctgctgccagagtcccctcttctctttgaaggcaactgtggcatctaggctgggctgtgtgttgcctgcagtttgtctgcttccctaggctttgggaaatgcaggtatgcacagcaggaatgtttgtttagcacaaatctgatgtcaagaggaagtggtctccctcctcgcttgtccctgaagtaaacacagaggtagcagttaaacaggaaaggctgcaggctcagtgctgctcccccgcttccccactcccttttagatggtattgagtctccagccagttgcaggaaacctgccacttttccattcacaatgcagctgcctagctctctatatggtgaggactggagttcgaccagatttctgatgaaaagacaaagcccctggaagcagtgggcctccagttgtgacgaagcccttaggtctgcagtgggagctgtgccctctgctcgctaccctctcagcatgcagcctctaaacacagccactcaagctggcagcccacctcagccttggctttggtagggtggctggattgggtgcagcttcagctacaaaatgaaacaagagctcagtgctccctgggtatagctagagagaaacctcttccaatgaagaaaaagcccccctttctcaacaaatgtcacaggcctgtgctgacagctccttagaacggcgtctcttgtccacagctctcttgagggcctaccacagtgtccaactctgaggagaggaggtgctcaataacgtgaccgagcaaataaatgcacaaaggggtggctctgaatgtcccacaagagaccaagcaaatcatcgggaatttggccttagccctaacctgcccaattcctcctgagggagggtgcccccatcactgcatcctcaggagggtaagcttaaaagccagctccctgaagaggctgtaatggaaggagaaaagcatcacaacaccatggttttccaagtgttagccatttataaataagtacatttgctttcatacatacagttccttgtacagatgacaatctgtatacatggggcaggaaaatgcattcatttgaacttttcacatctatctcacacagctcacatgtacagacaataaaactgctcaagcaagtacagcaaaggaaaatgtctttccttatacacaggggtagatgcctctgtggggtgtggggcatccccactgcacggcttcacaactgtgtggtgttcaatatatcaggagagagaacaaacatgcattggataatatactgtacagagaaagtcctttacatctgagtcatagaaaacctaaaggaaaactaagtgcattaaagctttttccagcaagtgtcttgaaaggacagcaaagaggaggaagaatcaaaatcatattagtacaaatcactctttaattgtagactgtacatgtctgtactaattaaaatcatcttggatttggaggagacagaacagagacaaagatgctgtgctagatggaaaggaggccacgcctgaaaaggcacctgccctgagcctgatgaggaactggcctcactcagcaggaatcagccaaaggaaacaaaaaacaaaacaaaaccagaacaggaagtgtaacttacaggatttccaaaatcacctgtgaatgaagtggagatctggagccggcatctcttaactttttttttccccccagtaaattggtatgcaataaggcaggtacattcaagtactgaattttccagaattaactcttgtctggcgctggggaccaaagggattgagttgagccccctctaaccagactttctggttagcgattagcaaaagaaaaattcagccagcaagtgctacaaaaacaaagcagctagggcacttccgttccacagagtaggtctacctggaaaaatgagcgcggcgctggcctgatctctacgcgtccagcggcagcctggcaagtcagctcagcgtcggtatcagagtcagcaggaggcaatgagatgatggggtgaggaaacatgaaagtaacacttgatttttggtgtccaattatgcgttcatttggtactgactttcaaagctctgactgtggccaccatgtggccacaagcatctcagggtggctcacctgctgtgaggctttggacaccgaaatgaaggttaccaacacttcagcccttgagtggtctgtatgacaaaaggagttgatgaaaacccagtgattattcaagtagctctgcacagtggctccaccagccccattgtgcttgtgtccaggcccccagccagccaccttttcttgggagcagccagagctgagttcaaggcattgcatggtgaagggttccatgacacgtctttgcaggtagctcttgcccctaagccctttgttcattgttgttagtcatggtagatggtcggtctggaattcctagaggaagaggagaaagagctgcacctcccagtgagcgagcagcaggaccgcacagccctcggtgtggaggcagcagccggctgcctttgcaggtcggtttcttgagaaatgggcagcccaggaacagacaggcagggtgtgcgaggctgctgggcactgggagcatcaagaggaggctgggcacaggggcgggcacctcttgccccctgggatagcctattccattttgtggcaaagattcagtgagcactggttttgtccaaggcatttctgcagtagaaaaataactctctctgaatcaaaccacccaactgtgacgcttctggagttataaaagctggaggctgagaggaactgacaggagggaggctcatggggaagaaggggcttctccatgtacccatccctctaccagagcaagggagctctggtcaaccttcttccagcctctgcctggctgaagtccaaagcatgtagtgttcaaagagttcgtcttgcacaactggcacagatgcacgaagaccccttccaggcctctgttgccttctcctgaacctctgagcccgcttgcctgttgccctggaagcagctcctctcycccgaggggatgccgctgttctttgctacaaaacaagcgcagtgcagagccacagtgacacctagtggtaaactatggtgaagcacaagtgacatccacatagcccactgtacgtgactaaaatctaaggaaaaatacttatggatattaaattagatactgattaatttttaattttttctattgggtacatctctggaatataaaaataccaatatttagagaggggctcataaactactatacaatattaaggactgagaatacctttctctaagctgttctgtttacaataatttaggaaaagtgtttaataatccaggcttaactacattagcaaacttgtatatctggacaacgacctggggtactgtacatgattctaattagtggaattttcctgagccatcgagtttaagttatacacatctaaaaagaggggcacatgggggaggagcgagaagggtttgtgctctattaacttgggactttaatagtgcacgtctgcaacccggacaagatacaacagcagatacaaaatggtctccattttgtcatgccaaattctcatgttacacaggttttccctttactttgtaaataaacattaattgttaattgttaattgtgtgccttactgatccagtagataaagtaaccgtgtctcaggagtccctaagaacattgctggaaaagcactttaaaatcactgcaaatatttttcatattaaaaaattcttaatctttttgatgcttatatacaagttatttcttgtgctataaatgttgtgatccactgcttgatgtctttcctttccttttttcttgaaaaatacactaaaagacaagagcggttctgctattttctaatgaagacattactcacacttaaatatccagtacttcagttacaaattcaaacagtaaagtgcacccatttatagacatgatgtgatagaaacccattagtgcaagaatcctgggccaatggaacatacaacttggtgagaaacctattaaactgaagtttgtcacctctgtcctccatttcagggtggtatgaattgagtaagtttcatctgaaacatttcctcccacctgaagccagacatggactcagcgagtgtttgctgctggggaaggggcagctctgaaatacagtactcggatcattccatggcagtgaagtagcaaacagggcacagggcacaggcagtctgcttgtaaggaaaaacgtctcctgccccaacaagctctggttggcatattctagtcaaaaacaactggcatgcagcagtgatacctactccctcttatgatggccaaaaagaatggcattttgactgttgacattttaggtgttttgcccatagggtataggccctaaatctttttgtcctggaaaactgagagaccctggggagaagcggcatcagcggcatatttgtaaagctacaggacctgctcattcgcctggacaggtgagtgcgggtggtgtgtggcgttccaaatgagcaggagcactttcctgacagacactgagaaattcttcaaaatgcagtggctcctcagcgagaggcggttttaaggagtaagatgtaaagatgccagcagtgctgagacctggccaaaaagcaatctgagaggccactgggctcctggctagaggttgccgctagagctacacatttcatcttcctgatgtgagagagaggggtatagagatggagagaggacgctgatgcctaccctggtctagctgagaaggcgtcgctgatgcccaccctggtctagctgagaaagcagtccttaggtatcagggagtgtggaaagaggctggggcttgagttagtcttgctatttgctttcagcacagagacaagtcctggcctgttttaggtttgggggtggagaggtccgtctatttcgcagaatctaaattagtaaagaaatgcttctgatctcaggttcatgctccctgtgtcttaatgatcccttcaaagggcacttacttacttacttacttaccagacacatgggactggtcgcagccagatttttattcaggaaactgcccttcctgcagcccttccctaacagagcagaatgattcctaacaacagagaacgaatgctcctttgtttcgtttcagttgcttagttgagttgtttagttgtaagagctgatgtacagccagtgccaggcctgtgccgaggctttggttccaatgttcttgctatccactcaatagtggcctcgctcactcaaaggtcagcctaccaaatgaccacgagacctagaagatgtgtcttctagacaagcttcaagatcagaagcttgctgtctatctcatgcccccacccagggctgcaaaacagggctgaaaggggtctttcttcaccctgaaacagtttttgctgcgtctgactttaaaatatcacactctcataaacactcctagaaaaagaaaagaaacagttcctgtaataatagataatcaaactatagatctcaaaatggaagtagacaacaacgggcatgaccctgggtggaaatattgggactcagtctcatggtcccaagagattccaatctgcttctgaaagaaacaatttctgtatgacaccatctgggtttacaggaagagggccactagaacaaaatctggctgtaggtgaagatccaactaacgggattgtcacaccagccagccttcggttagagtttccttttagtggagtatgacactcagtgatgtatcaggatctaaaaagtagatgtctccagaacagacttcctatagcctttcactgagaatccagaacaatcttttttgtttttctatgtattcattccctcccccaccctggaaaagcagcagcttttagtggttaattgtcggctaaaaatctagagaataactctcagtgaattctcttaatagccacaattctcatctaatttccttggctgactgcaatatttaaagggctggctgtttttgacatgttcctacaatgcctcttggaaaatcaatgtagtgacattttacataattatattggggttttcttccaatttagcacttaattcttctctctctgatccttttaccccctaggaagaccagcaataatcctaatgcacactgcagacctggtggctgcagggcgctggcggtctggggaggggccacagcatgagaatgcgctgcggctggctgtgtgggtgacactggctaaggatgcaaaggcaaaggggcatcgcactctttctaaagtttctagaagaaaacgaacaagaacaccttattttttaaaaaaggaaaaagacaattacacaacaagaacatcagtgaaagcgattgtctcctggaaaaagctgaccagtgtgtctgatctccctgggttaaagcacacagcacgaaaatctcctcgttggcatctgaagagagggagagagcatgtggctgggcacagacaagagaaactgaagtcctggctcccgggaggccgcttcccagtcggctgcatgcaaaggatttcagcatgtgggctgccacctctgaacaccacacagaaactacatgagaaattaagccagagaactacctcgaatgtggaaaccaagcctgaaaatgtgcagtgaaaacatatgggtctcactccaacaaaacgtcttttaaacattagactccacgaacggtctctttggtttgataggggatgtctgcccttgccgagagtctcgggacagctgcctgtacaggttgtcctggtatgcctgagccacaggtagagtccgagctaccttcacgtcgggataggaggaggcctggctgactcgctccaagaggtctccacgagacccgttagccagcatcccatgggggctgtaataatcgtcctccagcaaatggccattctgtgcattgttggttttgttataaaaggcaatgttgctgatggatgatggtggactgaaggactcaggctgaggcaggttgcctggagacgtgggactgaggacggtgtccacagatgacactgcccaggtccgattctgctggtggaggtgggggtactgctgagtccgtgctgttttatctatgatccccatgaatggtgtggtcctggatcgggtgggctcactggggtaacctccttgagttggagacactggcgacagctcgtcacatgacctctcatatgcaggtttcagtgggatctccatttgctggatggaagaagatggccggaaggtcggagttaggttggaggtggaggagatactattgctagatggagagaagcgaaggcctacactttgggaatgcagcaacggcctgggagttggcgggtgcggtttgatttcgttagggttgacactgataggtcttctgattaaatgcgacacatcaggggaacctagttggctggaggagcgctccagatctagttttgagtgacagactgggtaataggatgctgactggctgcgtccgatctgtggtgtctggctgtatctcacgccacctcggtatgctgaggaaggtcgctgtggaagatcctctttggtcaatcctccatgctgacagatggcgcctgcactcaggctggcttggacatgctgcaccggccttccatcccctacgattcccccaattgacccttgataaaccaaccggctctggctgactcctatgtctccttgtgaagactggtatttactggccattgaatgggctacttggccataggctcctgtggggatgacggtgcttgaatggacggctgggctgggctggttacttctcacaatctgggccttggcaggctgtagcctgagcccttgctggggaactgccacagggagctgaggcatctggtagggccgctgggccattttggataatggagatttgggtctgccaggaagctgactgacgcttgtttcctgctgatagcgcacgggtgaaccagactgggatctatagacactcatactttcagctggagggctggcccgatactgagggcctctccggagaggggaagggggagggcttgggtattctttgccctgtcctcccacaggaggggggctgaaacggtaagatcctccctgatgagccggggaagtgtgtggtgggctaggcctgtaatgtgagttctgatgagttggagaaagggcaggtgaggtggactgataggtctgtctagtgggagagcctacagaactactggaccggaagtcaaaaacctgatgagagccaagaggtgagctggagatgtaggctgagtcccgatgcgggggagaggagggtgggctctggatgaccgggagcccctggctgggccgggcctctgtctggaggccaatggaaacattttcaacatcctgttccaggtactcctcctcgaatatatcctgtacagagtatatgtcttcatgctgtggctcaggttctgcttcttccggcaactgctgctgaggctgcggtggcggcggtggctgctgtggctgctgcatctgtctacactcttcttccactctcagcagaagtctctggatctcacggttgttgggacacagcttgatggcctcgttcaggtcctctaaggctgctgcgaactgtctgcttgacaaaatgtgaacacaggaactggagttattctgaatccagagaaatcaccaagagctgagaacatggtcactatctcagagagctgtggtggcgtctgtgggagtctggggtatttcggtttagttggatttatagggaaggaaacaggaagactcattctggaagagtccgaatgattccctaacccattcggcctccatcttccttctggcctctctgggaatagtggagaaatgccccattttgtcagtccagccaggcccttcgggaagttgttttggtgcccaaacacacaccaggcagtatgagagttgggtggggttgtcatttacagggtcactgtcaagtagcttaggaacaaaaaaaactacatatttaaaaatcttgctgatccagcagaaatttttctttatattctcaatattttagctccaaatttcaggcctgttctactctaggcaagaaccctgtcctctgccctttctaaccctcatctctcagaattgctgtgtctccatttgctctatcaaagtggggcaggcattaggcttgctgactaggtcactcggggctggagctgagctgactccaaggagactctaatttacaaatgaagaaatgaactgtcagagacattcccatcttctctactaatatcacctgacaggggcaactgaccttgtgaaaaaggaactacccagagggaaggagaatttcagtcagatttctgtgaggacttcgttgccccagctaggtaagagtgcgatcactgccaccaccatcactagcctcaagctgggtgtgattttcgggaccatgtgcccctggccatagcagtgaacctgaagcagttctttcccatgcagctggggaggaggarggcaggaggcataagagacagtgacaagttacacaaagatcactgatggcaggttctaggttattctgggagcttttctgcccagtggccaaactaaagcagatgggcacaaggaatgtggaatggtgttctcttagagggtcctctccatcctggcagcaaggacctcttgactctgtgtgtgtgtggtgggtgatggtttaggtggaagggggtctgatgccaccagacttgaggagagccccagagggaagactaactaatccgggattcctcaaacgcctatgggagaaggaagaggaacctgtgatgttaagtgaaccatcctactttccctctaaagcgggggtggggtgctctgcttaagtgatttctttaagtcgccgttgtctctttgtgctagctgctctgggggttgaaaaatgcctgagatacggcagaggcttcttggaagaagctgccattctccagtgaaaaagtgtttttctcccgaagtgaaacattcgtggcctccacagcccagcagatttgctgatcttgagctgagggctgtgctatgggagccatccccaaagcttggccctgacagttctcaaggacagagatgtatttgggtacatatgccccagggtggccgacrctgccttggccaaattttcagaaaagagacctcttgctttcaccctctctctctctcctcacctgctgctgcgttttgcccttgctctcgcatagtaagcttcataagatttcggtttcagctccagggccttagtagcaaattcctccgccattccaaaatcctgtcattacaataggtgtgcaaatgagtcattgatgagatataaaaaatagacaacttgggaataaaacaaattatttgtacattttttgacattcatggatggaacgcctgggacgctagacgtgcctgacatggctcaagccgcgtggcctgtggactgaaagttccttctgcctttgtcctgtgtagcgctgcgactgctcactggactttatctgcccagaatattaaaatagttttaattttccctctttttgcctttctaataaagttctcagcccggaagccaaacaccaaccctttccagtgaagctcctgaagttatccatgcatgtaggaggcaaacgcacacatgtccacatttcacgtggaccctggtctgagccccacaccttcctgctacatgcactacactgtggctttctaagggacaggtgagaaggtgtcctgtaaagtccgggaggatgacgtctgtaaaggaaactgcactgactacagagactagagggagagggggtgtcagacagacctgggttcaattctctgaccagcttcataacccccaagtgtatagtgtattttctcatccatacctaccccgggggtaggatcaagtgtgatacagtatttaaaagccctgcacagttcccggcacatagtaggtgctcattaattatcgttttctttctatttcacagaggcttctctgatctgttcctttttttaactggttccttacttaggaaacacttaaaattaaaaataaaacaaaacaagagaagaccccagctgtgactgaggtctgtgctctccctagaggaacacgctcacaggcatgtcattcctgagaacccctggaaacagagactggggggtggggtggggaacaacgccgactaggcagcctatggttttcagtattcccttaaatactaagctaaaagagaaggctttccccttcttttagtgtcaaagccacagtatagcatggtagcctctggttatggtcatgagtcctaaggcagaaaacaaggccttgggcagaacaaaggccctggggcataggtaaaaaaattttttaaaagttgatgggaaatcctctacctaagaagacagacgtctggtgtttggcacagtattggcccaggaggtgattaacaaccgcttctgaacaaatgtggagctagaaagaatttcagcttttatgggtcaccctctccctgctctgcttccagccttacccttttatttgttcttttgggaccatcattattcctaaaaatatgagggcatttttaaaaagtctattatttggtagggaaaagagatcagtgggttggcagcaacttctgagctttgcctcatcctcatcggctggtgcaggggaggccttggtgctgttcctttcatttcacaggagaccccaagagcatgaaaatctgtctcccgagaccgccaccttctcccttcccggggttggggggcctcttccacatccccacttccctcagcaccctggagcaactctgcctctgagggccatggccgtgttctctgagacagtcaggtttaactctgcctctgaaggtcatggctgtgttctctgagataggtttaactctgcctctgaaggtcatggctgtgttctctgagacagtcaggtttaactctgcctctgaaggtcatggctatgttctctgagacagtcaggtttaactcaggttccttccagtgtcagggtttagggtctggaatggatgatctaaaggttacacacacaaatctttctggaagatccctggccatgaggttcaaatcttgcttctgtccagctgagtttttaattgatcaatacatctgtttggcttggattatttttatctcctgaggaactgtgagacctcaggcaggtagatgtcagagactcctgacacaatcttagctatttccaaaacctgagagagggttcttggcttggagtgtcttcacgttaaagggcagtggctgagggagcagtgtctggggacatgtgagatgggtctgcaaggtaggcaggaaggaccgtggcttaccagggagacgataaaggtccagggggagttctgagattccccctaggacaagaagggacatagcatgctgggatacaaagatgaggaaagaggcgaaaagttcgatagcctcagaaattaaaccttcaagaccatggtccaagccctctccttagcccttcttcaaatgataagggaatatacctgagagtaatgactacaattcacatctaattgcaactggaattctagtgaccactgctctcacattttcccaaagaccagaacactgacttggtggtatgggggtgggaaagatggtattctcatcactttcagttaaattatgaacattcagaaagctgcaaagtactcgcagcattaatttctgtacagtttgagatacagattgtacttagacttgatttctttcaaattgcaaatgtcagtgctctgtgaaggacaaccaagttccaaatggggcagaggaggatttcaggsgcctggtaaaagctagtgagtgacacaggctatcagctaccaggattgcagaaaggagttggggtgacagggacttacgttcattttcctgcgacaccgagagaggttgaggaggagagacacctttagttcccggaaagttttcaagtcctcaccaaacccttctctagggaacttcttcagggcgtactggtagcgctgggcagcttcctttactttacctttctaatgggagcacaagatggcgaaacacacagttggtctgctgaacagctgaggaagtgtggtccccactcccttcttcttctcagcagctgttactaagggctaaccctcccaaacgccagcctagagaggagttctggccctgatggtgagggcagaagggtctagtcttttctataggaaactcacctggcaggaaaggcaaggttgaggggatacccaagatacaagccagggaggcaaagccttggcaaatggaaggccctggaccctgacttcccaactggattccaaagaggctgaccatgctcatttcaaagttcctttgctctctataacacatatgacttcctaaccccaagcactccaaagttattacttcctccttaatttctggcttgtctggagaactgtttttttggtctgacgctccacctggccagccctctagaagtcactctcttcctcatgaaggatgtgggagctaaagcagtctagcagttgcttccctaatctcatggcataaaataataccaatcagtgttccccatttttggaaaggcatggagtagggtggcagtagaaaagtgaagtttagagtttgtgattccatctgatgttgcaggagggattatccaagaggaagtaaatctatgaccaatttagagatctggccacagcgaccttgaacttttcttccactttgtatctgaaaatctataagctgagaccagaaagatgcaggcggcatctcccacccctttagctgatctttatccactctattccttctctatagttacaactccacagggatcccagtcttttacttttcccttagcaccattcactaaggagagatttggagtctttcaaggtagaattctgaggggaacaataatggcactgcatattttcattaagaggactcctcgcctcagaataccagaagttatgctataaccaggacataatctgagagtaatgccattgtgaagtccataaatatgacatctagggtaatgaggaccttctatgaagtcacgtaaaatcaaggttgggccagggcttaagcttcctgaaagcctgggagtcctagattaccgtgactcattcaaagggtacttagaagatagaattctgctcctaggaacttgtacactcctgacacaggtgagaataatatgcttcacaactatttctccttatcttttagtcttggggaagtgtcagtgatgactgctgccaaaaactgggttggatttgtatgaagcttcgggacagggtaatccagctgatccagtgcgatgactttgacatgtaatagaccaaggaattcatttgtgtcagggtatggagccttcagcttggactgtgagtacaaaaagcctccacagtttttgttattgtcattcagtgaatgatttcaaacaaatcttataattgctatttgtcttggtttccttatcttattcaaggatgctgataagctattgttactatatactttttaatctatgtatatattatgacatatgaaagctaggatcaacatactggaaatagctatactacataattttactttgacttgtctcatgagtttccagatcctacctaacagattccatgtaaaaatcgacaaaaccatgggtgagtgaccaggtgaaaccagggctttagattgatcagctgcaggcaactataggctactcttgctctcttggtaaggcagaaccccaggatccccaacatatgaggccatcactgaggaacagtagtttccctttgcctctacgcaaaggatgagaattatcaagactttgtaagattctacacatggaaaacagtcagtggctgttctgaagaaactgtgtccctccctcccctcaccttataaaacatgtccccctcttccatcagcttgctcaacaggatgatcatgatgtctggcttggaggtggccatcgcccatgtggctggacctgtagtgtacaggatgcatgatgggtaaaaaactcatacaatgtaagggtggtaggaagctaggtgaaaaaaataccctaggggaatttctgctgagagaacaacttgctccacaattagtacctcatcttttagacctgggagtattttagtaactcccactgccaagaagctgcattggatttgtattcaccttaaaataagaatacttgaaccatgtgagcctgccccacgcgagggcagcaaagcctgcgtgctgcatgtgggcaagcaatggctcagtttggaattattttaaataaggaattgggaggaaggatttatattaaacattaccacaggatttgaaaagtccaaaaagggtaatttattttggatttgggactcaaaacccccagatgtttagcctcttaactttaaaatatgtactttgcagaagggaaaccactgataactctaaagtttcccttaaatgataagtaccaactaggactccccgggattcactttgaagcaggagcacagttcgaatgtcaatcagatgtgaaacaaaccaacattactgaggatgactttacccacaaaaagaaagaaaaggttaaattgattagtttacaaatgcctgaattatttacaaactatgcttttcaaggttagttatcaaaagttcaagttattctctacaacagtcattaaaaaaaatcttyttttaaggtgaagtaaattaaaagattagaggtgtagggaactcatgcaggctaaaccaaagaggagaaggcaaagctgaccaagccatcagaccacgcctgatgctgacagcggtgaaatatacctcgtgggcgactcggtaacgtctgacaaccttcaaagaaaggagaaaacaaaaagttgtaggagaggaaaaaaaaatggatgaaggtgaaaaaaaaaaaaagaaggaaaaagcagcagtgagaggcaggcagcacaaagccagcatatcagccaaccctcgtctataggtctgtgggcttggggagcagctgggacagcggcagcagggacttgagtctgaagcacattcagagcaagggaaagcaaaggctcacggcagcgcagagatccaggatgctgatagagtggggctggaacagaggcagtgctgagaggtgcttaaggccagagcagcctcctggctaaggctacaagggacatggtagagaaccacgtggttctggacacaggggactgcagaccatggctcagatggcgctttccctgggccaagagcctctctgttcacttggacaataattgggccagggaggagggggaactatatacactcacaccaaatacccagggcagccagaccactggaccagtctggcccctgggcacagatggccaacatcctcttcccttctcctacctatcttggctcctttcttcagaagagtgacaacaacagaagtgttccggcaccccactgccctatccaaagggcgcattccactgtagtcaacgtgctcgatcatggccccatgatctaccaggaactggacctaggacacggatcaagcagagaagttaggacaggcgtaatggctcagcactgttccaccgagggctctggctgctgcctgccctttttcaactgctggcctaccccaggctatgctgccatgtatttcaggccttagctatatccttgatctttaacagcattttgaatattcttgctctctagcaagtatagatctgagagctctgtatcaggaatcatcaatacatcactccactttcaaccccaggtagtatggatggagaatagcccctctctctgctctcttgaggcttgtttaaaggtacttaccacctcagcatcgccatagaaagctgccagatccagtggggtacggccattcttgtcagcatggtctgtggcagctccgttatccaccagagaacgtactactgagagatggcccttcaaacaagcccagctgagggctgtcaatccttctttgtccataagagcaatggaggcacctgcaaaggcaagtgatagcacagggctgaggagacatggaatcacacagcaggaggggaagtacgctgaaggggcatgctcctgcaaagaacactgctcgtttctggactatttccattttaagactgatgctggtatgccagttgtatctcaactgttaaaagttcatcctataagctttcaataaaacagattccagtcgttttactgagtattcagggtcatccacagtctattcctaattactctctatacctgttttattattcccctgtgagaatcctccactttggccaaatggatgtgctcactgcctctcggatctcccgtcaatcctcccgcatcctcactctctgcctctcggatctcccgtaaatcctcctgcatcctcactcttggtcatgctgctccatgtgtggaagagcttttcttcccccatgacttgcctcacttctcattctctaggaactatctccatcctcctgcctctaagaagcttctcacagttcactgctacctcatcttaagtatgcttaacataagtcaacttattccattatttmtttttatgtatactatttgcatgtaataaattctcaatgagcattttcttctgcttctttttttttttttttttttttttttttttgagatggagtcttgctccgttgccctggctggagtgcagtggcccaatcttggctcactgcaacctccacctcccgggttcagacaattctcctgcctcagcctcctaagtagctgggattaaaggcatgcaccaccatgcctggctaatttttgtatttttagtagagatggggttcaccatgttggccaggctggtcttgaactcctgacctcaagtgatccacctgcctcggccctcactgcaccagagttcggtgaatgttttctgagctgagcagaagccttccattgataatagtgctaactccttgagacagtctcatcaaataggagcccaggacatgtttgtcattgatcacgatgccagggccccttctccctccccaggtgggggaaataaacacgagaggacactgagcccaggacaagaaagaaatctagagtttaatctaataaagttaaattcatagaatcaaagaataaaatggtggttaccagaaactaggagatgggggggggggattggagagatgttggtcaaagacacaaaattcacttagaaagaagaaataagttcaagagatctacggtactagttactaactagtacactaaatctactctatagttaactatagtcatagtgatagttaataacaatatatacttgaaaactgttgtgaaagtacattttaagcattttcaccagaagaaaaaagtgtgtaaggtaatgcacacattaagtagcttgatttagccattccacaatgtatacatatacagcttgagtatccctcatctgaaaatctgatttcagaaatgctccacaatctgaacctttttgagcaccaacatgacactcaaaggaaatactcattgcagcattttggatttcacatttttggattagaaatgctcaaccagtaagtataatgcaaatacttcaaaatgcaaaaaataaaatcccaacagaagtgtttcagataagcgatatataactaagcatttcagataagggatatacagcctgcatcaaaacatcatgttgtacaccataaatactgttcctttttatggttagatatgtttagctacacaaataccactgtgttacaactgtttacagtaactcagtgcagttaatacgctgtacaggtttgtagcctaggagcaccaggctatactatacagcctaggtgtgtagtaggctataccatctaggattgtgtaagtgcactctatgatgtttacaaatgacaaaatcacctaaggacacaattcttggaatgcatttctctgaacatctcccctttgttaagtgatacataactgcatataccatttttacttgtcaattaaaaaaataaatatttggctgggtgcagtaactcacacctataatcccagcacttttggaggccgaggtgggaggactgcttgaggccagaaatctgagaccagcctgggcaacatggtgagactgtctctacaaaaaactaaaaaattagccaggtgtggtggtggtgtgagcctgtagtcttagctactaggaaggctgagatgggaggatgagatgggaggatcgcttgagcccaggggttccaggctttggtgagctatgatcaggccactgcactccagcctgggtgatggagtgagaccttgcctctaaaaaaagacaaaaacaaaaacaaaaaacaaatacaaataaacaaaaaattcagagtttaaactactcagccttattcaataactccatccccacttttaaattctccacccaccctttcatattctggatctgtttcccttcaacatttctattttcacttgaaaggatcaagcatacctgacatgctgttttgtaatcagtctaaaatccaatatacatttggttcttaagacccagactgtaaggccttcaatggtaagaagcgaatcatttacttgctagaagagtacctaagacaacgcttttcacacagtaggcatgtcatatttaactacatcagagatcaacttactgcaccaggacacttggctgccccctcagctggacaggattcggatgtcagctcaagcttagcacctgccacagcaggctcagggtttactcagcagttatctagcctatcacctttgcatctctggaggtcattagagtctatggtttcccacaggaggatgaaaagctggaagggaccatcccttaatcctgatgagagccatttatgtaatggtatagtttgcaattaaaacactgactctaatatggaataagtttaaatacggaacagaatccaaggcgttttctcagatgcaacatctataaatttcctggacaaagtatccagtggaggaaagagtaggataagaaagttttggatgtacattacagatgaactgatttttccaaagataaggaaagagaagaaattaaaaggagatacacatgaaacaaatccataatatgttaaatacttccaaaatccaatttgtaatcttcctcttctctcttttctttctcatgcagttaatgaaatcacaattctcccaaatgtccgtcttacaactctggagttatctttaactgttctatccttatttcctacatctaatcaggcttcatatccaaaatacctcttgcacatagcccttttttgttctatgctgaaagctactgcccttgggttaggacctcattatgcctcatatgttccattacgatggcttcctaactgatctcctggctcctttgtcaaatctgctgttcacatactgccagagtgattgtttttaaagcataactctgccatcaattccttatttaaaatttttaaagcctccccagattcctttagaattaagtccagattcttctaacttggtccttttccatttccacatacctttccaattttattttccgtagtccccttacattttactagacagcttgcatatttctccaaacctgtcattcctctttggcctttcatctatgttacttcctctccctaaatacaaaacatttttcctcttcgaatttcaaagtctgtcctagtctaactcaacggacgcctgtatcagagcactcaggattctccgctttttaaggcatttatctttgtttcatctcttccctgccacattatagaccctttgagggcacagrttatagtgtattaattaaaaaaatcagaaccactcatagttcctagtatagtgttctgctaataacatagcctaaataaatctttgttgaattcattaagcctctaagtgtggaaaaaaatgaaacagtccaaagatgaaaatgtcttcactggtaagggagaacaaatacctggaatctatggctacggagcctctactggcacatgacaggtactttgcagctatctaaaggttatcagtggctcaagagttcctgcctctttcagtggacttggtttgttctggaatattactctggacacatcttatcttgagaatctaggcccaaccttcctcctccttgcttccccagcagaatgaagggagagagcatgaagccaaatttctttggtagcttatatggggaaggcaagagccacttcgcaccctgtaagagcaactctctgattctgacccagccttgagtctgagtctgtggaaaaaaatcttacttaagggatacagctaaagatccagtaagtctctgactgagctgtagtttgaaatcttagaagaaacctaatttcttcctaattaaactaccctcagctgctctggcctaggcataattcttcaggaggttggttttcttgaaggaaagtacatgtgcttgtggatgtaattaccgacatttgcgtccagtttactaatagtggaggctaactggaatgactgcctctgtctcttgcttcaagtaaatgctcaagctccactagatggcactgcagagtcaccagtgatgagctttttctactacagaggtccatcatcagcagccactgttatgcacaggtgatagaggtcacagcaaccaacaggagcctgacgtactttatgatggtggtgtgatcatcatctcctttaacttatttcccattcaccaggaatttgtggatgttggtaagtgtcaaaaggaatttattactacagggtaataatcttgatcccccaaatagcatcccagagtcagcagggatcttcactggcatttgcctcctttgaattcaagaaaaatattagttgtgcaggcttacaaaagaattgataaagtcagaacacaatccccggaagatgaacatttattgagtatatatttttaaaaaatcaaagtttggagactactgatctgaatgagaatttagaatatgttaatttcatttaaatccctcaagtcataaggaaatagagagtatcagagttaaaaacattacactgaatacaagaggggaggagatagcctttcattttccaaccaactggattaatatctgttcttagcatctcctgggatccattgctggaaatcatgagttcaccaggtaattatggaaactggccagccagctctagcattccaagactaaccttgtgcaagcagaaagtccacggttcctagatggccttcggaagcagccatcatcaggggagtgcggccctgcttgtctgccatgttgacatcagctccatgggtgagtaraagatcaacaatctgcaagtgcagagaaacagggaccaattagcccaaagaagagctgctgagaagacacgtgcacactatctcttactctgtaggaattcctactgctgtacgagtcacccatgtatctttccacttcccccataagtacctgtatagtcctagtaccatgtgatttaatctctctcagggacagtcaaatgagaaggattcaactctcaatgtctgactcagctactaagtaaaaaagaacttaacaaaggccaagatgtaggattaaacaatcccatagcggaagttccaacataaatcactcctttattgccctctagtggttgcaaatctgcctgtagttaatacttgcaactgaactgaacataatcaagtgactctggtaactctttagggctgtttggcttctacagccttttttctattgaaatacttctgaagattattatcagtgtgctttcctttccatcctaagtgtataaattaacatttatccagaatccaaacatctaaaaggattgtgttgttagaatttgcattcactgtattttcttttagtaagtctcagacatctgcaagtaagtgattagcagaagtccgctgagaaatgaaccttccaaggagtctttggatgctgtgaaatgtgagaaggaggtcactctatcaccaggacataagtagttagtccttctatacaatctgtatcaagtgatggttttgaatgttaactgtcgtattctcaattaaccagaatactcataacaaaggtccaagtcctcaaacctgatcactgctgggtaacccaaactttacttgtgaycattttgctctgtgcatcagaagtcctcacctagaactcagtcctgcctgagggactggaagtggtcgccctgcttacctgccagtggccctggcgcactgtgctgaatagtggcactgctcctcggcggtttggctgggccactgccgccccttgttccaagagcaaacggcacacctccagtttgccccttccggctgcagctgttagggctaagggcagagaacaaagattgaggataggtggttctggtcctctccagcgctccatgttaaacgtgacatatccttgtgtttcattaatgtaattgctactttacttctaagaataatgatttttgccaccttttccataaagaaaagttctaaagaaaaataatgaataaagacacatttaaattgcctcacaatatttggagacaataataayaaatctattgaaaattcacctttaatcaaactcacttggtttcatttttcctaaccagactgtcttctctgctttggtctacctctcctttggtacctcttcctagctacaaactctgttagtctacgtgtgggtggaatctaaagacaagagtctttgcagagataaaaagtttttttttttgttttgttttagaattagctgggaactacctccagccaagctctacccctgggctcttaagcctagagaaccaaagttaggaattgcagtccaaggtcttgggccagttttcattctttttcttcattagttgatacagaagtttctggtacatttgcaatcattttttatataaggatttgaatgattcaaggtagcagtcttaaagatgagagaagaggtatgacaaagactattttcttctgaatataaaataatgaagtcacaggtaaaaatagctacagtgagtttaagagacacattaggaaaaaaacagaaacattcttctttttgtgccactgtccactgacaatatgatctctgatacaaaggagattttacgaacgcctattttgtcctcagagtgtcgtttcaacagtagaaagaggagtttggagatatgaagtctatcttttaacaaatatgtatttgtttcatttaaccatgggctctcaggtgcacaagtctattgttttaaaaaatgaggggtatggaggatggaaacactgttagaacatgtaggagttatacttcattttaaaggaagaggataaagatttttttttccaaattgacttaaaaaattgatgtagtagtcagcaggttcttcttttattatggcctcctactccagtaacaaaccagaaaatgataatatttggcaggcacagatactgcagtttgcaaactttaaaacgtattcagagaagcaagtaaaatttacatcaaatggacatttgcattcatttccacttaagtgcaaattatggcattttgtctctggacttggccaaatttatccactactgagtcatatgcaaaatgaaaactacctgtaatttccgcaagtataaaccttcaagtaacattttccttccttctgcaaggataagaaggacttatgaagtaaaatgtggtaattttagaagatacatgcactcttaaaccagttctatctatggcttgtcttatgtgtattttcaattttagttggaactcctgacattggcatttcttttcagttccttacgggagggcagtggcatggtcctatctgaggtgagggtcatttccatccctgagtgggtgagctcaggtgttaatggctataattatttcctggacaaagaagttttatctcttgttttttaaatataagtgatgctccctctttctcaagttcatatttctaaaaggttagaaaacaaattgtgagttctatatatgggtcagaacacaagagtagtttaataatttgactggatagacacttactaggaaccataagaattatctcggtgcataaaacaaaccatttggaaaatttctaacccacattctaaactcgtttaaagtagttactaggttgataagtttgcagcaaacctctgtatgtgagggtgccaaatacattatttttcacgaaagaagttacagcatcctagagaaaatacagaatttcagaatgaagcctctcactaatgatgccagttcacagaacacatctgaatattcacaaccagtgaccatctggaaagccatactgtccagtctgacaattctatggctctggctgccccatttctccccactggataacacatttacatgtgagggaatgttccatttggcctttttctttgttgtatcatctctgttgtttaggttatgatgtcatttggcagcaaccttcagctgatagctggacatggttaacacagctggccaatttcatctcagaacaacacaactatgtaaaatggagtctgggcttttcaaaatccaagagcaaggagttgtatggctggattttatatgagatttatcgaaaactgttaaaactttctaaaagaaaggagatgaaggtaaagccaattctataaaacaccaaactgcaaacagagcagttaggaaccaactttcttcctaaaagagcagtaacagaatttgtttcctagcttgtcagcatctgacgagatgatctgacagaaatggtcttttttcaacgggaaacatctaaggagttggaagaggcagacaggatgtagctcagagttggggaaacagccagagtctgcttggatgggatgctgacactaaagagaacgcagagatacacatgactctttcatctactttcaaccttggaagagtccagcacagacaggtcatgtaagatcaaggggtcgggtaggagggggaagtggctggggagaaataaactgatcactgctattcaaaatgacattaataaaacacttattgagctatatgtcagacactgctctcaaagaactcatggttgagtaaggaaacagacgaatatgttaatatagtgtgatatgcacaatggagatatgtccttggtatgagggaaggcacagaggaagaggtttctgagatggcctccaggtagagatgataatgtgagttagatgctgaaagatgaacaggagatttacaggcatggaaggtgtggggtgggccaagggagagcatgaataaaggcaatgaggggaaaacaacatgtttactgttattggaattactggagaagacaggcaatatatgagactggaggttattactggtctttttatgctacattaaaggacttaatcctacaagtagtaaatgaaggtcagaaagcaggaaagtgacacaaacagactatggcttaaaaagaccactttggctgaagtctgagagatgtatcacaaaagggtgaggctagaggcagaagctcaattaggaggtagctgcaataatctaggcaaatgatgatgagggcaggaattaaaggaatctagtaagtttatgtcgtaaactctggtttctttttggggccatgtatttccagggttggcctccagagttgctagaagctctcagcgctggtcctggtctgtgcccacaacacaagggagaggagggtgtggtgaacaatcttgtcaccttgtttgcttttcttctgtggtgttccctaagaagtctgtgaaaactctacgggatgggagggggtcagcagatagtgaaagctggatgtaagatgatgacatctggaaagataaagaggctgcaaatggaagatgaaagcaaccaggatgctctagtgatctgccttcagaaaatctaatatgtaaaaatcacatcccaattaatattctaagattcactttctccctctacattttaacatctctgaaattggaatgcatcttacagttaatgtgataataaagaattgtgtcagtatagttggcagaagttgtttgtttttgtagtggcacataaaataatggctacatagtttcttaaagttaatggtgtcttagatttgatagagtaagtgatacatattataggaaacatcacgaccattgtattttccttaggttaaaaattgtcacttaggtcctggttgcagatatgagcccccaccaactagctttgggtcacagaccacttttgtatgtgaaaatatgtataggattttgtcatgggaggaagcatcataattcaataggtcattataaaatttaaatgatcatgtgctataagttagaaaggcacatgtatgtttaataaccatcacagtagatagaacagtaaatcaaagtccattctatactagtgatgagttctagggtcactgccacataataaacattattttccagaattttttctgaaataaaataatttttcatagatatagaaattgtattacagccaggcacggtggctcacacctgtaaccctagcactttgggaggctgaggtggggagatcacctgaggtcaggggtttgagaccagcctggccaacatggtgaaaccccatctttactaaaaatacaaaaaaaaaaaaaattagtcaggtgtggtggtgcacgcctgtaatcccagctactcgggaggctgaggcaggagaatcacttgaacccaggaggcagaggttgcagtgagccgagattgtgtcactgcactctagcctgggggacagagtgagactccgtctcaaaaaaaaagaaaaaaaaaatcatattacaaataaattccatcttaactcatgtttaagtagctcttcatgtttataatattataattatattgtatatatgcataagtcaaacacaacacaattctgattacaagcaaacacatgaagttttgattttttaaaatcttgaaatatggtacatatgtacaacattcactgtaaaaatttattgtatactttaaggaataaaatattttaaaaatcctgaggccataaaattttattctaataagaaattcatgtcaataaaaataagtcctccatttaattcacgcccttcttgaatatttttaaggatttctttcaagtacaccattagaatgtgtttgatattcatcgctatgactattagtcttgtaatttctattcattatcaccatggggacacgactctttttgctgctgtcagtggttacaccgccatgcccttggcaacaaagggtctgctggagatgtggcaacactgttggagaaggctgtgctgatagaaacacaccaacatgtccctcctgcagctctgggtcacacacatatgcatactccagagcggctgatgtcctgcccagttccttcccctcagcctgtcctctggcttccctcagggtggggctccagagacagcagctgtttccagctgtacactttcctttaatctgtcatggactcttaagctgcagctgccaggcatctgctccctttggatcttacaaaaggagggattattcgagaagcaaattcctgagttttggaccattccacatgatgttaaagaagtcaggaaatgtgtctaagactttgtcacgagaagaaatgccacaataggtctttataaattttaaatgagttcaagaacctcttatttttaataacactcttatcctaacccaaatgcatacccttcttgtttagtaaaatattctccctagattggccatctcaatattggtctacttctcctggaaaatatcacacatatctggggttactctacagttttcattgccctggtttcataaaaacacatccaaggttactaatgtttctccagatgctgcagtttagacttggagggaagacaacaatcatttcctgcaaaggccacaaggaagaggcttctgtttgcattgtaccgaacgatacagaaactgatttgctacagaccaacaggaactgcatgaggctgggcattcattgtgcatccagatagcaactttactcataatgtattagattaattgtgtcagataccacgctatcacagtaacatttggttaagccagaggtgtgggtgaaaatttaacatcctggttaacaaatgcaaggggaaagagttattttgatgggagaaatatttattcctaactactacaaggatcacataaaaaggagacaggccacaataattttctgctctggtttggcacattgtaaggtaactttcagtcttttaaaaatatttggaaacaagagagggaaaaagttttgtttgaaagaagactctggtgcaaagagtatggagaatccacaggcaaagaggattgaaagaggaaaactgcttgactgtttagtttggctgaatcagtctgcattacaaaagcctgagacagaagactgccaaatgtatgccagggaaaaaataagggggtgagattcgagagtccacacaaacacaacacattcttgagggcaacgtccatgagaggtacctgtctctccccagagactgtcaaagctgttgatctgtgctcgctctacttcctcttcatctttttctggaagatcaagtaggtaggagacaatctgaaacaagaagttgtgtcagctcaaacttcaggtggaaaactatgctactgacactagcctgtgaggtttggaagatgcttggatgatccaagtatcactaaatctcttgcacacaaaaggaatcagaattgaccgtcctaataaagaaactcacagcttccatgatgagcatttgtcttatcaggtatggtttgcacatttctctagaatgcaattcacttatatagcatgtgattttttaaaaattacatattcttcatatttaagttaaagaagcaatccttcctcctccctataaaaaagccatagaaaataaatacgagaaaactgagggcctgtttttctttcttttttttttttttgagacagggtctcgttctgtcacctagactggagtgcagtaatgtgttcatgactcactgcagtcttgacctcccaggctcaagcaatctttgcacttcagcctccggattagctgggactacaggcatgcaccaccacacctggctaattaaaaaagttttttttttcttccccagagatgtgggtcttgccatgttgtccagggtggtcttgaactcctggcctcaagtgattctcctgctttggtctcccaaagtgctgggattacaggtgtcagccactgcatctggccctgtgtttcctcagagtaaagtgattatcttcctttttcctctcagatgtataaggactgttctgcaactagtaaagggagaaaaatctctaaacacaatgaaaagtgacagttctgtttctgggaatttgactgaacacggttcaaaaacctcccacagatgataaaatttaatattacttaacactcccttggtgacatgtcagctcaattgatatggtagctgttttgctgattatcccatgcttgcactggcccatgaaagctgactgttaaattctcagaaattctgaaagccagttgtttattagaaatcaaatagcaattaaataaattaacattaaaaacaaaggttaaagaatactcaaatctctcaacttcctattatttaactatatcttactattatctatgctgttgaggttatttatattgattgtgcatgtcttgtctgcatggtgggaatattacatcacaacatgctactatgcttctcctcccctctttgtttcagtgatgtcacactggtagcttgaaattggccatgatgggagtatttacacccttgaaactggcaaacattataaatcagggcttcatttagtgctaaagctgaaagaggattcagttcaatgaatatagttcgtatgtggacgagaagtagtttaacagtagatcacatatcagatttaacggcaatacagttattgagaaaagagcaaactgggatgcagctccatttgtcaaactttcgttataagttacaaccacagtttagctaaaaatttggcaaaaatcaacaaaagctttcaattaagagtattatatagttcattattatttgtaagttgtgtgcaacatattctttttgtttgtttgtttttttttgagatggagttcgctcttgctgcccaggctggagtacaatggcatgatctcagctcactgcaacctccacctcccgggttcaggcgattctcctgtctcagcctcccgagtagctgggattacaggtgcctactgccacgcctgactaatttttgtatttttagtacagatggggtttcaccacgttggccaggctggtctccaacttctgacctcaggtgatccacccgccttggcctcccaaagtgctgggattacaggcgtgagccaccacgcccagcctcttttttttttttttaattatttcaaattttattgtagattcaagggcagtgaatgtacaggtttgtttcatggtgtactggatgatgccgaggtttgggacacaaaagttcccatcacctggtagtgaggataacaacagtttttttcaaccctttccccttcctttcccctcccagtagtccccagtgtctactgttgcctctttatgtccataggtactcaatgtttagctcccacttatcaatgagaacatgtggtatttggttttctgttcctgtgttaattcacttaggatactggccttcagttgcatctatgttgctgcaaaggacatgattttgttcttcttacggctgtgtagtattccacggcaacacattctatcagtaaaatttataataaacgtatgcacacacaaacacacacccctgttccaccccacacccctcttcacagttggttgttaaacatttcctagcacactaccaattccctacatttgccactattattgttattatcattaataaataaactgtataatgtttaacagtttaccaagcatcccttacaacagccttgtataaaggagtttattagcttcactttgctgatgggaaactaaacttctaagagataggtaaattgttcaagggctagagttaatgaatagcgaggctgggactcaaatctggtccttctgagattctaaatgttatgctgttcctgtgccacattatctaaccatgtgactacacctcaataattcatctctttgagccttggtgccactgtctgttaaacagggaggaaaacatggagaataattatatcatttccacggtcctttccaactcgcacctttctatacctataatttgagggactttggcatttgagtaaagtgcttcatggagtttaatctccttattattcagagcagcgatcacgaattcacattaatttggttggcaattttgtcttcgtgcaatcttttctcctggtttcctgggtccttcaatacakagcttgaaaaaacaatcctattgcctacttcttacctcagtataacccatgctggctgcagcaatgagggcctgttggatggcatggctcttcttaaatactccttgctgctggccggccatcgtccagtcacactgaatcaaaaacttgacaacctccagatgacctcggagtgcagcatgaaccaaagcacactgcccgttcttatccaaatgatccacctaagaggagaggacaggagatatgtgtgaacacagacttgtggctgagctcgcaatctagtcacatccgccactgcacaagcctaggctactaagaatcatcctttccactcctggaaccaatctctgagcaaattcaggagactctgctcagcctagattattactgagctacaactatgctaaatgtccctctgggaagaacttcttttcctcagaaaaggtcagactttttttttgcattccaagaaaaacaaaaaccaaaactctcagtttgagcttcgtcttcctgaggtaaattcttctttgtctcctcaaatagttcattttagaccaagatttgagaaactggtagctctgctggcataaaaaaaattatctttgaaatcaaaaaagggaagaaaaacattatgaagctacaattttttggccttccaaagaagcaaaacatctcacatcatgaatcatttgaccaccaaactttggcaaagtctgcttctctcttccagcaggagggaggactctcaaagatctgccccaaatggctagaggcacttctggcttagtgcaccagtagcagtcttcataatttcagtgttggttacaagtttaggctgaaagaagaccctgatcaagattgatttaccagaagggccttcgtttcaacagatgagtagcctttcattagatgagtagccttttctggtaggtaggtggtacttgtcctgcggtagttagatcagttgaaaatataagttctgtttctggctttcctactgatttcagttccatccagccatccacatagtgaatatttactgaatacagagtatgtggcaaagtaccacttaggtgaataagacagtaaatatataggttctgctctcaaggactctccaacaaggtaggggagatgtgaccaatgtgacaagagcctgtccaacaaaggagtatacaataaatttaaaggaatgtaaaagtgaaataacatttcagaggaaggaaagattaattcctggctagaatcaggaacagattcagacagaaaggtctatcttgactggctgagatggaaaatgattaatgtattctactttttgtaagagtagggcacatgaaagggaagtttaaactctaaggcggaaaaggtcttttgggacagagcatggatatttctgaatgccaggctaagtggtctgaattgtaaccaataggcagtgaagtcattgagtgttttcatgctcagaactgtattttcaaaaactaagcgaatggataaaagaaaccatggctccttggagaaatggttgattccaggactggggtaagagatgagactagaacatcttgtggtgtcagaaagtctgaaaatgctcaaaaattaatagagggaagttgaaaggacacaggaatcagtttgaaggagttcccaatggccaaatctggggcaaggtgaacaatgaaaatgaataataatggtaatggatttcaggctatggaataaaataaatatccatgacttcatagcaatatcaataaatacttgaataaatacatgggggagaagggatcgctttccctttcagtaacatctcaattaatacatgttgagggaatgatggaagtagaaaatcactgttaggcaaacatcaaagcaataattattgcagtggctgggcatggtggctcatgcctgtaatcccagcactttgggaggccgaggcgggtggatcacctgaggtcacgagttcgagaccagcctggccaacatggtgaaaccccatctctattaaaaaatacaaaaattagctgggtgtggtggtgggtgcctgtaatcccagctactccggagggtgaggcaggagaatcacttgaacctgggaggcggagattgcagtgagctgagatcatgccattgcactccagcctgggcgacaagagtgaaactcctctcaaaaaaaaaaaawaataataataataataatacttactgcagcaagaatcactgatggatcctaatattagtggacaaaagtatgacaagaaccaggatgtctgtctttctagtctcaaaagcataaccctaaaagatatttcttaattacaaaaggaaaaacagtaacttcagagctgagaaacctggaagacattaccttagatgcctgttgggggtcaatgtcctcctaattctggagtagggattaagctagagtgatcaaatgctcagaagaatccagcgaagaaaaagacttctgaaataatgaagaacattattccgtattggaggcctttttggacaggtattgtgcggtggccttggtatgtactttcttggacaatgtcgcatcatcactgatatatggtcagtgtgttggtgagcaggtctagggtagccaagtgactgaggttaacaccacctgtaataagacctatcaacagcagggacttctagtgctgcatttttataagggtacagcattgcttacgtggtattcttgccaaaaatatatacactcaatctcacagtgagaaaacattagataaactaaaattgaaaaacattctacagaacaactggctggtattcttcaaaactgtcaagctcataaaagatcaacaaagactgagaaactctcacaggttggaggagactaaggaggcacaacactaaatgtaatgtgagatcctgacctggattctctaatgcaaaaatgatcagtgggacagttggacaaatttcagtaaggtctgtagattagttaatagtattatcaccaaattactttcctggttttgataatgagactacaattacttaggctgttaacattaggagaagctgaatggaggatatatagaaactctatgcatttttttttgcctacaagagaattattttatttacttttattattttaaattgacacaataattgtacatatttatggggtacagtgtgatattttgatacatgtatgcaatgtgtaatgatcaaattagggtaattagcatacccatcacctcaaacgtgtatcatttctttgtgttgggtctctgcactatttttgcagtatctttgaaagtctaaaattacttcaaaataaaagctctacaaaagctaaggggatggtgtgtaatagatgagatgagaatctgaaaaacgggtttgttacacaagaagactccaagaataattcagggggatagtggcagttggggtagagaccaaggagtagcttctcaagctcttttgaggataacattgaaaagtgctggccactaaatgaattaggaagggcaaaggagggaaagatgtcaatgactccctagttctgagaaaaacggaggctacattagcagactttgaaaatccagaaagaggagggtaaagatgctgagtgattttagaaagctggatctgaggaactaactagtcagggatatgaacatgcctgccaaggaagcagttacaaatgtgaaactacagctcaaaaacactttcagaaattagcaatttggggttaagagtcaccaaaatgtaggtaggagaactagaacccagtcgggtttgacgccaaagcctatgactttaatgctgaagccatggcgagtatgaggacggaaggaagaccagaggatctcagtgaacagttctatcagaagaagaagagaggggcagccagagaagtgggaaatgacattaaaagtttactactggccgagcacggtggctcacgcctgtaatcccagcactttgggaggccaaggtgggtrgatcacctgaggtcaggagttcaagaccagcctggccaacatggtgaaaccccatctctactaaaaatacaaaaattagccaggcgtggtggtgtgcgcctgtagtcccagctacttgggaggctgaggcaggggaattgcttgaacccaggaggcagaggctgcagtgagccaagaatggtgccactgcactccagcctaggcaacagagccaggctctgtttaaaaaaaaaaaaaaaaaaaggtttattattgctaatactatggaggggctcagagatgtgaggaataagacaaagctgctttatttggtgaatggcagtcattagtgacttttaaaagagcagcttggtagaatgtagggaggttgggttattttcttttttacagatactatttattaggcactatataagattaaaagagactttaacacctcttttaaaaaaaggctttatctctttcaatgcttacactgactcttttaacaccctttttatagatgaaaagtgcgattgagagaggttaagtgacttgttcaagcccttgtataaattaagtatggacacaggatttaacccagttgtgtctgatcctaaagcttatcattttaatgagttgcctcctctctcattcatggaagccagaatgcaagtggttaaggagtaataaagaggtgaatgtagccagtatagaggactcttaggacaggtttggcagaggtgaaagggaagagatgggatgttgcttctggttagcaagggagaggaacatttcttttttaggttaggtaggtttctacattcataggtttgtagaaactgagaaaaaaggtagtgtgaatttagaaaaagaatgaaataacgtgagagaatgagcaacaccgtgggttaagagtgtagaggaggagacaattgctctggaaaggaaggtaagtacttccttctctaaggcaaagtagaggtgagcgtacgtaagaactgataagagttttgagatacaggcaccttgagatgagctcgatcacagtgatgaagggcagaagaggcgtgataggatcttgaaagaagtacatatgagttacatttctgctctggggaaaacaatgaaagatgaagaaaaggatggcttggcagtgtaagggctgaacagcaggaaagacccagctaagatcagaatatgaagtgacagcaatagtaagaagggctggctgccgtggctcatgcttgtaatcctagcgctttgggaggccacagtgggaggatctcttgatccaacgagttttagcaaacctccgagcaatatagcaagaccctgcctctacaaaataggaaaaaaataaagctgagtgtggtggcacatacctatactcctggctactggggaggctgaagactgcagtgagctacaatcatgccactgcactctggcctaggcaacagaacaagactttgtctctaaaaagaaaacgaaaatagtaacgaggcccagttatcattgttcctagaggtgtccattcaaatgaatgggatgtcacaggtgcacaatcactgtgctacagtaaacttctaaggctctgagatgtcattgagaggcctacgtctcagttcccaaaggagtggaggagtcccactttctcccctcgtaacagcactgaataccgcagaatgaagtcatactatgacttgtatttcactatgaaaccactaaagtcctcagtttgttttcaggactgaaacaaaatactatgaggccagacttttttttcccagaggcccacatttgtgagaccagcatttttcttttcaccaatattgtgaaatcgagtttttatacataaagcaaacatattttggaaatattttcagagaactgatcagtactaacagaagcacttcgaggtgcccttggtcagtctgagtataaatagggagaatcatcttctccccttatctctagagtggtggtcttcaaggacaggatgaaggtgtctggtcctgttctcatctccatggctaagttttcttctctacacatgaaaggcttagagcctgcaggtgtcatttggtccagacctgccactgcagtctcctggcttcctcacttctccttcctctctttgttaaaaagaggcttcttctgagctcaatagatcatttctgggttgttatgtagaaactttttgtggttacggataaatgcagtttcccaagcacctctcaaagggtttagaactgtgtgctcctgcaggatggatggcagtggccctgcacatatgcagaaccagcactctctctgatctcctctccatcatggtttgatatactctacccagactcatgaagtaacactggagataagaaagagtatgcatcgaaaataaagaaaaagggaagaaaagcagcagagctgggcagccagtaccttggcccgtttcttgcacagcagcaccacaatgctcaggtaccctgctgctgcagcatatcccaggggagtcaggccactttcagaagaggcatccacgttggccccgaactccagcagcagggctaccatttctgtgtaaccaagatgggactgaacacatagaattggagcattatttaaaacctctgtccggtaattaatattggcacctcccaaaatcagcagtcggctgacctagaaataaacaaacagaactaataattagacaaacaggagtcacatccttttagtcatcttttattaaaccatctaacattctacaacagtgtctagtagcatttagtaattgctttattttataatctcatttgctcctttttcttttcctttggtagataatgtaaaatatctcctttacataaatggcatagtaactagagcaattgcctcctatactgtagtgctgaacatagtctctacgaagtgagctcttggtcagaaaagctcctaccaagacaaaggctacctgagatcaatttactctttggaaccagcaggacctgatcccatatgtcagagtcagcttatagaagttaagaggacaatggagctagtctctaatttatagaataaaatttaacaatttaaaatatattaaattatcaataaaaggctaataagaaagacaagtcaaagatcaactaaatagctacttaatgtccttctagttttattttttcatagttaattccttatcatatttataatttctttataaatttacctttatatttggagtgtagagatttcgtaaagacgccagtgccatggaaagaccttctgtgctataagagatccagagaccttggaggatggaggatgatacaccaacttttttactcaaaccctgaataagaaatacagacaattaaattagtagcccagcmaaaaaaagtagcatcagtggtgaattagtggcctctttgtttttggtactaatgaatgagagcggagtctcaccctaacaatgttcatgccaagcaaagcctaggtggggggacaaagaccagtcctgcaggaacaagctaactgaaacagtctccatctctgcagcccttagcaacacgtctactcaacacctctcttttctatctggatataatttatttttccatatcttttttattagccttcttcaataaatctcttaaattcaagttactaaattacacactgtggcagaaataatgcaatgtgatcacggatttccatttcattttcttcctgaacatttggaaaaactctatttcccaggctcctttacagttaggtaggccatgtgactgaattctggtgaataaaattagggcataaataatatgtcatgtccaggcttggctccaaaacttcctgcatatttctctacactttctattgttccttttgattacaggccagatgtagaagatccaatggagaattctgaggcccaaggtgattttagaactactacacggaaggagcctgcccagacatctgcactgtactgtgatgtaaggagaaataaatctttgttaagtcattgagattttgcaggtttgtcaatagcagctagtgttcttcaccttaactaatayatcccaaaatgattacatatgcttatcctcaggaaaaaaacagcaatacaggcttgatttccatccgcaacaaattttctcctagtatcactggcacaggtcccacgacatgtactaatatttgtccttttcacatgggcttccccagaaggaagttagaataatttgttcttcagatctcctgattgttagacactctctgacaatcatcttactcttctgtcaatatctggatcaaatcagttaaagaaggaaatcctgagggcaggaagatattaacaatgaaatttgggttgtaataagagatatagggaggtacttcttttaaaaacttaagctacttctgctttctttgtccctgaaatatagaatgttcttgcctagaatacctacatatacccaaaatcaggaaggtgtgtttatgcggcatactagggaaggggcatctacaaaggaggaatgtgtcagtaacttatgagttataaattcatctaacaagacctctagtcatggtggtcaaggtcttcccatagagagttcagggtctctaaagtgggttaggaaaaaacttcctgtagagggaattctcacactagaggaaaggctgaaaggtgaataatgctgtgggaaggctagatacacgaacgttttaaaggcttttccgacacaggcacctttttttttctccctgtggggatattctgatgcaaccaaaaattaaatcattgaactttcctattaaaaattttattttcagccaggtgcagtggtacatgtctgtaatcccagcactttgggaggtggtggtgggaggattgcttgggcccaggagcttgagaccagggaaatgtagggagactacatctttacaaaaaaattaaaatattagccaggcatgctggtgcatgcctgtggtcccagctacttgggaggctgaggtgggaggatcgcttgagcccgggagtttgaggctgtggtgagcagtgatcgtgctactgcactccagcctgggcaacaccgtgaggctttgtctcaaaaaaaccaaaaaacaacaaccaccaaaaaacagaaggaaaaaagacttctacatttcagtttttgaaattataaaaataatacaaatttgttataaaaatcaaataaaataatatggtattaaaaataaacctcccatctcaatcctaagaggtgactcctattaacacattagtgtttattatttaacacattttctatatatacgcaaaatacatacatacaagtgcatataaacaacgtaaaatttactttattaaacatttttgattaaggaaaatttaaaatgtatttacaaaagtagagaggaatagtatagtaaagctctcatgtacccatcacctcacttcagtaattttcaactcatggccaaccttgtattatttacattcctgctcatatccccttcccttgatgggattattttgaaaaatcccagatattttatcagttaatatttaattattttagtcagtgtctctmaacagatatgaactctttaaaacatacctaaaactaagaaggattctataatatgaaatatcccaacagtgttcaaattcccttgattagctaaaaaaaggaactaaaatttttttggtttgaattgggattcacataaggtccatacactgttactggctttaaaacactttcatattactaggtagttctaggctttgttctccctcactattatagcttttaataatcatccatgtacatgtatctttatacacctatgcatatatatctatagaatatgcctcaagaagttgatatattttgcgacattttgacatggctttatcaaagtggctgcaagtgtttatacattctcaacaaaaaatccacagcttgataaaatgaggaaggatggtgctaattatttctacgtatcctctcgttccattctatcctaagagcatgagccaaaaggctgggtcaaatcctagcagagtagacctttgggtgcccagaaacacaatcctatgctgggaggctgaaacagaatccagttttaacccctcacaccacaagattatttcccttttcatcctcctcgattatttaaaaatggctacctaatttctacatagtccatattctctctggccttgaggaggctgggctctgttctgaatctgtctactatagtacccatgtaggcacccagagctgggtaaacagaaaacagtaggaaaggtgggtaagggcagcttctgattgctcattattacttcagaagctcttttaatttgtgcaagtaacagggacatcaattacaaactctcatttggccatgcagtttacatgcaaacaaaactgaagcaaatacatcactaagtagttctgattgttattttggcatatgaaatagaatagttccagatcttttaggaagaattctaaatgttactcagggttggagtccagacaagttaggttcttgagcacacctgcactgtagatcctggaagaccaggaagcttagctgtgactccccacttgggcctcaatctcctaatttataatatgtgtgggcctcaagaccttttgaggaatgataaactatattaacgaattcagagagaaaaatcagcattaagaaatatccatagtctaacagaggaagcttttagcaatggaagacatgtcttacatatgatggttgaaggaaaaaaaggcaggaaatctgacatttattcagatctacaatgtgtcaggttctgtgctagggcctttccagatttagcttctctaatgtaatctaatcttcacaacagccctaggaggtagaatttatcactatttttatttaggagggaacacaactcctggagctagaattagaggccaaatctgtttttactctaaagttcatgttccttccattataccaactaaaaaaaggaaaagtaattggcacctgattcaggacctcacttctctgatcttagctgaaaaagtagcaactataatagactaaaacagacaaaacagctgattgctgctttctccctttacctttaattccaaaccattttccatccttggccctcttctccaaaattgtcctttttaatcccagacaatttcttctactcmtaagacatcacacttatgaattcaactaagcattatatgcttttttcccaactattaaattaaagtaaaattgtgtctaagacctgtaacagttacctttctgttgacatatgtatgctaactttaggataagggttatcactggggagggaggagaatggggtaagggaaagatataaaggggcttctactataattgttacatatataacatttatatatataactattaaatgtaggtaagagtcacctatattttggtgactcttaaccccaaatatatatatgtgtgtagcctttagagatcctagcccctcttstgaggattatatatattaatgaattaaatcctcacaaccacttagtaagggctaatattattgccattttaaagattagtaagattagtggtggtaatcccagcactttgggaggccaaggagggaggacggcttgagactagcagttcaagaccagcctgggcaacatggtgagacccccatctctacaaaaaataaaaataattagccaggtgtagtactgtttgcctgtagtcctagctacttgggaggctgaggtgggaagactgcttgagcccaggagttcaaggctgcagtaagctgtgattgtgccactatactccagccggggtgaagagtaagaccttgtctccaaaaatataaaaaaaaaagttaaacaacttgcttaaagtcatacagtcaggaattaagagagacagggtttgaactcagtctgtttttagagtctgatctcttaattaccatgcttgctatactgccatctttaaattaatgatgtggaatagtgatttttttcaaacaggaaaagaaaagaatagtggtttctcaactagctggggtgcacattagaattacctgggaagcttttcaaaaatactactgatcagtcgctgccggtgggaatgcaaaatggcacagccactttggaaactagtctggcaatgtcttgcaagctaaacatagtcttaccatacaatctggtaattgcactactaaggcatttactcaaatgagctgaaaattatgttcacataaaaacctgcctcttagtgtttatagaagctttattcataattgccaaaattggaagcaaccaagatgtcctttaatagatgaatggctaaataaaatgtagtaaatccttatagtgaaatattattcagcaataaaaagaaatgaactatcaagccaaaaaagacatgtagaaatcttaaatgcatattgctaagtgaaaggagccagtctgaacattctacatgttgtgtgattccaactatatgacattctgggaaaagcaaaactacagaaacagtaaaaagatcagtggttgccaggggttgaggagggtaagrggagaggaatgaataggtggcggataaaggaattttagtgcaatgaaactatgctgagatacttaatggtggatacatgacattatgcatttggcaaaatcgacagagctgtacaacacagagtggaccctaacataaaggatggactgcagctaataataatgtatcactattggttcctcaattgtaacaaatgtaccacatcagtacaagatgttaataatagggaaaattgtggttgggggagtatgtgggaactctgtactttctgttcaacttttatataagcctaaaattggtctaagaaataaagtctattttaaaaatgaagcctaggttctactccagaacaatgactcataatctctgggagtaaggctcaggaatgtgtgtgtatttttaaaaaaactctgcaagagaatctaatgtatagccagagttgaaaatcactgacctacatctatagagaaatctcaaagacagaatgctgagtgaaaaagagaaaaaagttatagaatcttatagcattaaaaaacccaaaatagttgtatatattgtttatgaacaggaacctacattggaaaagtgtaaaatatagatgagaagaacatgttaggggtgttagcatgtgctaaatcccaacacatttagaataggagttatctctaagggagacagagaaatggggtaaaagagaaatacaaaagcgttatctattatatttgttacattcatttcttaaaaataaagaaaaatatttgaagcaaacatggaaaaatgttaacatttgttaaatctggtagataatatttgattacatgcaattatctgtacttttctatatttcataatgcaattaaagaggaataggaacatcttttcttctaaaacaagaaaaaaagaggtaagaattgataatgatatagattgatttgctggtgaggggaggaaaatagttaaaggaagtcacacttggtagctttgatctttttcagtgactcacaagttaggctgtttgtttcattagttggctttattaagagctagaggaaaaagaaatgggaaaaggagctgagtaagaatggaccttggtaaatgaatgtcaactaaatggtccagtaaatggaccacaaagcagcactgagaaccgcactgaggctggactagatacataagaaatacgcctgaaatacatagctttggatttggaatactagctttacttgtactatggacttttgatttcttctggttagtggagttgaccctttgttcctgtgaagtacgggagaaaagagcgtcagtttggttcaattcaacaaagatgacaggcagagaagtgtgatcccattaccagccaggatgtagccaaaaataatgcataattaaattctaagctcatggtttcttaaagagaattttatgttcgaatagcttgaaaaagygcctcttcagtatctgtaactattgctcaggtaagggatctttttgtcggcaataaatggtaatggagtcccttccttagaatctaaatttacaaaactgtttagcagccagtgataagcttgctcaagatttttgaatacttaagaaaacagggaaagcatgaagaaacaagagcaatctcatcttagggatctttagctgtggctcaggtatctkaagatcatggcaaaaactaaccttgggggcttatccaatgagcttctttaaagcgggttatttacaaacatcacctttatgaatataaaaccagagaaatgtaaaattaattggaaaaaagtacccattggattgtgtgtcactgctgaatagaagtttcaagtggaactatttctaaccataaagtctatatttgtctttgacccacagctggtgcagattgagaattctagcagtttgggagaagttaaagcctctcaacagggaacactgcatttaaaggatcctgtaaactgcagcaccaggaaaaccatagtccaagtcttcattcttcagcttgcagtcacgtcaccaccatatgctgtacactagagtatttatggcttgaatcacacatggagccagtcttatctcaggcaaccatgctgtctgcatcagtataagataaaactgtgctaatgacaggagggcatgtttaaatgtacgtttccatgtatgggataaaatacttygtcaaatgaagcttggtcaaatgaagcttcatgctacttctctgtgaatgtggtatttattttatggggcagcaaaggcagggattagcttcatttttgcatctgattctaggcagatagtgatgctaaaaggttaatgcttaagttactgtctttcagttactatctaacagcaggacaatgctcttagagtttatggaattattagctactttttagtctgcttgaaactggaatgccataccttgccagttattttagctccactctgctcctactaagtaaggtcatttttggtacagtgatttgttagacaagacaagtaagattcaaatacaagatttgtcactgtgggtttcacttctgtccatctgatgaccaggctgctctggctctgtgcttatatattgggaagaatttgctaggctcttgaagttatccttaatgccatctttctctctgaagacaatggtttcattttttaacaatatcctgtgggggaagcctgacccagagaactgtttaagatacccatattctccatcctgaggcaggaaaagaattctgaaaaggctgtagggattggaactctcagactgtgggacagaaaaattagcacagtaacttccttctccacttttgtgggttaacccaaaactgttatctgaactacaaattccttaagattagggattgtatcttttttgtttttgtatctctagtacccagtttaatgcctcagtaagtgatgaataaacaaatgaatgcatacatgcacaaacaaattatgtgtcctctttttggtcctccatttcagccttctgaaggctgagagagaagctgatgttatagagttcttaaaggttttcaaactaatgggagaaaaactgggatataatttgaagagagatttgggggaagtagctccaaggaaggttagtgttggtttgaaagtcatagcaccaggaatgttattattgtcactaaaacaattttaaaaaatggaaagagtaattgccctcagtgattttttagacatcatgaaaacctgcaactaattgctacaatatgactgtcctcaggagatgataggtcatgtatggagcacacatctataggtgtatatgcaccttgtcaatgattatacatatacatttcctgaaaagcctatcagttagttacactgggagatgtacaatgtagttctaaaggcctagggaggaacaggccatacgtgttgggagatgaaccaagtttgcagcaaaagaacttcagaaggcagggactacactgaaatagtctcttacataaagcatatgaaagtctgctagagatggsggaaaaatggttccaactgctttaattaccttaaaaatgtgtgctttgaggatgtgatgtcccagttcaatagtctgctgtcggtttagttttccctcttggcgggaaaaccagaaggcaagtaacgtgtgaccactcctgcaaaaaaagagaaattcattttaattaattaattwatttatttattgagatggagtctcactctgttgcccagactagagtgcggtggcgcaatctcggctcactgcagcctccacctcttgggtttaagtgattctcctccctcagcctcctgagtagctaggattacaggcgcctgccaccatgtctggctaatttttctattttagtagagatggggtttcgccatgttggccaggctggtctcraactcctgacctcaggtaatccacctgccttggcctccaaaggcatgagctgctgcgtccagtctgattcattttaatagaaatgttaatgccccaattctgctttggttgggggactcttcaggtccagtcatacctccaacaaaactatatcattcaactggttttttggggaagggcacctgctcctgggcaaagaatgggtactgaaaggttcctaggcagttccttatccaaatcacatgtataaataccacaaaatgtcagttatagttggcttacacccatcccacacacagatggcattacaagattttcatttttattttctgtctctgtcagcaactctcattccacccatgcttaaatgtcagtgttcctcagaatctcattcttggtcctattctttcctcgctctagattagctcatccatcctcaaagccttcaccaccacctatattctgtatctttttctttatttagacttttcttctcagccttaggccagtatatatccaactgtctattgtacttccccatttggaggtctcagtacctcacactcaacacgacccaaactggacttacaacctcttccccaagtgacgtcttctctgatcagcctctaccaagcccctaccctttccctccagctgagaatggagggctttctttctatggctaccagtgtagactgtatatcctctagcacagtgtttgccatactgtcacatactctctcctccactagattgaggttcctgatagcatctgttccccattatctccttgctaacagatcccaaacctgtttatgaaagagaaagctcttttatctgcctctggatattgtcttatctgcccatgatgtccagaactgccttagttttcttgcaaatcatgtggtcagctggcttgaggacaaagtcaacaggagggctaggctaaaagaattgcagaaaaataaagtttgagccctattagctgccctaattctgaacttgttatatgaggtaatagatttctgttctgtttaatctatttgaattggaattttgttttttttttccagctcaaagcatcctaatgatacacttattttaagtgttaatgtgtgtgtgtatgtatgtgtgacatgtatgtatatttagggttgtatttctatttacattcacgaaagaaatctgaattacttatatcttccatagtgcctaacatagtctactgcatataaaaatgctcaataaaacttttagaagaaaaaatctggcattaaaggacactagatcacctttgagatgtgttttcttaccccatttgttatggcctctaagaactgctgacacttagaaccgtctctctatggctgatatgctttgactctgtgtccccacccaaatctcaccttgaattgtaacccccataatccccacgtgtcatgggagggacttggtgggaggtaactgaatcatgggggcggtttaccccatgctgttctcatgatagtgagttctcaagagatctgatggttttctaagtgtctggcatttccctggctggcactcattctctctcctgctgccttgtgaagaggtgccttctgccatgataagtttcctgaagcctccccagccatgtgagtcaacgaaatctcttttctttataaatcacccagtttcaggtatttctttacagcagtgtgagaatggactaatacagtaagttggtactgcagagagtagggtgctgcccaaaaatgtggaagcaactttggaactgggtaacaggcagaggttggaacagtttggagggctcagaagaagacaggaaaatgtgggaaagtttggaacttcctagagacttgttgaatggctttgaccaaaatgctgatggtgacatggacaatgaagtccaggatgaggtggtctcagatagagataaggaacttgttgggaacaggagtaaaggtgactcttgctatgctttagcagagactggtggcattttgcccttgccccagagatctgtggactttgaacttgagagagatgatttagggtatctagtggaagaaatttctaagtagcaaaacattcaagaggtaacagagcataaaagtttgaaaaatttgcagcctgacaatgcaatagaaaataaaaacccattttctagggagaaatctaagccagctgcagaaatctgcatactcaatgaggagtcaaatgttgaatcaccaagccaatggggaaaatgtctccagggcacgttgaaggttttcatggcagcccctcccatcacaggcctggaggcctaggaggaaaaagtggcttagtgggctgggcccagggccttgctgctttgtgcaatctccagactttgtatcttgcgttccagctgtggctaaaagggaccaatatacagctcaggtcgttgcttcagagggtgcaagccccaagcctcattttgtaaaaatacaaaaaattagctgggcatggtggtgggcacctgtagtcccagctacttgggagactgaggcaggagaatggcatgaacctgggaggcggagcttgcagtgagctgagattgtgccactgcactccagcctgggcaacagagtgagactccatctaaaaaaaaaaaaaaaaaaaaaagagtacagtggcaatttccagattttatgagttcgaaagaaccctggactcacaccttcagatgatactgatgattccatgcaagctacacttgtctgagacattctcccaattaaataacttcctttctattatggttaattcatccaatcaaacaaggtgacctggtatccactacaatttagaaattctgtaaaggcaaaaattaaagtccctttttaaactcttactggaatgaaatccatttgatgattcctatgtatgatgggagctgtcccatcccctgtgttccaggttctttactgacacttaaaaactctacagtcacagcagaaggcacctcttcacagggtggcaggagagataatgagtgccagcagaggaaatgccagacacttataaaactatcagctatcacgagaacagcatgggggaaactgcccctatgattcaattacctcccaccaggtccctcccacaacatatggggactacaggcgcctgccaccatgcccggctaatttttttttttttttgtattttttagtagagatggggtttcactgtgttagcctggatggtctcaatctcctgacttcatgatccacccgccttggcctcccaaagtgctgggattacaggtgtgagccaccgcacccggccctgaactcttatttatcccatgaaaactcagtttaggtgataggttattttatttttttctttttgagatgaagtctcgctctgtcacccaggctggagtgcagtggtgtgatctcggctcactgcaacctccacttcccacgttcaagcaattctcctctcagcctcccaaatagctgggattacaggcatgtgccaccatgcccagctaattttttgtatttttagtagagatggggtttcaccatgctggccaggctggacttgaactcctgatctcatgatctggccacctcagcctcccaaaatgctgggattacaagcatgagccactgcacccagcctattttagttttttcaatagagattgttctttttgaattaagttattttttgagtaagttattttaacagaccatatggaagttagacaacaatacaaagcatttatgaagtatcttactctcaagatctcaaaattctgtccagctcttaacagtaaaattattgtagcctccctggtataagaattattactttaagttactcatccatggctgttccactgtgactagaacttctgaatataagtctctgatccactatctatgctttaggctgttaatgagaattcatgcctattgggattaatgtaaaaaagcttgtgcttgacaaggaaatgaactttcagttagacatagaattgactttaccctagtgttttcattttaccaccataactaagaaatgctggtgagatgtctgcatttctctagtcttcatttcagctggctagagataactgcttgcttttgcatcaggcactgaggagaaacagcaagcaatacaggtcaaggataagatgaaggtggcaactatagttcatttctttttgaatacaagcatgctacattattactaaaaggatggttctgatcagtacactggactcaaagtttgtggtatgtaggacataaggggaaacagcaatgtacattctatattagctcccatggtgacatcttgagcactgagatttaattctgcttctcggtctgctggatctctccacctccatcactatcaaactcactttttgaagttggagctttccctcaaaaccatctctctctcttttttttaaatattgccagttactcaggcataaaacgtagtagctatttcccccctctcctatattttctctcctgaaaagtcacaagtatctcattctcttcattttattcttgactgctcactccctggccatcccaataatctacattgcaaaaacctgatcaaaattctgctcaaaattatttgctagttttattttccctctgatataaaatttaaattccttagcatggtatccaagggctttctataatttgtcccttgcctatttgtctgtctttacctttttaccttatcctttcaattctaaacagagtaaattatctgtagggtttcaaacatgctttccctctgcctggaattctctttcctgtttagttcatcagaaaaacaatttctcattcttcaaatggcaactcacatsatctcctctgtgaagccttccctggtgccccccgataaactcaggggttccttccttaggttcctgttgtacctggtacacatctccattacagcacccactgcagggcactcttctatgttgctctactccacacgtgggaaaaagcacggcctctatcctcaacagagtctaggtaataggggtatatatttgcagaatggatgagtaaataataacatcttatacctgtgtatcttaaggttttcaaaatacccaggcatgatggctcacacctgtaatcccagcactttgggaggccaaggtgggagggtcgctcgagtccaggagtccaagactagcctgggtaacaaagcaggatcctgtctctacaaaaaagttaaaaagttagccagttgtgctggcgtgtgcctgtagttccagttacttgggaggctgaagcagaaaaattgcctaagcccaggacgtcgaggctgcagtgtgctatgattacaccgttgcactccagcctgggcaacacagcgaggccctgactcaaaaaaaaaaaaaaaaaaaaaaaccaacaacaactgaaaaatcaaaatacttaataataataataattattttttgagacagagtctcacgccattgcctgggccagagtacagtggcatgatcttggttcattgcaacctccgcctcctgggttcaagcaattctcctgcctcagcctcccaagtagctgggattatgggcgtgcaccaccatgcccggctaatttttgtatttttagtagagatggggttttaccatgttggccaggctggccttgaactcctgacctcaggttatctgcccggcttggcctcccaaactgttgggattacaggcctgagtcactgcacccagaaaaatactttaataatttttagattctcaaaaaatcattataccataggtatagcagtaaatactactcccaatattatggtagaggattgacagagactaagcaagattgagggacagacccagctcgcatgcctaggaagtaaaagagctagaatgagaacttcagtgtttttgaaatctagttctactgaaacctagttccactgaaatctagttcaattaccacactaagattagcaacttggtctttgtttcagaacacacttgtgtgaaaaaaaatccaccactgtaaagaacaatatactcatttgtatagtataaactctgaattctttaattttaacataattaaaatcagcaaccatgattttgacactttttgattggcattttgagaaagagtaggtaagaaataaggtagagacagctctaggaagcgtggtatgttttaaagcatgacagagcacaactatgctttccctttataattaaagatgatgaggccaaggcacagtkgctctcacctgtagtctcggcactttgggaggctgaggcaggaggattgcttgggtccaggagtttgagaccagcctggataccatagcgagaccccatctccacaaaaaatttaaaaaattagscgggtgtggtggcatgtgcctgtgctcctagctacttgggaggctgaggtgggaggatcacttgagcctgggaggttgaggctgcagcaaattgtgatcgtgctactgcacttcagcctgggtgacgagcaagaccctatctcaaaaaaaaaaaaaaaaaaaagatggtaatcataatcaactttaacatgggttcagatatggtcataaaggccatggggtagggaagtgaagacagaagagaattattttcacatagcttatataatatcaccttatgattcaaagttactttacaaatttccttactggcattcacagtgctgcctcttcatccctaaaagtcaaacagacctacttttaaatcctagttctgccacttacacactttataacctaggacaagatactgaacctctttgtgagacagggatagtaacatctacctctcaggactgtggtaagaattaagtgagacatattaagcgaatgcattttattttatatttcttttatattcttcagagtaactagtgtaacgctaaactaaaggaatgaccagtaaccacaaatgactttaaacatataggaagatgattgtgtgttcaaatggaactttagtctttaatgtgtgtagcagggtgaaatgtgataccctgtccttaaccctgatccttacccttccacactgtaccctactacctttgcagccagaagagaagtccacagatcagggaaaaattactggggtacagatgccgttcactgctagcaaatgcaacttggaattgtaacttcaggcagaggggagggtaaggacagagctaactgatccctaagaaacaaggtaaaaattacgctaacaggaagaatataaatttctcatgtagaccagaggttttcaggaggatagtaaatcttatattcaaggtatatttgattttagatattttaggagaaagttgatcacaggtcacagttgaggatccttcccccagcactctccctcctcccctttgctggataagtatgcgtgttttgacaaaagtcagagaaggtggtatccaggatagcagagagcaaattctacttgcactctcatttgtaggcatgagtagtcccttgatactggagacaaatgacactcacttctggataactacgggttacaaggcagtgaggaactactgtcacttgatgatcctgtacctcaagagttcagagctatggagtcttttagagaaaaaccctttctaaagcaagaatcactcccctctatcctcatttaacattatggaagttggataacagttgtttcacacaaaatatacaatggcattatgtttgtttttctaataggttttcacttagcaccccaggagatagctagtcttaaagtttctctttgtagtaccaaaacatgctaacaaataaatctggatatttctagcatggacagtttctcactgttctagtcagagttactaatatggagtcacacagatttcattatgatgacaaacttaatatacaaccttctaatgcttcagagaaacaacacttaggtgctttgattttttttttttttttgagacggaattttgctcttgttgcccaagctggagtgcaatggtgtgatctcagctcactgcaacctctgcctccctggttcaagcgattctcctgcctcagcctcctgagtagctgggattacaggtgcacgccaccacgcctggctcattttttgtatttttagtagaaatggggtttcaccatgttagccaggctggtcttgaactcctgacctcaggtgatccacctgcctcggcctcccaaagtgctgggattacaggcgtgagccaccgtacctggccaggtgctttgatattctgtgtgagggtcagatgtgacaaagtggtatagttacagctagctggcaagaaaattcttataatctaaagcctatcttataattttggaggaaataatatgtgctgctgtgaagtgtctttatattacggaggctaatgtgggttatttaaagagacctagtgagacgagaattatgaggcagagatggctggcggcctccaaagattgtgctcgccttccaagtcaagagttcttgttggcaagtggcttccttgccagggacctcgcattcaagtggggttatgtgactcagttctggttaacgaaatgcagacagaaataatattcacttcagacctggcccagaagaatcttccactcttccactgttttttgtcttcccccatctgccagttgatgaaaacaacaattacgctgggaagcagtgtgtgaaagatggcagagcccccattggcctgcgtctctgaaaaatggtacagggcagacctcttccaaaacatgtggtgcctttggacttcatgtgagtgaaaaataaatttctattgtgataaatcacttaggttttggggtttacttatttcagtagttagcattaccttaaataaaacaagaaaattagtttatgagggattgctaacagaggatggatagaaggatgaagaaagagtagaaaggaggactaaggaggccgggcgtggtggctcacgcctgtaatcccagcactgtggaaggccgaggcgggcggatcacgaggtcaggagatcgaaaccatcctggctaacatggtgaaactctgtctctactaaaaatacaaaaaattagccgggagtggtggcggatgcctgtagtctcagctactcggaaggctgaggcaggagaatggcgtgaccccgggaggcggaagttgcagtgagccgagattgcaccactgcattccagcctgggtgacagagagagactctgtctcaaaaaaaaaaaaaagaaaaaaaaagaaaggaggactaaggaactgtttatctcaatatcagtgaaaatgggcagaaacaaacataatatcctcataaattagatatttgggatactagttgggacatcagttatgaggtttatagcaaaaggctaggtgagaaatgctaagacctattaaatgagaagagagagcagggtgtatgtgggagagacattttggtgatactcaaaagcgcttggtcttttttttgtgtagggaaggtaaggatggagggattaaaaactgcaattaggccaggcgaggtggctcacacctgtaatcccagcactttgggaggctgaggcgagcagatcacttgaggccagaagttcgagaccagcctggctaccatgataaaaccccgtctctactaaaaatacaaaaattagcccggcatggtggggcatgcctgtaatcccagctactcacaaaaattagcctggcatggtggtacatgcctataatcccagctactcaggaagctgaggcaggagaaccacttgaacctgggaggcaggggctgccatgagctgagatcatgccactgcactctggcatgggcaacagagtgagaccccgtctcaaaaaaaaaaaaaaaaaagctgaaattattattcctttccacaagattgtcaaagcacactccatgagaagaaaaaaggaagaggagtccttgtgtcccgtgacagtaatgagtcactttctatccccagcagccttccagtataaaagcctgtctattccaaaccactcattcctagccaacatgaagtaatttttcaaactcacagctagctgaaagtattcaaactatggtatcatcgatagattccctaccagagcccaccataaagagcgaaaggtgaaagagggaagttcctttaaatggatgtttctcttgtgttaccaggggtctttgtgtttgcaaaaaagtaacttgtaggatgacctgataaagtggtattttcagtaagattaattcctctgagaaattcagatgataccatcagataatcattgtttaggacatggggaatttagtccttctagcaaggatccccgtgcctccatctccctttctgccagttggacaaaggtgtcttctggccaggttcttaatgttctgtagctcctgagccctactaggaacacgagtgtggcaactaaaaagatatgggtttccaaaagttcaaaaaggtttgttcaaaaaggactttaagttgcccttttgatagccaggtttctagaactcatcatcctttgcctctcttctatgtttagtctcttactttttatcttcccgttttccagtgtcaaccaacatggtcaaacttttcccttccttcattgctaaaattttgggaagttgagtctatggtagtggtctctactttttcatttcacatgtagtttttaacttatgggaattggacttctgctaccaatcattctatgcaaagtattctagcaaaagccatatatggcctcttaccctttgccttattgcagtacaaggtgctggtgagcatcccctccttgaaactgccttctcctttgacttccatgaccttacttccttttgtttctctaattccyctctaaattactatttggctcatcatcttcttttagcatttaaatataactattctgtttcatgcttctaaactttctactttatattcttgggtgatctcgtttagtactatggcttctactgtcagttatttgctggtaatgcacaaagttatagctgcatgccttgagcattctctctgtctattttctaaaggcacattcctaaatatattctgtgcatctttcctcagaggcaattcattatgaacatgtccaaaataggactcactttctccccataagcctgttcttcctcctgcctttgctcatgttagagcccctcctccattcagaaagttctatgttggttagtaccatcactattatccatcattcaagataaatctcgtcacttttgatccctctgtcctgacctttcacataccatataaaaaaagaccaagtgcttttcagtatcaccaaaatatctctcccacatacactctgctctctattctcctgttataggtcttaccattcctcacctagactgttgctataaacctcttaataagtagcccaacttgcagtctcttcccttcatttcgactcatcttccatacatcacttgtcagagctatctttcacatcaccagagttatcagatctttgtttcttccttctcaaaaggctacagaggctccctgttatctacagaattataaagtcttaaatatggcatttaaggttttcccagtgacacctcctatcatcctctcttcctgatcacgcatcttattctctcatcatagctgctcacagttccccaaaggcatttcatatgttctcactcctccttgtttctgttactgccattaccttttcctttctgcctacagtgctcctgcattcccttgctgcttaacagaattcaacccatacttccaggctgaactttaatgttacctcttctgaaaagtatttcctctttgtctaggttcctataatactttgtactatggcactattgttggttgctgtgtctgactttcctttagagcaggggtatccaatcttttggcttcctggggccacactggaagaagaagaattgttttgagccacacataaaatatactaacactacagataccagatgagctaaaaaaattgcaaaaaaatctcatcatgttttgagaaagtgtacgaatttatgttgggccacattcaaagcctcccggggacacatgtggcccatgggccgtgggttggacaagcttgctttagagtataatggctttagtgtcaggggtgtcttaagccacctaagtttctctagtggttagcacagtccttggtgtagaggagaagaagctcactaagtgttttgtgtttcatgaatgaataaaaccaagcaagtgggtacaaggaagagcaatgcaaggacttccagattcactttccaattcagtactcaatttgactttgaatttgcagatatttctgctgtcgctgttaagactgtgaaatgagtgtgcatatgactcaagtattaagaataggttaacaatcctgatcttttccacttctcttcttaaaaattctgccaacagttaaactttagttgttgctgtcttatagtctgcttgtggctatccattctcagcaaatgatactcatgcttcttggcgaaaattatttcttccatttttcacttaacagtcagtaactgcttcggcatattttttcatggctttctcatggaagctgaattcaaaatatatttctggttcccttgtgctgttttatagtcaatatggaaatgtatgacccttgtgaaagtaaactgtaagtatgaccaaaaggtacctttatagaaatgagtggaaaagcattattttcttgtaaatatagaatctgaataggaatttgctgctttctcccactttgcctcacatcttcctactgcctttctgttctgttaatgcatctckagctctaggaaaatggtcatcttttctctgttccaacaagaagtctttaggtagctggcagggcttcatgaggcagaagagctatgactccactgaaatgtcagtttgaaacaccaacggtagtcataggaaaattgatcacttctctcttcctcctccatgcccctcagctctttgtttatacctctagcacagcactctgccttgaattatagctagttataaatgtgtctgttaaaaacactaacctgtaagtcttggtagacagatcttacttgtatttgtattcccagcagtgcttaagacagagccttaaatatattacttaataaatattcactgaatacttgctgaaatgcatgtcttcacttaactcccgaggcatggcaggaggtaacaaagtgaacaaaagatactatctgttgagttgtgggaagagtttctcaaatatttgaagttgctagcttaaaattagtaccacttatcattcctttgttggctcattagttcgtcatcaaaaaaaaatttaccgtgcgcttactgtgttccaggcactctactaatcattaggaagacacagtgagcaatacagagaaggttcttgtcctcatcgagctcattttagacagaaaagtggacaaaaacgagtattcacctacaattaataataaattgtgataagtgttagaaaggaggtaaaaaggatgttatgattaagagataaaccaggaggcacttacttagataacgtgacaagcagaagtctttctgaggaggtggcatttaagctgagatctgaaggaggagtgagagatctttctatgtgatgagatgcctgggaaagtgagctccagatggagggaactgttaagtgcaaaggcccagaggtgggaaagtgcaagttctaaaaactggcagaaaattgtgaataagagggagaaagaatgaacttaattcagggagggaggcagaagctatatctataaatacagggctttgaacaatctggctttgattttactctaatcatagaaagccactggaggattttcaggaagaggttacatggtctgatttgtgtttttataagattgctctggctgctggtggagartggactcgaagagggcaagaagggagaccaagaggtgaaagtaatccatgtgagatcccaggatgtggtcattatgatcatgagagatggaaacaaacagatacttgcaagtaaaatttgggtggtagaaccaactggatatgtggacggctacagtaaattcatgtctcacagctgtggcttcttatggttgacaggatggaacgctattagtgttgaaaatgtggagatctacccgcttttgaaagtctctagagatggccgagtgaattgctttacttgcaaaaaagagaatatgctgtcatgttgcactacactggcaatagctcctcctgactgctgtgccattaatcttggtttgacaacctaggaaaacttgtggggttcttatcttttgatccagccagtattgcttcggagactcattaatagaataattagcctctaattcctgtgctactttcagtacaagaaatttcccttaatcgcctgccctacttccacctcattttagattaagttgctgtaaccagtattcactataccgaacatatccaccttaaaaaagctctatatgtatttttaaacacataaagcagttattaccttttacaaacaatatagatgtaagtctcctctgtgttttcattagttggctgttctgtaattttttttttttttaagagtcagggtctcactctgtcacccaggctagagtgcagtggcatgacatacctcactgtaaccttgaactcctggcctcaagtgattctcccaccttggctttccaaagccctgggattacaggcataagccaccttgcctggcctgtaaatgcttcatgaataagtaaacgctaagcatttattcttgccaagtcatcacttctgggccttttggctaagatcaagtatattcttgccaactcataaaacgatgcactctttccaacttatcacaagcagaactatatctctgtatgtatatagacttaggaaatctctcataagtttttatgacagaataagtagttctcagttttaactgggtttggagaagaattctaattagcagctttttccaaatttcattttggatttggaaaacgaaaaaaaaaatgttgctgtggcccatcttctaatggtctgacagggtgaaagatgggaacagtttgcctatttgactaatagatgtcgatcctatgatttatgctgagacaaaacaaacttgtaaagctaaaagacattcaatgtgttggcaaattgaacatatttcaaaatatatattagagttcatgtaattcctcccgtttgtcatatcacaaaaccatgacattgggtcattacttcagatatgagtctcagatytactcttgatgccaatagggggttagaaagtggataataggaaaaaatattcattggcaaattagataaatccccaataatattacaggtcaatgaaatatcttcttggaaatcacacaactaaactatgacatcagaagactgattaccactcagtggaagatagagaagaattagaagtgaagaatgtctagactctgaaaagagatgaagcactaatggtcccagggaggtaagctcatctactaatagtcaagtgttagtgaaagacccagaatagccaaagctatcctaagcaagaacaaaactggaggaatcatattgcctgacttcaaattatactatagacccaaacggcatggtactggtataaaaacagacatgtagaccagtggaacagaatagagagcctagaaataaattcatacatctacagtgaactcatttttaaaaaaggttccaagaacatactttggggaaaggacagtctcttcaataaatggtgctgggaaaactggatatccataggcagaagaatgaaactagatccctatctctcaccatatacaaaaatcaaatcaaaatggattgcaaacttaaatctaaaaccggaaactatgaaactattaaaagaaaatattagggaaacttttcaagacattggtctggatagagacttctggagcaataccccaaaagcacagacaagcaaagcaaaaatggacaaatgggacctcagcaagttacaaagcttctgcacagcaaaggaaggaaacaacaaagtgaagagacaacccatagaatggaagaaaatacttgcaaactacccatttgacaagggattaataaccagaatatataaagagctcaaacaactctataggaaaaaatctaataatatgatttaaaaatgggcaaaagatctgaatagacatttctcaaaagaagacacacaaatggcaaacaggtatatgatcactgatcatcacagaaattcaaatgaaaactaccacgagatatcatctcatcccagttaaaatggcttttatccaaaagacaggcaattaacaaatgctgagaaggatgtggagaaaagggaacacttgtatgctgttggtgggaatgtaaattagtgcaatcaatatggagaacagtttggaggttcctaaaaaaaactataaatagagtctagggtgagctgtaaacagacgggagccctgccccctcctgagttgtcagggtgggagccctgcccagccatggctgcagacctgggcatccatgtgctcttgggggcccgggaagatccccatacccccacaggctcagaagtgccagctctacttggcctctccctgttcccagtgcccactctgatttcggagcaaagctgaggctgaagctgggcactgttgtgacccggccaggtgtatgtctgttcagggcagtgttgacacgccagccccatgctgcctcagtcccctctggactttgggtgctgacgagcatgggagggaggctgagggtaggctgagggtggcttggtgcaggcctgcaggtgcctctcggcctgcaggtgcctctcggcatgaacagcctgggtgccatggatgacatgattgatggtggcaggaggcagacaggctcctgggtggaaaggagtgggtccccagtgaagccccaccttcaggccagaaacggcctgaagcatgggggctgggctgtcagttctgggtggagtccatggccctgagtgagaacttatggtgctttttccaggcctgcccatgaaccaattagcatgcatgtcctcccttctgaagcccataaaaaccctggactcagccaaactcacagagatgagacaacctgcctgcagataggagctacccactccatgtctcctctcccctgagagctgaacactcgatgggacaacctgcctgtagataggagctacccattccaggtctcctctctgctgagggttgcacacttgttgggacatcctgcctgtacataggagctatccactccaggtctcctctctgctgagggctgcacacttgatgggacaaactgcctgtagatagaagctacccattccaggtctcctctctgctgagggttgtacacttgtcgggacaacctgcctgtgcataggagctactcaatccaggtctcctctctggtgagaactggacacttgcagggatgacctgcttgtggaaaggagcttcccactttggatctcttgagagctgttctgttgctcaatgaagctcctctctgcattgctcactctccagttgtccatgaacatcattcttcctggatgcaggacaagacctcaggacctgctgaatggcgggactgaaagagctgaaacatgccccactgctcgccacattgtggacgatgagaaggagagaagagctgcagttctttgaggagcccagacctagggactccctgagctatggctgtgacaccctctttgggctcagcagttcctggtgtctccaagcttccaggtgccaccgcattccccttgtccagacgtggttgcctgcagtggaagctgcgtgcaatatgtttggtacaaccgcagcctcacatgcagctggcacctgtgctggtgcctggagttgcctgccctgctgcagcagccagcgtgcctggttgtgcagtggctggaccccatgctctcttgtccacacactgctcactgttctgtgcctggctcacccttgggaggtgtgggatctgggccagtagcacgagctgagtgcagcctgctgagctgagtaggcagaacgatcccaaagggtgtgagcaatactcaggcagaaggctctgtcagccacagaggtttctggctggcaaagcaacaccccaaagatcctgtgacactaccatacgatccagcaatcccagtcctatgtatatacccaaaagaaaggaaatcagtatattgaagagatatctgcagtttcatgtttgttacagcactactcacaacagccaagatttggaagtaacttaagtgtccaccaacagacaaatggataaacaaaatgtggtgcatatacacaacggagtattattcagccataaaaaagaatgaggccctgtcatttacaacaacatggatggaactggaggtcattacgttaagtgaaataagccaggcactgaaagacagacattgcgtgttctcacttatctgtcagagctaaaaattaaaataattgaactcatggagatagagagtaggggaaggttaccagctaggaagggtagtcaggactggggaggggttggtggaaagggggggcatggctaatgggtacaaaacatagaaagaataaataagacctagaatttgctggcacaacaaggtgactagagtaaaaaataatttaatcaaacatttaaaaataactaaaagagtataattggattgtgtgaaacacaaaggataactgcttgaggtgatggatattttaccctgatgtgattattacacactgcatgcctatatcaaaatatctcatgtaaccatatatatatatatgtatgtatgtatataccatgtacccacaaaaattaaaaattaaaaaaaaattgaaagtgtgaataaaagatgtctggtacattctcttttctctgctttaactcttccaagcctcctaagggttgatttagttctaagaggccctttttccttcccatgcttcatcattttgctgaattctctcctaatgctttgagaaagcagaacccatcctccagtttaagggtctgctctgggagcctgcaatggctatcaggagcagtgacctcaagtttgtgcttcagtgagggtaaggttaattgtcatcttgcctggaggctcatatttagatttaaaaaacaaaatcaacacaaacttcaactcaccatttattttgtagtcatttcaaccccatctattctataagaagccctgttatacagacctctggcacagttatttttcactttggggaggacaccctctctttttccttagacaaactgcttgttctctgacaccctgctttgtggcaatggattttggagcatcaggtctccaacgtgtaattcacttactaatatggtcaaataaattaggaaaaacctcgacaaaccacttattataagcaatcaattctggtcataaagaatcaagtaagtactcaactatcccatggtataggtaggatttgtgtcgccttttccctttccattcatcacaggatttgctgtctttaatttgaggaaatcaggtcaaaccaaattaggctcccacatcacaaccttaggctcccacatcacaatctcattaggttgtatcaactcaacactcattacatgaagttcacaacaagcttcttgtatcttattcaaacatttaaaaataaggctggctaggctgggcacggtggcttatgcctgtaatcctagcactttgggaggctgaggtgggcagaccacctgaggtcaggagtacgagaccagcctggccaaattggtgaaactccgtctctactaaaaatacaaaaaagttagccgggcaaggtagcaggtacctgtaatatcccagctacttgggaggctgaggcaggagaattgcttgaactcaggaggcagaggttgcagtgatgtgaaatcgcatcactgcactctagcctgggtgacaggacactctgtctcgaaaaaaaaaaaaaaatgctggtgcagtagctcatccctgtaatcccagcactttgggaggacaaggtgggtggatggcttgaacctgagtttgagaccaggaacacagtaagactctttctctacaaacaaaaaaaattaggcatggtggcatgtgcctgtggtcacagttacacaggaagctaaggtaggaggattgccagagcccaggaggttgagacttcagtgagccgtgactgtgccactgcactccagcctgagtgacagagtgagatactgtattaaaaaaataaaaacaaaccccacaaaaatacacacataataacgcagtagtcttttaatctctggcaaaatcttmcacacacacacacacacacacacacacacaaatattaatctgagagccgttcctatggaagggaaagttagatatcatgaaaattgagaaaatgaggaatagaaacagaacagagtggagatttattcagggcgagcctaaagcgatatagaaatattaagcagtaactggactgcaccacaaggctggtagctccgactgtctactctatcagccttaaatttctactatgagagtcactaaaaggttgcctaacaaaggccgatgactacttctctcaaatgtcttattttaaatgcacaagttgcctcaaataggttttccatctctttactattagcataatagcaggaattcgcttattaaattagtgagttaatctgatatctccgtgcccaagagaataaaacataggacagattaagttcagggtatgtcagaaggctgacagtgatgaacagtgggaaacagagagcagaatgaggtggtatggtctaaggtttgtgattgcttcaaggggcatattttacctaaactgcaaatctaaaagattcttcagtgatactctgcttacagtttgatacacacacacatacacacacacacacacacacacacacacacacacacatayctctctctctctctctctctcactctactcaccttgttactcatttatttctatgacaatgagacaacgatacatctatgtaacgttaggtcattctctctggtaggtcaagtccttgcccagattctgagacaataagcagtctggtattcaaaataatgaaaactcaatctcagctgtagcattaacctctggctctgctatttcctgcttccagcaccattctcagattactgactcttttcagctcaggcagaagcaacctccttgggtagcctatttctggagaagatcaactactttttggcaattgagtgctgaaagcccaggaaaatggactaaaaagggtaagaatgttgtgttgcctctggaagctctccttacaccacagagatgtacatgtcaggcactggcttacctggtgtgatttcagaggcactgaattggtcttctttgatctactgaaagatgctttagagagaaggagagaaagtggagaacagaaggagaaacaatgtgcaagaagtggaggctgaaggccacaaagacaaaccatgcctggagagagtcctgctaatcagacctgcctgaaatggaaaacaagtgcagccagctgctttgaaagaccagcttgggctttgccaatagcattaaattcttagtgaatttccatctcattgacctagggagccttaagcactgagatcaatacttcagtactttagtaacaaggttggtgccagccattgctggggagggggctgagttccaactgaaatgaaatctaagaaagctttttttgataactcctggtcctgtttacaattttactctctgccattaagtgaaataagatgatctctcagcagccatgctattcaatcatcagggaacggattatacaggatttgaagttggaagtacctgctcctcttgtcccagtgcatcagtcggttgctgcaaaactcctagttaaaatgcgatgttgagaaggcaaagcctgtatagtcatgatatggctgtataaaagccgtattttctcctctgagagcccctgaggatttcatctgttgtaaggatactattaattcagtggtagtctggttgccttggacctcagctttcaatcctctgagatgtcccaggatctaaggtcccagatcagctagcaaagtttctctgggaactgatctcaaagcgtttattaggcaattctacattagtttctttttcctatatacatagttgccagttctttgtattaaatattgacaacagctctagtaggatttatagtaaaatccttttgggaacatcatacaattcacagaagggacttggattgtttttattgtttctttttaaaatcttgtgctccaaaatgataacagcagaagatggctgtcgctatccgattagccacaggatttaactaagatacaccagaagggtctattactgcagggtgaggggaggaaaaagaacataccccaagtgtttcttttactctgtactattctaggcatcatactatatgacctcacttaacttctcaacaactctagaaaaaaggcattattattgctcttatgtagataagaaaactaagtcttagaaacactatgtaactttttccaaaggtcaaagttcctagaagaggcaggatttatatgcaggtaatttgactcaagagtttatgttctttccactacagcatgtttctttaaaaaagcttccctctcagagaaaatgctacaaagtctattgcctggcttaatatcttcatcataatctggaactaattttctgatgaatcagcatggagtaggctgagcagcatgcccacagtacagttgtctctaataaggcctggtgaaggacacggtgaagggcaataaaaccccagcatgaacacagagttttattctttctgatgagtcacatgtgaggcatagtcaaatctggcctcttctttttgagccaaaataagctctgcatttgccagctatgttgttggtgtcttctttgtttccatgaagtcagtaatgtacccggcttttgaaaacaccaactttattaaaggaatacgtctttaaaaatgttagtatgacggagtaaaagcacaccccgaccaggatgccagagaactaggtttcatgcaataaaaagggaaacagtttcatatctagtctggtttgagttgagaaagattctcaagtcaggttcaagctcattgggaaagagtgctggggtaaatcagtgatcctgttgtgcgtgtggggtggggagtggtgggatatatcatgcacttgtgatccctattctggtgtgtgcccctcccttctcccatgtattaaccttatgactttgtgcaagttgatccagcatcttaaggcctttatagcaaaatggagataatgacaccttacgtatctaaaggcagcatggatagaccagctgatctcttcaaatctttttcagctaggaggtttaagattgtattttctagtataaagcttagcattggctggactttaatggatttagtcactggaaactttaaaaatgataaggttttataaaagggcaataaaaactttgaaatgattctgcyctaaatcaaagagatttacaatatatcaattctttcttcatatcagaataataatactgaggaagtccattaaatggttaacttaattatagcctgtgaaccctgtggggtcagtgaaaattatttagaagaacacaggaacgtaggatagcattctaaatatctatgcagatgttgagtcttaaggaaataacattgtaaaacaataaattagttaacctcattatagccttgccttgagaagaaacacagatratgtctcttctatgtgaaatgttcaatgaagaacacttctactttcaatactcacactccatgcaataaacagaaaacagactcagaattgyttatcacagatatatgtcttacctcggatcacagagaaatttggttttctctccttcttctctccagataagccattctcgaaaagaaggatgtacaaacatacgagtcatgtctctgcgcttgattaggaacatggagaggttctccattctctgctgaaaatcctcccattctagtgtgccttcaatgctcccagcaytgatggcctggaagatatgctcatcagtcagtgggtggagagaggccactgccacattcaggagaggcatcacccggtcaaaggaagactgggttgggaacttcatattgcactggagtaaataaacctctgagagcgaaacaggaactactttgtagctagagctctttaacactagatagcctttctctatgaggtcaaatgtaagtttcagatatagataggacccttgactgagggtcttgagatgagaactgagtttgccaaatgtagtattgtccattttgccattaagtgaaatgttattctggatctctgagctgctgtgtatccggtgcaggatgtaagcctgcaggtcctggtctatggcttcattctcttctagtcgatccaaaaaaatcctatggaaaggcagcagcttggtaatttcctaaaaagatggagagagagaaagagacagaaagaccttcagtttcccctaactcttgtgataaactatgaggttcacaaatgtattctgaacttcgaagtggccaaacagggaaacatgatcaagtattagtatccaaaaagtaaaacaaattagttgcatagaagggacacaacttctcctaacattgagacttaagatatatttttaaatgggtctttgtaaagagtgcttttggagtgatttcatgatcgtcattctaaacaacactcctgaaataaatagaaaacggagcactgtataactcttttgctgtaatttttctcagtgtaaaccagggcataatgccaagtacaagtcagtaagagaaatgtacaaagattcaaagamtggcttagaaaaagttggctttctaactctcctaataaaatgactatttaaaaaaaaatttcccacacaacacagatgtataaaatgactacatttaaatgcgggccttctggagataccttagccgaaaggtacacttctaacagtaggaagcttggcaccttggtaacagattccaatagaatctgttggaaattctactgggggaaggtgatatggctttgtggctactcctatgcactggattccatcctttcttacctacccacggactttgctcctgtgagtacccattccctctcctgcatctgtttcttctcagctgggtcacacatacataaactccatattcttccttccagctactaccctgtatctctgttcccatttttcacaaaagttttctgtattcgctatctataattctttccttcccattctctcctccatttgttccaatcaggctgcaccctcaccacctcactgaaatggttcttgtcaagggcatcagtaactttcactttgccaaatccgataataaagttccagttctcatcttcctcaacctctcggcaatatttgacacaacgcatctcacctcaatgcactttttttggagtcactttctgcagcttgctcccagagaacgttcccctcttttctctcttagcacactggccacttttaaccttcccttttttgctggctcttttttttatttcccagctcacccagggctctgggctctgttctttcctcttctctagccattctcactcccatcaatagattctttagtcccatggtgctaaatattatctatatgtggctcatgcctaactttatgtttctagcttagtcatctcccctgagtcccatcttatatctgtctactcaacatttacatttggatatttcatagacaatgtgaccaaatcagtacttaattttgtcccccgccacaaaactcaccccatgtcaataaatggcattaccactgactctaccaccaaattctagaagatatctgtgatctttctattgtcctcaaatcatcattcacccatttgctcacaacatacccaggattcattcttgagtcttctctcttgctgacacccacattcagcccatcatcaagtccttttactctccttcaaaatacagtccaacgaaatatgaccatttcacatggtccccatcattatcactctagtctaagccaccattacctttcacctatacttctgcttcaactctttatcccttacattttattatgtagacggccagttgacagaaatctttaaaaaagacagatcagatctcatcacttttaaacgagaggcctttcctatatatcctatctaaaacaactactatccagttatccctccaccctattttgtttttcttcatagcactcaacactacctgtaattttagtatatgtttaactttttgctcatttgttttttgtgttcctkactaaaatataagctttaggaggatgggaatattgcctgtcttgttcattttgaatctccagcccctagaacagtccctgaaatactcttaagaaatgtttgtggaaataatgatgatcaaatataaatgaaggctcattttctaaaacctataaattctttcactgtcggaaatgaaataatttttaaaaattcttagttgaagtactttttctgttggcacagctgaaaaattaaagtcacctactctatccggaaacacaatttcttttgagactgcacatgatattatgtgagaatatgtatgaggataacatctccaaagcatccatttggtaaagcagtcagagattacattcctggaggtttctttcattcatctttcatttttaacaatcaagctactaataatgataggttatataatttttagttgtaaagatggatttatattgatttatccatatcctttagctcaaactactttgagattaataataaacatctgtaaggtggtggccaggattagaaatatagtttctcatcatggaagacagtaatgctaactggtcaatatatggaaataatgctaagtgcctggcagagggggaaaggagggacttaaatgtacagactattttctgtacatcagcacttatgacaagggggctgcatccaaatagtgagataagcatataatgtttgagattttaatattcatcataggaggaaataatttttataaaaagaatgagaaacattgttccaaaccaagtgtgaatatgtaaagaatgggacaccaactcagctacaatgagaaggctggggaaagcagagtcatttatctttagcccatatatttttacaggctcagtctcacattcctggtccttattccaggccattaagtgaccagtgagtgagaagggaaagtaattagaaaaaacaacaacaacaacaaaaaccttctctctcagttgtagtaaatttaatctaaagccctaatattgccaatttttgttaaaggaggacagatatagaggaaagtccatattcatgctatagaagagttgtttaagtagaagcagagggaggaaccagaaaatctcattctaggatgtagattgaactgaattttgcatagcattaaatgatcaaaaaatgttaaacgaaagtcaaagtgttagagatcatctttacactgctgtcctcagaacagtctagaaaaattgactttcttttcatgctattttgaggaacattttattaaacctcatccagagcaacagaaatgggaatctgagagtcaygtataaagaatgtcttyctagatcatatctctcaaaatattagattaattcttcgggaattattcttcataatgctctasgacatagtagaagtttatgaaactaggacctagaactttttcagtctaagctctttccaagaggaatcatttatggtttaaaagcaaacaaacacatacctgtaaactggtcctaactgttacaattagtttgagccaagaaggaaactttccgatcattttactcagaaacgatacaattgtatccccataatccggtttgtgaaattctgcttcatttaatccatcaattaaaatgatgaaatcttcatctgggatttttctctctgagatagaaagaaacacattacttaataattaccaagtggataaatgagttcttactggatctttgatcacatatttctttggaacaaaatattagaaaaggcttgtcatgtgtttagtgaatgctcagggtacataatttattctaagggcatggaaaaattaacttagtaaattcattttgcttttaatcaggtatgaaggcttttgtcacatatgagtatatatatcatcattttcagaaatctccatattaatagttgtgagacagcctgagtattggagttaagaaaatttgcacatgggaagtaatttttctcttacacatgaaaaagctgagtagaacatgttctgttttttttttttttttttccctatctgacagcattaaagagaatagtatcatatgttcttttgggaatgtccccaaaaaggtttatgtaaagtctaaagtctaaaacagtatataggactgcatgtgaatgtgaatgtgtagtgggaaggaagagacagagtaacagagaaaaggaatcccaggcattagacagagttgaaccaggtggctagatcccaacaccgtagcagcttcctagactatacctaaagcagccgcaatgagaccagtcccttgcatgatcttcccaaaagtggaggagtcaagtggaaaagacaaacatctgctgtgtttgtgtccagttctctcttggactccacatgatccggcattgacaaaatcaatttaactttagggctatgctgacgaagcagcttgggaaaatttcaggcttctgcacttgataaatgcttattgattcttggttcaacaattagagattcaaaaatttccacactgaaagaacattttagtctaagtgaattgtgaataacaaataaaagttatttgttagcaggatctcacaggctctgaaagggggaaagcagagggaagagggcaagcagtcatcagatacctggagtgagaaacaggttttatctgaggaggaaaaagaagaagccgaggacagaagaaaatgtctgtggacttgcatacaaaattggctatttttgcctttgaaagtcaagaccaattgaaactgaacatactattttgtttccatatttgaaaatatacagatcttttgcaatgattaataagcccttattgtttttctcctaaagcataaactttataaaagagatttaatttcaatatccaaatcagttctcaaattatgaagaattttaacaattactttcatctgccaagtttttagggagtgaaatgaactatggattccagctctattaacaatcactactaatggagtggtattctagatgacgaagcactaagaaaacatgaaattccttcagggagtgcaaagtattaaggaagaaagaggagttgcttggaactaactgggatttacccaaacaacgaggggggtgggtgttatgttcttgattttgaaggctctggctcccttaagcttaaccatgcctttaatttccatagaggaattttctagttgcattctgcctggctaagcaccatcagctagtatcactcactgtgctggagctatctatccctgtactggttcaggagaggccactgcaatattttcaagctctgactgttaaacagctggtagcttggaattgtgtatggtgggaatatttacacaataaaaattggcaaatattacaaatcagccctcctctcccaggtggctgttaaaaatttaccagcacaccactgtccccgcccttcaattatatctcctttaataacttcaaccaggttccttcataagaaagtcatgattttccagtagacaaaacagctgatgataatgcatctgttgggattttctttgggatatcattgcaaacacattctcaagcatggagatcagtaatgtgtagtaaattatggtccagacattttaatgaatgaataattcatttgctaataaaattacattttcatttgcataaattcttagtagattaagcccatgagtaaagtagatgatatattattttttatttttaaaagrgggtacttgccttcccccttaataaagctaattttattcttctaaattctgattattatttttttttgagatttcctgttttgaaggaattacttacaagtcacctactaatgtaggtatcaaaaaaaatgtcatcacttaggaagtaaggagggcatatttatctaaggatatcataatttttaggattcagaacgataaatgcaaataatttcctaatgctactaatgctgtaaaacaatgagaactgttcctgaaataattcattttcctttgctaaatgataaggtttctcaattataaatttaagaggtgagatactaatgttctttagattttcactttgaaatgcaaccagcctacaagaatgcttcagtatgttcactcattcaaatttctgtagatatttagagtagtactttaaatcagtagcttaaaaaaaatttacaaataaaaataaattggggactaacaaaggattgctgcttcgtattttgccatgtaagaacatgtaaaatataattaccatccacgatcaccatatttcatagaataaaaaggattttaacattaaaaaagtaggagggacattatctaatctttacatacatatatatggaaaactacattatatctacatccatacaaattctgagctgttgctattttcttattttgtcatggactaactaaaaactttaaatggactggtgcttaggagccactgctctaggtgacaagtcactaaaaaggtttcccaagccctttaaaatccttatttttaatcccttgtaaatacacgttcaccagggattccccactgcctccacttacatgtattcctaacaaatacgtgaactttcttccttagtagttccattgtaagactctacctaggtgcctgagagaaataagaattacagagactgcaagagaagagatagtagctagtactgaagtcagaactgaatctcggcacatgagattcttttactggtatatataggaattgttgaaattgaaaaagaagactcatatcagacaatatctttgttctgaaaagcttcacataatatctgagttatctttccttcagtgtggtaacaaattagtgtctcagctgagcctggtggctcacatctgtaatcccaacactttgggaggctgaggtgggaggactgcttgagtccaggagttccagaccagcctgggcaacatcgtgagacactatctttacaaaaaatagaaaaaaattagccaagtatgatggtgcgcttctgtagtcctagttactgaggcaggaggatagcttgggctcaagaggtcaaggctgcagtgagctatgatcttgccactgtactccagcctgggtgacaaagtgagaccctgtcccaacaaaacgaaacaaaacaaaacaatttgtgtctcctttcatttcatattggtagctaaagcaaaagtgtactgagaaacttcaaaactttttcatttgttttatatgagcatgtgggtgtgcgtgtatgtattttaatcactgtacttgtggaactttaaagtactgtgaaaaatactgactcatttttcaaagaaaatacataatttgaaatctagcttctgactctaaattgaaagtgttttccattgaaaaaactccagctacctttaaaaaataattctatattaaaaattattgcaacaaaatttatatatagtgaattacaaagatcttaactatacactttgataagttttgacagctatatgtactcatgtaagcaatactgtgatcaaatttagaacatttctatctttccagaaatttgttaggttctcctccagtcagtcctcaataggaaaccactgttcttatttctatcactgcagacacttgttcttttgcctaacacgtttctgagactcttctacactgattgtactattattttgttcctttttaatactaagaagtattcaattgaatgaatgtactacaatttatctattctgttgatggacacttgggctgtttccagtttttgacgactatgaataaagctgctagaaacattcttgtacaagtgttttgtagacatatgttttcatttctcttgggtaaatacgtagcaatagagttgcttggtcataaagtagatgtacatttaactttgtaagaaactgttggctgggtgtggtggctcatgcctataatcccagcactctgagaggctgaggcgggaaaactgcttgggcccaggagtatgagaccagcctgggcaacatggcaagacccccatctctgaaaaaaaaaaaaaattagccaggtatggtggtgtatgcctgtagcccccggttactcagaaggctgaggtgggaggattgcttgagccgagggggtcgaggctgtagtgagctgtgctcatgccacagcacttcagcttggctacagagtgagagaccttgtctcaaaaaaaagaaactgacaaatagttttccaaagtagtagcgctattgtatagtcccaccagcaatgtattagagttccagttgtttctcatccttaccaacactggatgttcattcttttaaattttaaccattctaatgggtgtgaagtggtattctaatgggtgtgaagtggtattctcattgtaattttaatttgcatctccctgattactcatgttaaacacttcttcatgtgcttgtaggctgttgacgtatcttcttttgtaaagtgtctaaatcgcttgtccatttaaaaactgaactgtttgcattctacatgtatcgtagatacaagtgctttgtctctcacacacagaaacatagtgaatatttcctcctctttggtgacttgcttttcctttttcttagtggtattttttgttgagcaaatatttttaagtttgatgaagtctaatttgtcatcatttttatataattagtgatactttgtgtccttaagaaatctttacctattccaagtttgtgaagatattctatgttttttctattagctttagagatacaacttttctatttaggtctgtgatccatctcatattaattttggtgtatagtgtgaagtaaggattgagattatttccccttccccaaacatttatctagttgttccagtaccatctgatgacaagaattctctaattgccttggcatcttagagaagatcaattgactgcatatgtgggtctatttctggattctctattctgttccattgatctattttctatccttgtatgaatacaatcctgtctgtggaattttggacctgactcaagctggctcatgagagctgattgctaaacttttaagcatcaaatcagccccccatccctgagctggatgttaaacatttactagcatatcactgtcatgactattatagtaatctgtaattctgtacgtcttgaaaccagatcctatcttccaactttcttcttcaagaatgttttggctatttttggtactttgcatttctaaaagttgtccatttttacagaaaaattctgctgggattatgtgttttttttttttttttttttgagacagaattttgctcttgttgcccaggctggagtgcaatggcatgatctcagctcactgcaacctccacctcccgggttcaagtgattctcctgcctcagcctcccgagtagctgggattacaggcatgtgccaccacgcccggctaactttgtatttttagtagagacagggtttctccatgttggtcaggctggtctcaaactcccgacctcaggtgatccacctgcgttggcctcccaaagtgttgggattacaggcgtgagccactgcaaccagccaggattatgtttaatctatagaatagtttaagaaaaaactgacatcttccaatcctcatttatgacatatctcttccacttactaagttctttaatttcactctgyaatatttttgctgtgctttcactaagtcttacacatctttcatacatttatttttaagtattatatattttttggtgccactgaaaatcgtatttattctacttatttgttgctatattgaatagcaaggggttacctgaatgtctggggctgggggttggaagttggaatcatttggaagcttattcaagcatatgtttggtggcagagcaggaatgagcactgggacagtcaactagactctccctgtggtttgtgctttgcagcatggtgaactcagggtagtcaggtttcatatatggcaatacatgcctcccaaagcaagtggtttggtgaacaagatggaagctgcatggctatttatgacctccctcagttgtcacatagcatcattttgttggctgaagcagttgcaagcctgcccagttatgaagggaggggacccaggttgaactattagtggaagtaatgtcaaagaatttgtagccatgttttaaaactgccacgtagttttaaaatttcattttcagtattttgttgttagtatagaaatatttgtacattgactttatagcctaaagctttgtgcttactagttctagtcagatttcttttttctgggtagattccttagagtttgctaaggtaaacaattatgttgtctgcaaataaagacagttttacttcttcctttccaatatttatactatttgcatgcttgtttattttcttattgtactagcctggaccaccagtggaatgatgaatataagtggtgagagtgagggaacactcttgtcttgctcttgaccttaggggaaaaaagcattcaacatttcactacatgtatttttggagttgtcctttatcagactaaacttccttctactcctagtttgtgtastttttatcactaattggtgtacttcggagggactggtttcatggaagagaatttttctggggtggagggtggagaggatggtttagggatgaaactgttccacctcagattatcaggcattagatgaagtgcgcaacctagatcccttgcacgcatagttcacaatagagttcgtgctcctatgagaatctaatgctgcagctgatctgacagaaggcggagctcaggcggtagccgtcgctcacctcctgctgtgtggcctggttcctaacaggccacggacctatatccatccttggcccagggattggggacccctgatgtagtattttgtcaaatgcttttgtacatttattgaaacgattatgtggatgttctcctttattttgttaatatgatgaattacactgattaactttcttttttctttttgagaccaggtctcattctgttacccaagctggagtgcagtggcatgatcttggttcactgcagccttgacctcctgggttcaagtgatcctcctgcctcagcctcctgagtagctgggactacagctgtgcaccaccatgcctgctggtgttgttgttgagatgggtacttgctatgttgcccaggctggttttgaattctaggctcaagtgatcctcctgccctggcctcccaaagcactgggattacaggcataagccaccaagcctagcctaaattccttttatgttccagttaccatactagctgctatgtcttcaatggttatgcagcttttatagtttagcgggataaaaatatgctaaacattaaataactagatagtcattaattacactgttctgcctcagcctccagagcagttgggactatagctacttctctaatttggtctatttttgattcatgaatttggaacctctgttattaggtgcatacatctaatacatgttcctgatgagttggcccttttatgtttatcaaatgcctctttagaaatacttcttgtcttgaagtctactctgtctgagattactatagtcactccagctttcttatgctccatgtttatacagtctctatccttttactttcaatctgtgtctttatatttaaaaaactgcatatggttgagtcttgctttttatccagtctgacagtttctaccttttaatataagtgcttagcccatttacatgtaatgtaattgttgatattattgcttatacatctaccattttgcttgttctatctctaaaaaaaatattcttctttatttcttgagttcttttgggtcactctaataaattttagtatttccagctggaaaattgtgtttccagctattgctcacaatggtgatttaagggtgagttaaaaacatggaaataaaatgaagtaattaaatccacttagaacagtatttataatagagatcactaaagctggttatggagacctaaatgagaggcagatatatcttgtagcaaaactataaaacatatgaattatgccagagctgactgcaagcatttggatagccttcttttcytttttttttgagacggagtctcactctgtcgcccaggctggagtgcagtggcactatcttggctcactgcaagctccgcctcccgggttcacgccattctcctgcctcagcctcccgagtagctgggactacaggtgcccgccaccatgcccggctaattttttgtatttttagtagagatggggattcactgtgttagccaggatggtcttgatctcctgacctcgtgatccacctgcctcggcctcccaaagtgctgggatggatagtcttcttgaattggctgtaaggtgtagatccttgtatcactgtgtttctttcaaggtactcctacatgtgagcagtttctatattcacttatctgttcaaaacatatttcctaaaatgcctactatgttcaaggtgaggtaaccactatgaaggataaaagctgaattttacaaagttcctaatttcaataacatacaatttactcaaagggataagtacaaaagtaattcttataaactgcaaagtgtatctggcatatggtaaatatttaataaatattaataataataattytaaattcttgttatacattatgtgttatgtaccataaatacatatatatattttgaaaaaggatctaatgttatttggaaggacatcatttctgactggaggggggcaggtagatcagtaggtatttcatgaatgaggtagcatttaagctggtccttgatagatgggtggaattctgacaggcagagatttaagaagaaggtatatcaagaaggaaaataatgagtaaatatatggaggtgggaaaatctagggaagtatttgaggactagtgaatattttagtttacacataaacacagggttcctaaggataacagtgaataataaggctgaaaagtaggttggatactggccatcaagcatcttgaatgtcagaacaaggaattgaaagttaattcagaaggcaataggcaatcagcggattatgaattgaggaattatgtgatcagagaagtgttttataaaactttatctggaagaaacacataaagtctagaagactggagagactggggaagaacttcccctccaggtgtgccatgaatggtttagaagtgtacttaaaattcagccctcaggacatctgaggcttggcagagctgtctcctcagggccagtcatgtccagcaatgaggagttataaatttttatcccagtatgctatacaaagttttattattttgtaagtgtgtcatgatgtggaaagagcactaaactcgagaaccaggaaagaccaggatgaggtaattatagatatgatgctatgggcagatgaacagtccttgtggtaatgatgctagaaacaattgagccaagtgggtgtgagaaacatgacgaaggcagaattaacaggttttagagattgactgaatgtccaggaaataggcttaaaaatacttgtggagaaacggcaatgtttaaaaaggtaacaggtagcaaaggtagtgacagaggtcatcagagtagaggagaaagagaaattctgatatccaagtaaccagcatggaagctgaaataactgaagatgatggccaggagaaattataaaccatctttccttattagtgcctccaaagcccttgagaaaggtgtctaagtctctcaggaataaacaggattgctcaggaattttatgcatacccacatccttttctttggcttctggcactaacaaaacattgttaagagtatggggcaggaagacttaagaaggcaggtaccattttcaaggaaatggttgcacttaggccactgctaacactagaactgcagaggaaaaagggaggaaaggcatgagcatgaatgggagatggatctcatttaatttttttcacttttaaaaaataacagctctcctataatacaatttatgcaccgtaaaatacccttatgccccttaagtagattttaaagtgtacagttaaatgatttctggtttatacagagcattgtgtaaccatggaggccattccacttcacatgaactgatggggtaataaaatatgttttttattaatattacatattacaggggggatttctaaccatagaaacttcacaacactgcgttggagccacaaatttactgacttatttaaacttcacagaaaggactgaaagctctactatcttcaggacaaggaaaaggcattctatttggaaataagaataagaatttttataaagaaaagaggaagkagtagttactgctggatttttttttttgcaagtaaaatctcttgtctgttaactgtatcctacaggatatccagctatggaacatttagttttggcaatgtgataaaatyaatcatttttatagtatgacccgggtgaacttgggctctaaacctccatctttcccctcctttgggccttatctgtacctttatggagattttctagtggctccagaactcccctccggaaggaggccatggggtcttgaacacaggaacgaaggctcagcatgctctgcaggtgaggttcccgaagaagctgctcccgataggctgtcagctgaggtgagcggcagagcaaggcagcaacattgtggacaaattctggcaccaagcaagtgtaggcattatctgcttgacaatagtgataggcaaccacctgcaaaagaaagatgagaatgcaaacaggcttatcagtagtaagagcaatagctatgattatcagctattgagtgattatactagaaatcacttagtatctcagtattacataatacttttttgtctcttcattcctcaacttttccaagtaaatataaaagctactaactcagaaaacgtctgatttatgtaagatcagaaatttgatacttctattgtatgcatatgatatcataacccagaataaaatttgtaaataaaaatggagttttcctctggattacaagaaataggaagcaagtctgaaaataaagacttacattgatatcactaacatttattcagcatggagcagwataggaaatagtctaatctttaaacaaagcatgaggaataaaataatccaagaaaaatcatgttagtctcaacaaacacatatacttctatcaatttttggattacaggtgtgttataaactaagtcttataaaaataaagtaattcagattttaaaattagcattaaatgttttctgagcacccaggcagagacagaaaaagagtatcagaattagataaaaggaagaaggaaaggagtgagatttttgttagatgtaggtcttaaaatcaaagaacatggaaaatttataagcattaataccatccagggtctgggctgcctggctaggacctggagttctagggtctgttttttgtttgttagaatctgcacagcactcaccccaggtcttctggctgttctctttgcctccacggcaagtacaaaggggattttaatctggaccacttttctggctcattactacccagaaaagggattggactgtgtagaaaataccaaactggaagggggagattcagcttgaatgtagagaaagcactcagcatggtgctcagcacctactaatcacagcaatgtcagctgatgctgccatttatcatcaccatctttatcctcctcactgccatcattcttaaggatctgtatactgtctttttcagctacttagctttgtgcctatataccggcaactgaaatctgtcctaggggcactcatagacatatgaactccagctcttcaggcctctcttcgagaacaccacctctaactcatcaggcatctgccagtcatctactaaagagctctgctttgaaaagactcctcatctactggtatggtcatcctagttcttctaacacatgttggaaatgtcgatattttttaaacacctgaaatccttctcattaaacataaaaaaaccccaaacaatacaggaaatgttactacatatacaaaactgaagataggaattgcctgtgagtgaagcaatgaagtctgagcacaatatggaaagtggaaatcagaggttgtattttaaaaatctccacttttcttcagatagactggtgattattttacctactgtattttatctatcttaaacagaatgtaaggaacctaaagagaaaggctgtcagcaattgatctgtcctctcaatgaacagtgaatgccagtggttaggtctacatgggtacaaatctccacttgataaaaagcaaacagcaaacctctacatcaatataaactttcatcatatttcacttcaattgattccacatgttgaggctaagcacagctgagaaaatcagctgcaacatcctaaagtaagaagataccattttaaagataaaaattgtgatatttagaaaaagcattattttactgattttattaaaaaaaacccatctgtgctcttggctgaatgtttcatctaaaagacaatgctgaagttgcaccttctgtgctggtgaggttgtggagaaaaaggaatgcttatacactgttggtgggagtgtaaattagttcaatcattgttgaaaagtgtagcgattcctcaaagacytaaaacagaactaccgttcaactcagcaatcccattactgggtataaatccaaagaaatacaaatcattctatcataaagacacatgcacacgtatgttcactgcagcactattcacaatagcaaagacatggaatcaaccttaacgcccatcaatggcagactgcataaaaacaatgtggtacatatacaccatggaatactatgcagctgtacaacagaatgagatcatgtcctcctcaggaacacggatggaactggaggccactatctttagcaaactaatgcaagaacagaaaaccaaatactgcatgttctcacttataagtgagagctaaaagatgagaacacataggcatgtagagggaaacaacaactggggcctaccggagggcggagagtgggaggagggagaggatcagtaaaaatagctaatgggtactaggcttaatgcccgggtgatgaaatactctgtataacaaattcctgtgacatgagtttacctatataataaatgtgcacgtgtgcctctgaccttaaaataaaatttaaaaaaaaaaaaaagattggaaagaagccaaagatgcccactttcaccattactatccaatataatacgagtgattgtgggtagcrctataaagaaaaagaaaagaaataggaagagcagagacttaaatggaaaagatagtttttattattaaaatatatagttatctatatagagaaaaacaagctattagaattaatagagttcaagatttttggtacaagattttcttgtaaaaattaataacatttttgactccagcaataactacttagaattatagtaaaaaatatgatatccacaaaggtatgaggcagaaaatttaactaagaatattaaaaataaataaataaagttgcaccttctgtggctgcctctcttttaatttttagatatttctttggcattccaaatataaagtcttgatgcatctgcagaattcaggcaacatcttcattagatttgcactgtggctcaaaatagattatttactagacttttaaagtagttacgtagtaggtatatgcacatacaatctgtcaaaaacatctgttacttcctccaaattttctattaatattaygtataactttccctctgtataaaaatagaaaacaagcctgaaaatgtagatttttttcccttcagtttctcattagtaccagcgcgcttggtaagagatattagatcactccctacacctttgagaaagtcatcatacatagtcactactattacagctccttrggaatggttcaggattagtctactcataataaatcagcaggtaaaacctttctccttggcgaattcttgtctttcaaagtaacttgtttaaatttcattttttagctatgtctttcttacattatttttttcatttcaacttttccttctgttaaattcctaaactttttcttaaaacaatttcatccacagcatatctgatatgagcagagttgcattatttctttggaggaagatagcaagtaagttttaggttactcttgtgagggaagaaagaaaagggcaggcctgtgggctatatacagaaagaaaagactagaagtcaatacagccttgtgtataaaatctcttgatttaatgctgtatataaaaaatgataaaactagtcataaacttcatcaaagggactgagtggcagcaaaaatgtcacgcttgcgttgagtcacaggccttcactctccatagaccattttctacttcaaatgaaggatcagtgacagaattaagctaatctcacataaagtgaaggcagctttgaatatctgaaatttgtttggaaataaaattctaatttccatactgactggcatttgtatcacttaaactaatattgcagctgtcacacgcttactctccatgttccttttcattactccttctgtgaatgtcttcttcctcactaccacccgattgatttcctaatcagcaaaacccttccaactctaaagtttgatttttaatatttttgggacttggtggctcaccataaataacaactctctcttccttttctcttagtccctcaattctgattctaatcctcatgctgggactagatgctaagaatagatcccaggctagagttctgcctcagtaattttccagcttggagccctaccatttttttttttggcagtaggacttttatttattttttaattttttactttgaactaactttagacttacagaaatgttgcaaaagtagtacacagactttctatttatccctcatccagcttcccttattattaacatcttacataaccatagcaaaattatcaaaaccaggaaattaacattggcaatactattacctatagacattattcaaattttacagtttttccactatgtcttttcctgttcctggattctatccaggaccccatactgtatttagttatttttctttagtcttctggagtctgtaagagatccttagtctttgtcttctatttccttgacactttttttttttttttgagaaagagtctcgcactgttgcctgggctagagtgcaatggtgcgatctcggctcactgcaacctccgcctcccaggttcacgtgattctcctgtctcaacctcctgagtagctgggattacaggtgcacaccaccatgcccggctaatttttctgtatttttagtagaggtggggtttcactatattggccaggctggtctcgaactcctgaccttgtgatctgcccacctcggcctcccaaagtgttgggattacaggcatgagccaccgtgcccggccatcttgacacttttgaagggtactgatcagttattttgttgaatgactctcattttgggtttgtctgatgttttctcatgatgtaactgagaatttttgtcaagaataccagaaaaagagtgttttatccctctttgtggatcatatcacagggttcatgatagtgatgtttttctactggtggtagagtttggatatttgtccctgcccaaatctcagactgaaatgtaattcccaatgttggagatgcagcctggagggaggtgtttgggtcatgggggcagatccctcaaggcttggtgctgtcctcaccacagtgagtgagttctcacaagatctggtcatttaaaagtgtgtagcacctccccaacccacctcctgctctgctctggccatgtgatgtgcctgctagcatctcaccttccaccatgaatgaaagctccccaaggcctcctcagaagctggacacatgccatgctcatacagcctgcaggactattcaatcaaacctcttttctttagaaattacccagtctcatttctttatagcaatgcaagaatggcctaacacaactggtaatgttgcccttgatcactttgttaaggttctgctaggttcttctactatcatctttccctttgtagttaataaatatcttaagggagatgtttgaggctatgcaaatcctgtttctccttaaacttttgcccattaattttagtatctatcagtggatcttgtctgcagcagtatttcctgagtgtttgcctaatagtgattttctattcccctctttgtttctttctacatttattaattagaatcctattggaagaaagagttctcccttatctcccatttatttatttattattgatttaataagtatgggcttattttatcctattggttataattcaatactatattaattttgttgctcaatttgttccagctttagtcactaggatttccttcaggttgactgctgtgttatttcaagaagcctctatctttttttgagcaagttcttgctttttggcaccaaaagatgttctagacttattttgtattttccctgcctctgggatcatctacttctctaaaaagcctctgttctttttattggagaatgatattaagaaaaaagatstggacaccagttgtgattattgtattgatgtgtcattgtttttgggttctcactgaacagagctaagaaatacaagtacgtataaaggcataccttggagatactgtgggttttgttccaggtcaccaaaataaaacaaacagagcaataaggtgagtcactcaatttttttgatttccctgtgcatataaaagttatgtttacactataatctattaagtgtgcaatagcattatgtctaaaaacatgtacataccctaatttaaaaatactttattgttaaaaatgctaatgatcacatgagcctccagtgaatcctctttttgcttgtgtaggggggtcttccctcgatgttgatggctgctgactgattagggtggtgattgctgaaggatgggtgactgtggcaactgcttaaaataagacaataaagtttgctgcattaattggctcttcctttcatgaaagatttctctgtagtatgtgatactctttgataggattttacccataggagaacttctttcaaagctggagttaatcctctcaaaccctggcactactttatcaacgaagtatatgtaatattctaaatcccttattgttatttttacaatgctcacagcatctttaccaagtacagattccatcttaagaaaccattttctttgctcttccataggaagcaaccccacatccattcaagttttatcaagagatgatagcaattcagtcacatcttcaggctccacttacaattctagtcctcttattatttctgccatatctgcagttacttcctccactgaagtcttgaacctctctcaaggtcatccattatggttaaaattaatttcttccaaactcctagtaatgttaatattgacctcctatgaatcatagatgttcttaatggcatctagaatggtgaatcttttccagatgaaaatcttgaaaatccttttcaatttactttgcccagatccatcagaacaatcattatctatgggagttctagcctcatgaaaagtatttcttaagttacaagacttaaaagtcaaaattactccttgatccaaggcctaaagaatgttgtgttagcagacatgacaacaataataatctccttgtatgtcaccatcagagctcttaggtgactagatgtattgtccatgaggagtagtattttgaaagttatctttttttctgtgtagatctcaatagtgggcttaaaataatcagtaaaccatgctgtaaacagatgtgctatcatccaggttttgttgcttcatttacagagcacaggtagagtagatttagcatcattcttaagggccctagaatttttggaatggtaaatgaacattggctttaactgaaagtcaccagctacattagtccctaacaagagtgtcagcctgtcttttgaggctctcaaggcaggcattgacttctctctagctatgaaagtcctaggtggcaccagctacccacagaaggctattctgtctacattaagaatctatcattgctctcgggtggccctggccagggaagacaagctgtatgtcacttcaactggccatagtggtagaagtagaggcagcggggcctgtgtgaccacctgggtttgtgaaatggctgctggcatttctaaatccagtggggctgattgcaaaggaggcccaaggaacagtgccaagttagatgctgattactcactttgagtcctttattgcagagtctgttcattaccaacagggtactgtgaatatatgcctgttgttgctaaatgaaatgaatttgaaaaacttactgtagaaaattcacccaatcaagaagtggaattagtaagggtcaaggaatagcaggggaaggggagaagaaaaaacagaagagaggtggaaggggtcaaataaaaccaaaaaaggagactgtaccataaaaggttattatagccaaaattcccagagcaaagaagaaatatgtaaaaacagtgtgtggctttgcaacttttgaagttgatcttaaagaagcacaaagatttttctgctcaaaaattctcctgtggtacctcggtaacaggggaggatgaaattattcaggaagactctacagatggcataattgatatcattcagaaaaaacagccagaggtggatgatgacagcatcgaagatcttgaagaagtaaatatgtagttttgaaaatacgtctgtatttaacggctggaactgagagttgataccgccaaatggagagaagtcttttaaatataaataaatacacacacacacacacacacacacacacacacacagacacacacacacacacacactcttatcttacagtaaaactgtaggcttcattcttggcgttttcactgttctgtacaaggttgtttggttttttattgccaaagtcaaataaataggagagattgtctacgtatgaaatagaatttagacaaaaaattctggtcatttgctactgacttttccctctcttcttaattctttttgaaaaacccagatctttttgtgggaagcatttctgttgattattttactgatctaatgctgagtgatttttaaaaagcattccaatttggcttcctcaccagtaatacgaagaagaataccttgcttctttgacatgacagtttagagatggatgagaatctaatagatttgtggttgaatttgcttcactgttatcaagtccacttcgtgggcacaataacatactgttggtgggatttgttcaagctattctggaaattatttggtaaagtacactaaaagcctttagaccatttgcactgtttatactagtaagccacttctttgacatcattctaaagaaataatcagtcttgcataaaacttatgaatgaaggtatggatcacaatgttatttatatatcaaaaagttgcaaataatataaacaattaggaaataaatggttaaagaagtgataatgcatcatgtggtagaatattatgcatgtgtttaaaaaccatattttctaagaatatttggaaacacacttggcaatgtcaagtaggggcacaccccagatacattattattttttgggatggagtttcactcttgttgcccaggctggagtgcaatggtgtcatctcggctcactgcaacctctgcctcccgggttcaagcaattctcctgcctcagcctcccaagtagctgggattacaggcatgcgccatcatgcctggctaatttttgtatttttagtagagatggggtttcaccatgttgaccaggctggtctcgaactcctgacctcaggttatccacccacctcggcctctcaaagtgctaggattacaggcaggagccaccgcgctccgcctacattttagatatttattatcatcattgttctcagtggaagtccattcagagaggctagaggctcttgttgtggctataaattatgtgagtaaaattctgctaaccaattaaaaataatatatacccatgtttaacagtctggaaaacagcaattaaaacatatctttcttataaaagaacggacacttttaatgaatgcattagatgaattatattttaagtcaggtgctgcaaatcaaaaagatgacttgtattttaaattggtatggtcacctttaagaatttggaacccacgaaaccattgtttattgtcatgcaaattatgatcctgaataaattttttttttaaaataaagtctcagaaaatatgtaataaagatgtaaagtaaaacaatgaaaaaaaaggaaaatctatggtttaagtgtagccactttcatcaattatcttagctggatcttctggataacttgctacagctcgtgtatcagcacgtactgcttcaccttgcacttttatgttatggagatggcttctttccttaaacctcatgaatcaacctctgttaccttcaaactctttttctgaagcttcctcacctctctcagccttcatagaattgaagagagttagggccttactctggattaggctttggcttatagaaaattttgtggctggtttgattttctaactagaccactaaaattttctctgtatcagcaaaaagcttgttttgctttcttactgttcatgtgttcactaaagcagcacttttaatttccttcaagaacttttcccttatactcaaaacttgattacttgcttggtgcaagaggcctagctttcagcctattttgggtttttgacatgccttcctcactaaatttaattgtttctagcttttgatttaatgtgagagatgtgcagttcttctttttacttgaacacttggaggccattatgatgttattcattggcctaatttcaatattgtgtctcagagaatagggaggcccaaggagacagagatgggggaatggctggtcagtagagtcatcggaacacataaaacatttattaaatttgctgtcttcatggtatctgaaaccaattacaatggtaacatcaaagactactgatcgcagattaccataacaaatatagtaataattaaaaagtttgaaatattgcaagcattaccaaatgtgacatggagacatgaagcaaacacatgctctcagaaaaatggtgttgacaggcgtgctccagtatgagagtgtctgttttcccacagccttgacaacagaatagtttttaaattgtcatgttttaaaatttttgctagttgataggtaaaaaactggtatctcagtattgatttagtttgcatttctttagttatgagtttgaacatgtttcaaaatgtttcaaggccattttaatcttttttgtgagttgtctgtttatttttttcccattttttcatcatgttttggtcttttcctcaattttaaagagttctttaaatataagagatattaactctttatctgtagtatatgctataatttttcttaaaatttttattgattcattaaaaaaataataaatctatcatgctgacatctaagaatatgttttatgaaaataactatttttcaaagcaaacatttcagaaagtggcactgtgtaaatttttgcaatagactcccaaatctgcctctgcattcagtatgctccaagaaactgttttggattcaagtacaagacgaaatgccagtcatatgttggagaagggaaggtggatgtttttctttgatactatgctaaaagttgacaagtggtagatttttaaattattatgtttgattgactaatcataattgcatacatttatggggtacaatgtgatgttttgatatatgtatataatgtggaatgatgaaaccaagctaattgacatgtatcacctccctattgtatcattttttatggtgaaacacttaaaagttagttattttgaaatatattattgtagttgccctgctttgtaacagatcttaaaacttattcttcctatctatctgaaaatttgtacaagggagaagttgttgatcacctgtgatcaacaacttctcccattccttccttcttcacactcccagtctctggtaactatctttctactgtttacttctatgagtttaacttttttagattccacatataagaaagatcatgcagtatttgtctttctgtttctggcttatttaacttagcataatgtccttcagttttatccctattcttgcaaaagacaggatttccttctttttaaaggctaagtagtattctattatacaaacacacacacacaatgaatacacacacacacacacacacacacacacacatatacacatacacataccatgttttaaaattctgtttttcttccaacttttattttaggttcagaaagtacatgggcaggtttgttaatgggtaaattgcttggggtttggtgtacagatgactgtcacccacagtgagcatagtacccgacaggtagtatcctcaccttcctcctactttccaccctcaagtgrgccccagtgtctgttattctctttcttgtgtccatgtgtactcaatgtttagctcccatttattagcaagaacatgcagtatttggtattctgttcctgtatcaatttgctaagcatgatggcctccggctgcatccatgttgctgtaaaaaccaaacaccgcatgttctcactcataggtgggaattgaacaatgagaacacatggacacaggaaggggaacatcacactctggagactgttgtgaggtggggggagtggggagggatagcattagcagttatacctaatgctaaatgatgagttaatgggtgcagcacaccagcatggcacatgtatacatatgtaactaacctgcacattgtgcacatgtaccctaaaacttaaagtataataaaaaaaaccatgaatgatttcattctttttttttaatggctgcacagtattccatggtgtatatgtaccacattttctttatccaggccaccactgataggcatctaggttgattccatggctttgctattgtgaaaagtgctgcgatgaacacatggacacatgtctttatatttatatatagaacaatttatatttctttgggtatatacccagtaatgggattgttgggttcaacagtaactctgttttaagttctttgagaaatttccaaactgcttttttaaaaaaataacacacttaaagaatccattcagcttggttccatatcttggctactgcaaatgatgctgcaatgaacatgggcgtgtggctatccctttgacattgatttcagtttctttgcatatatacttggaagcaggattactggatcatatgatagctctatttttagttttttgaggaacctccatgctgttttccataatggctgtactaatttacattcccaccaacaacgtaaagagtgcccttttctccacatccttgccaacacttatctttcgtctttttggcaaaagccattctaattggtgtgagatgatatctcaatgtggttttaatttgcatttccttaatgattagttatgctgagcattttttcatgtacctgctggccacatgtatgccttcttttgagaaatgtctgttcaggtcctttgcccatttttttaatcaggttgttttttgccattgaattgtctgagttccttttatattttagatattaactccttatcagatgtatggttttcaaagattttctccccttctgtgaattgtctcctcactttgttaactgtttcctttgctgtgcaaaaggtttttagtttacatgtcattccatttgtctatttttccttttgttgcctgtacttttgagctcttttgtcaatattttctctcagtttatcagttgtcttttgactttgtttctggtattttttggtcatgcaacattagaagttttttttttgttgttgttgttgttgtttttgacagtctcactctatcacccaggctggagtgcagtggcatgattgtggctcactgcagcccatacctcttgggctcaagcaatccttccacctcagcaycctgagtagctgggactataagcacttgtcattacgctcagctaattttttttttcttcatagaaacagggtctcactatgttgcccaggctggtaaaattttttcacgtggccaaatttgtcaatcttttcttctattcctctagctttagatcctagaaagcctttctcttcaccaaggttaaagagaaagttactaagttttcttccattagttgcatggtttcatttttaaatatttagatccttaatccatttgcttattcttgtgcatggtgtgagatatgagttatctatatggttatttagttgtctcagcccatttaattaaaaagtccacctttatcccaatgatctgaaatactgccttcatcatacactaagtgtccacatgtccttgggtctaattctgaactttttattctattccacttgtctattcacatactagaaacacaccgttttgatttaggctttacagtatgcctcaatggctcgtagtcagagccctgttgtttaattagctgtagctgagatcaggataatgtttatctttgttataattctagatctaaacagctgtatcctgtatattgctactattcaattatacattactgattacttgagccaaaggaggttagggccgataacaaatacaaattttaaagaaaagcggctaatttatttagttcatctggaattcctagagatgctgatctggcacacataaacagtctaagtacattcaatctacagtttatgaaactttgtcttagaggattggtggaattccagattctcaaacaagattcattcccggaacacatgaatctgattctgaattgaccttataaattggttgggaaccactatcatgtataagtacccagctgaatactccaagatttcctaatagaaaacactaacattttcattcattcacaaatattaattgaacttccattgtatatcaggcactgtgctaggttttaaagctataataatgagtaatatagctatgacccctgtctgccctccacagtttagcaggaaacagaggcaattaaacaagtaataataatagtgtgatagaagagaggaaacatagggtgctagggcaacacacagctggggcaccttaaggtaatttaggagagccagagaaagcttttttagaagaagcaatatttaagctgagacatgaagaaggacaaggggtgaaccaaggtgtggtagttttccaggcaggggaaaaaagtatgcaaaggccctaaggcaagacatagctttttactttcaaggaactgaaatcaattttagtgtggctagcatataagtgagtggggaatggtggaagatagggcatggcgaggttttccactggcagtggttttgctccccaggaaacatttggcaatttctggagacgtttctggttgtcttaattagaggttgagggagtgctactggtagcacagaggtcaaggtcacttcttctaaatatcctatagtagacaggacaacatccgccttgcccctgcccgccccccgccccccaccccacacaaagaattatgtagtctaaaataaccggtcctgggaaaagcagaggtcctttcattacaatttttatgatattttaagaagggagtttggatttcattcaagggcaaggaggagctatttgatggctttaagtagcaaaaaacaaatgttttagaaagattactcagtacagagaattgactagaatttcttcattcaaatatttatgtgccatgcattgtgtaggagctggggatatggtggtgaacatttaaacactgacccattctagtggaagaggtagaaaataaaaacaacatagaaattaacaataaacaacaaggctgttttcccatattcagtgttccaaatgtagatgaaatctgggtctgacagtaaaacgtcagtgttaatttttagagaagaaaagccctagacaaattttataaaacatcatctatggggtatgtgttgtttagtttggatctcatttctactaaatgaaaatatttttaaaaataatcactacaacacaaataaaatcttattcttcattattgtttttcattttctgtgtatgtatgtgtgtgtgtgtgcatgtttctggcttacatttccatattatgttcaaaatgctcaatattaaaggattactgaaatgactacttctttggctgacagctttaatagtgactgcaacaatttcaggaaccatgatcatttgacaccccctggtatagtacagaacttgtctcttggcaaggatgacatttactttttttcttacatagatttccttgggaaaaaaaacctttgctttttgtatctctgtgacacttcctaaaattagctgttttctctaatgaactcatttcagatatgttagcttcttaatctaaggactgtcagtgacaacttgcttaatgtgttgggagattctagttgcataaaaaccttttttgaagaagaattttaggtcagcaaaatgactgaaagtacatcttcattataattttcttgctgtgaagccaccttaaatgatggatggatttttcgaaataacactaaactaaattccttcctgtcacactagagaagcagcttcgtgcagtggttaagagtatagactttgcctgcctcagtttaaatcttgactcagtcatgtactagcttatggtctcaagcaagttatttaacctcagagcctctatttcctcatttgtaaaatggggataaccatagtattcacattacaggggaggatactgactctgaatcctcacttcgttatttattaacagtatgactttgaaaaaattaatcactgaagtcactgtttcttcatctgtaaaatgagataatgatgtacctcatagggttaaggtaaaaatgaagaaatgatatagcaaatataaggtaaatagcactaagcccataacacacattaagccttccataaagggaggccaacttctccttgtctcgtgaattttgtgtgtattaccacaggggcacaacagattcaaaacctagagaaatctctgttggagttaaattcacatatccaggaaaggccctgaatgagatctccctgtccctctactgtgattatgctttagaagaaatatgyaatgttaagtggagacacgctcgagagatgccaacctatcaaaatctttgcttcaaatggaaagtatttcttcaataaatgaaatagttctaaagttgtgacaaaaactctccagtgttctcagttaactagatgcacaagaaagagcaagaatgttatgaaataccaatgataattactgacatacaaagaaatgacacsaagaatatgtcaaattgagagatttttcaagaacactttaaattttcatgttagtctacctcatcaaaacattaactaatttgaaaatcctatttaaaagataatttctgcttactggtttgctataggtgagcagcaagattgcaggcttctgctctatgcgtctacagaacacttttgtgtagctgaactgtaacacgtagcacaataactgggataacattcagttttaagctaagtggctacttctsatacaatgttataagctgaacaggattccatgtctaggtgcaactagattaatttatattttgcttaaggaagacacaatcatgaaatttaacatgtaatcatgcctcaaataagtataaacagtagccactaatttcctacttatgacatgtaatgttttccaaatattgaacatgaacatcttgggacttctcttgatgagagaaagaataagatgtaagaaagtgaggagaattaattctctgtgatcttagcacttatcatcttctgacatactatatatgtatttgtttattgtctttctctcatgagaatgtggactgtataacagcaggaattgtgtctgttttgttcactgatttatcttcagtcctggactataggtccttcaaatgtatatctaaactgaataactgaatgactgaataactgaagtgctggaagcactttaacatctgtgtatttctaagatagatattagtctgttctttttttttgagacgtagtcttgctctgtcgcccaggctggagtgcagtggtgcgatctcagctcactgcaagctccacctcccaggttcacgccattctcctgcctcagcctcccgagtagctgggactacaggygcccgccaccacgcccggctaattttttgtatttttagtagagacggggcttcaccatgttagccaggatggtctcgatctcctgaccttgtggtccgcccgcctcggcctcccaaagtgctgggattacagggattctaactgttctaaagaagaggatagagaccgtttacacaggagatatttagaaaaaaacagagatgtcttttaaagctacaatgacttcgcaatgaattgacggaaatctcagattttgcagaagcccatttatagatgaggatgtactactgagtaggaataattaataatgtatctgggaaaacatgctgtttctggcttggagctggagtgtatttctatgaaaaatttgaaccttacaatattacagaccatctgtaaaacttccacaaagcataggaattagaaacaccaggtactgtggaagagaagggtgaagggacctgaaaacacagaatttatatgaagtttatgtaagaagttagatccccagattcccatccctgccctgcccagccaggtgactaccttccccaacacccacaggaaagagaactagagaaattaaacaagagagaatctagacttagggacaccacacattgagcaaggtagagatcaggtgcaggactgaaaacaaggggcttaaataaatgtctgatagtgaacagtgaagctccagccctcttttcctgcccagctccaaaatgctggcacccaagacatatactctccagtcagaagactggaggattctttgctagagaatttgaacagcccaggaaaaaaacttaggaatactgacttttgggcatttcaaaaaaagggcggatcatcttaatgttctatggtcaagctctctacacacacaagcttctaatcagttttttcagtgcctaagtaaagaatacattgcrtccataaaacaagaacaggatgctataaaaagaaggagacagctggagaaaaggaagaactgttacacattaaaactatgagagcaaaaataaattttttgtaaaaggattggaaagtaatgttgaagaaatctctcaaaggtggattaaaaaaccaaaaaacaaaagtatagaaaacagaaaagttaagaaaatgagagtatcataccagtataggaaatttaatttttttttttttgagatggagtctcactctgttgcccaggctaaagtgcagtggcgcaatcttggctagctgcaacctccacctcctgggttcaagggattctcctacctcagcttcctgagtagctgggactacaggcacatgctaccacacctggctaatttttgtatttttttggagatggggctttgccatgttggtcaggctggtctcaaactcctgacctcagatgatccacccaccttggcttcccaaagtgctgggattataggcatgagccactgcgcccagccagaaatctaattttttattaatacgagttgtagaaagagaaaatagaggaaatggtggtgaggaaatcatcatacataatacaaaagcattactcagaattaaagaatatttccagggcttgctaggtaccaacagaataaatgaaaaagactcaagaacaatggtgataaaaaggattctaaaagcatttggagagaaaacaaggtatatataaaggattaggaataagaatagtatcagagtatttagtagcaatattggaagctcaagacaatggagcaatgccttcaaaattgagaaaaaataatttttaccctagaatgatatactgtgtcaaacaaataagcaagtataagcatagaataatgatgcttttagaaacagtaagtatcaaaaaatttatgtcctatgcattttttgttaggaagctactggaagatatgctccaccaaaatgaagaataaaatcgagaaagaatatgacatgagatgaaacacaaaagagragggacaggaactcccaggagaacaaggtggtaagccttcagagtgtcctaggtccagactgagctcgatggagggctctaggacggaggcctccagggtaaaaaatgtaacttgtaagtgtggaaaactgtactgacagaaattttacaaaactacattaagggttatgaaatgacttagccaaagatttgaagaaaaataagcaaattttaaaatgaggcatttcataaacccctaggaaaaacaaaatcgttcaagaaggaaatgttatccttggcgccagagtgatgtatttgcacagtattaatactgaaaatactatatataatatggattcagccaaaaatcatgcaataattgtattgggatggtggtaggaagaaggaaggtgaaacaactataattcccatcatccataataagaagcaatagataatttgtaaactaataaaaattttagcagtatacgaatagtatttagaaatatggaggtgaaaatcagagaaacttccttaagaggtaaaagtggctgcctgtggagagaagatgggtggggtagaggaagagcactgctggttttgagcattctttgattttctatgtgtttatgttattttgaaaaaaatagaaatttcaaactcaaatgtataaaaaatattatggacagggtagtatagcacgaagagttttaagctaggaatgaaaatttaaaactgttgattacttataccctgatgttgggtaaaacataccacttccggttgggtgcagtggctcacgcctgtaatcccagcactctgggaggctgaggcgggtggatcacctgagataaggggtttgagagaagcccggccaacatggcaaaaccccgtctctactaaaaatacaaaaattagtctggtgtggtggcacgcacctgtagtcccagctacagctactcaggaagctgaggaacaagaatcacttgaacctgggaagtggaggctgcagtgagctgagattgcaccactgcactctagcccaggaaaccgagagaaactccgtctcaaaacaaaccaaccaactaacccacttcggtctcaacttctttatttattcactagaagacgttttttctaagggtctttccaactctaaggttctgatcccatcacaataaagtatttttctaggaatatcaaagaaagagaaactttcctccacgttctcatggtatagctttacgtatttttgttcactttgccaaaggtctccctatctttgcttccttgatattaaaatggaactaccatatccccaacgtgggaatcatattgtacctgcgaggctagtcttcgcatagcctcctcctgccgcctgcgcatttccggagttcctgggcagcttccactggtgatagatgagtgggctgaaggtggctgtgtgagtggcagctctctgttggcatccacatctggattaaaaagatttagatgtttgcatcagataatcataaaaactttaaggaaaaatggctaaattccatttgttctatgatctaacaattctgctcctaagtatatacttaagagaaataaaaacacatgtccacccaaaaacttgtacacaagtgttcacagaagaacgattcataatagccaaaagtggaaacaacctaaatgcccaccaactgatgaatagatgaaatacaaaatatccattcaatagactactaacaataaaaagaaatgagataccgatacatgctagaacggggataaacccttgaaaatgttatgctaaatccaagaggtcagtaaaaaaaaggaccatatattgtatgattctatttatgtgaaatgcccagaacagaaacatctgtagagacagaaagtaaattagtggttacctagggctggaaatagagggttaagaggagaatggggattgactgctaacaggcatgagcttcttttaaggggatgaaaatggcctaaagttacattatggtgattgctatacaactctgtgaattatactaaaaatactgagttgaacgctttaaatgggtgaattacatagtatgtgagttacagctcaataaaactgttttaagatttttttaaaaattcaatttgttcttatttagaacatttattgttactagtagaaattataggctatatttatgaataagatcatactttaaaaatagataccaaagtaaatattagaagttgttatttgatggccaatagtgattgaaaagaaggaagaataggaaaaagtagtcctcatttaactccttaccagtaggagtgaatttagacttctttcatttaactggtgcagtaaatttcttggtcactggatacagttctggataactgcaggggggtgggcatggaggatggcagtgaaagaagcctcaaggactgtgtgacatttgggttgaggtgaagttcagtgattgtatgttactgtattatttctgcattatttctgctgttcacttccttcccctactctattcccctttatctggtatttgattttgtgggtaattactgtccaaatgccctctgtctttctagctatttccttttggaaatgccctcctttttgtctaaacaccttactttctgtttggtattcagacaatagtagaaataaaagttaataggtaggcaatagtcaatgtgcatagcacactggcaaaagagacttctgaaatgaacagagtaggaacgtaggatttatttacttaacagctgtttgggggcttggcagctgttggcaaatgtcaaatccaaataataactacattgagacttttagtgatagaaacatacagtcttgtattagagcttccccaactactatactgagaatacctgtagttaatgtaataatcctgaattatacaacaggtctgttttcacaaaatatttttgttctttgtgtgtgtgtgtgttgggggtgtggataatggtggtggtggtggtggagactgatgggggtgtcaggtttgggagagtaggtggaaagcaggatgacaggctagtgcctgccttgacagcttttctatacctttccagggaaatgacaaggaggggggcgggctggggggctgagtttctgtgggggaaggacagccaagcaaggcagtactgcaggctaaactgctcctatcttccacagcagtggtgctcagcttttatttctactattctctgaacaccaaacagaaagaagacaggggcagaagaaagaatgacagatgatgcagagaaagaagttgggaactccagtgatttcccatgtttttttattatcactacaactattaattagtatcatcacccaaggattaagaaagccagtgaggttccaaatgacccatccaagcttaatatgataactcatattaagtttatatatrataactyatattaagtttaatataataacttatattaataacttatattctgtaaaaaattaagccaaccctccatatacagacatcattcttactattagtgaaaaaactgctgctcctgccagtaacatattcaacaccagttcatataggtaacagatttgtgccaaaaaatagcttgcattatatcagtcacttattcttgacccttctattggttaagatggcactggtagaatatagtttggccatcaataaattgtaacaaaaattattttgtataaggtaacattggttctgagtaattctgatatatagaaccgcatatttagctctcttaactcctttcaaattcggaaagttaactgtcagaccaaatctacagtctcaacaacggatgtttatctcatgaatggggagtgtcttggtgtttctggagattctcctgaaggcaatggatgttagagaataacttagtgaactacctttaaagaatctctgctttggggagtacatgggctgttttctataaayttttgctcccccaggctcatagagagatccccaggtacctctgctttctgtgaaagcaactcttctcgtccttgggatttattttctgtcatgcatgattctaccactctgttatctgcaactctgatatacagaggagtcacagagagcttgagctttctggcttcctttctgacacactcaaattgcaagccacttgaactactcagataaacagcagtttggagtgataaatacttaaacactcaaaggaaaacactggaatagtgtggaaagttacttttaaccatgaagatgtgttctcagaatcaaaattttagcagagacaattctgaaagatcaattagtcacacttcttcattttacaaataagaaaactgagctctaaaaaattcaagtaaaattctcaagttcacaaagtctagtcaatttgagtgttggggcacaaaccctgggctcctgactcccacagtactatggcaatctacctcagaagagcttcatttagaaactaagcattatattcctctgaagaaaagaattcttccataccaattcttaccataccctggtaaagaggtattttgattcagttttcttccaagacaccagttcttccacgttagacatccataagtttatcagaggccatctgcctccttaatgatacaaggctgctaactagcttcaataggaagtcaataagtttggagggtcttcactgagttcctgttaagtttccagcactgtgctagaccctgtaactactaytatctcacacaaaccatttctagtggttgcagtctgaaagtctgtggtgggctagattattgatttggactaacaaagcaatagtttctttttttgttctcttctaactaacagaaaccaggtaaactggttctatacatgtagtatgtataagaagaatactgatacatttctatttattttctttactcaagtgagtttcaccagtaaggagaggcagcatagtaaaatggataggagaatggcctctgaaaccagactgcttagttctcccatttattggctgtaaaacctagcagaacttacttaacctctctgggcctcagattacttacctgtgaaatgaagacaacctcattgagctggtaacaggatgtgatgaatyaatatttgtaaaaaagttaagagagtatctggcacatagtaagtaccatatgagtgttttaaaaataaatcagtaagatcctggtagtgattactgggctgccccctggttgtgatgaaagaagcctgaatacatatgagagctcagcaccttttcacaaggaagcaggagagaaccccttcaaggacacaacgaagctcaagtccaagcagtgcaacactgacgccaacagcaaagagatgaaggatgcaaacagactgtgctggcaaataagaagaagaactgggcacagactgagcaaaatccaacagtgatgaatgcaaattgctctacgggcaattgctgcggtcgttatctagaggacagtccaaccacacagccggcacggaggagtcataaacttattccacgagaaaggtttttcttcagtcacgcttaggtgactactgggtatgtgggttagatgtaaatagagtattacaatctttctctcaacctaaatgaatagtcctcacgtggaagtcaggttttgcagatgagaaaataaaaggatatacgacctaatataaatatgtcagaaaaacttcagcgccaatgaaacagggagttctttaaaaaggaatacgtacgtttgggggaggcatgtgggctgtctgaggcgatctgtctcatccttgtaccatggcagctgagggccaccagtctggagatgatggcagttttgccgaatccaatgtttcccacaatcactactccttggttcacgctggcatttgaactttgaagttgagcatctatttcgtggaaaacccaatctcggccaacaaacactgactctgtagtgatgctgggcacttcaaagagcagaggcttcaaggagatatctggaggcctataaggtgcaaagcgaactgaaaggaacaagagaatgcagaacttaggtcaaactgtcaacattgagagaaacaaagagagaaaaaatgcagtgtggtttagggacttgagttatcatatgatggcatcctaggcttattcagaaataatgcaactgcgaatgttgattctatacagataagcaacacaggcgagctagagctaattgatactgtaaattgcagaacacaaacactgataaaacattaatgatttacttgatcagtccgaaagtcgggatgatattcaaaattattacagggaagggatggcccaagcaccagcaatcactacggatgcaagcctagtgaagaagggacctaaaggcctcctgctacgccacgggataaccttttaattgttggattgtggagaggtgcaggagtgaagttcctgttggaaaggccaggctgtggcggggcatctagacagcttaccgtagcagctctttactaaccagtaacatatttcaatatttcacaaccaatatggctataccagtacgtatcagttgaaaatcagtcctgaagaaagcagtatagagaggcttgtttgtttctttaaaaacaccaatgagaatagtaattcctttaagttcatgctagtattttttaaaatctagtaggtattattattaggggaagcaaggccattaaaagctctgatggtttaaaagatcttaaacattctaagcagtcgagcagaaagcaggccttcacccagtgtctctgtgcctgtactgcttactattgatgccaattaaaaaataatttttggcttatacatctctcttggggatagatccacacagtttttctcaagatttttttctgtgcttatataattatggggtgtgctaagggccaagaataaactatactgtcaacagttttctaaaaatgcagaattgatgtgacgtgctttaaaagaagatctactaattatattgatggtaaaaggaagtcctgcctgatggtccatatctgggttaaacggcttcctgaactgttcccagagcagctctaagacgtatcactttatctgtctgaaaccaggtatttcatttttgtttctttaaccttagcacagtgccttgatatatactaggtgctcaaaaaatgcttaaggaaagaattaattaaaaataaggtattacactctaactccatttttcaaatattttggagcacaagaaaggccaggagtgggaaagagatggaaagaggagaaagagaaatcacaaaggggaaaatgagataatttatacttcatacgttactctagaacatacttgaaccacttacacaccacaaggtgggatacagagatggtggcttacttgagaaaacacagacacacgcacacatacatgtgtgcactctcatttaaaactgcctgaaagccactagaataactgagcatttaaaaaaggctaaaatttccaaaagtagtgcaaataatttaaaatataaagccaaattctgacaacagaaacaaaatgcccaaagttttcattaactaaagtggggttgtggggggttaggggaagctgtggagataaagctacagggtcacttataattccctgattcacatttctgtaacaaaatttactcttgtatttattaataatttcaacttttattttagattcaagagggcacacgtacagatttgttatctgggtatagtgtgtgatgctgaggtttggggtatgaatgattctgtccctcaggtactaagcatagtacctaatagttttttgacccttgccccatcttcktcccccttctagcagtccccagtgtctactgttaccatctttacgtcaatgagccatgagtactcattgtttagctcccacttataagtgaggacatgtrgaatttggttttttgttccttcctgtgttaattcacttaggataatgacctttagctgcatccatgatcctgcaaaggacatgattccattcttttttatggctatatagtattccatggtgcatatgcaccacattttctttatcctatccaccactgatgggcacctagggagattccatgtctttgttactgtcactagtaytttaatgaacatacgcatgcatatgtctttttggtagaacaaaaaaactactcttttaaaatccatacctataattattagaatttgatgaaaaataaactttagtttgccaaaaatccttttaaaatctagtgtctcatagctaatagattctattttacttaaacactattttactgatgtaattcacaaaccataaaattcactcttttaaaatatacaattcagtggtttttagtatattcactaagttctgcaaccatcaccgctatctattcccgaataccttcatcacccccaaagaaatcctgtatctattagctgtcattcccaatcctcactcctcccagtccctggcaatcagtaatctactttgcctgtaaaggtttgcctattctggacatttcatataaacagaatcatagagtatgtggccttttacttctgacttcttttacttggcttaatattattcattactttattgctgaataatattccattgtatggatataccatattttgtttatcagttaataaacatttgggctgcttccactttttggctgattaatgctgctatgaacattcatgtacaacttttatgtgaacatatgttttcaatcctcttggctatatatctaggagtgaaatgtctgattcatatggaaactcttaggttcacttttctgagaaactgcccaactgtttcctctatttggcttttactatattcttattcaatatattttcactatagaaaactgagggatagtagataaaatagtaactgtgtttccattagctagagagaaatgctattagcatgtattctgagttttgcctgtaccatatatacttattttaaaaacaaaaatgggatcatactatatatactgtttcatcatttacttttttcacctagcaatgtaatgtgaacatctctctacatgataaaacataaatctatattatcatttttaatatgtgtagactcttccattatataactaaatcataagttatttaaccaatatcttattgttgtatgtttagattattttggttttccactgttataatcacagctaacaatgaaatagcctttactatatgccagaaactatttctaagcatgctaactggcacaacagtctgatgayagttattactactttcattttatagataaaacagaggcaaaaagagattaagttatttgcctaaggtcttttaccaatctgaatcttatctactatgctctagttcctctcacgaaaagcggtactacaagcagtggtacaatacacatcactgtatattcaccttggcacacctgccttatttttcttgaaacaaaatgctagaagtgaaatttctgggtcaatgggttgtgtttttgatacaccttaccaaattgctctccagaaagattatcctggttgcgtgaaaatgaccatatccctctcagtctcatcatcacggggtagtattattattctttatctttgttaatctagttaagaatggcatctcattgtgtttaatgtatattttgagtatgaaaagtaatttatgtgtgtgaaaggtgattttttaaaaacatgtgtattggctatctgaattcttttgtgaattgcctgttcatggcttttactcacatttctattggaatgcctgcgtttgtcttactgaatttgtgagaacatttttaaccctgaggacattaatcttttgcctttcatagttactttttgcaaataattttctcagttctttgcctttaaaatttttctttcttccttttagaaataatatttttctttttttgagatggaatcctgctttgtcgcccctggctggagtgcagtggcgcaatcttggctcactgcaatctctgcctcccaggttcaagtgattctcctgcctcagcctcctgagtagctgggactacaggcgtgtgcaacgacaccaggctaatttttgtatttttagtagagatagggtttcaccatgttggccaggctggtctcgaactcctgaccttaagtgatccacctgccttggcctcccaaagtgctgggattactgtgtgagccaccaaacctggcctcttccttctattttaatttgtgaaagttgaaacagtttatgtcgccaaacttgtcagtctttttctttatgggttctgcctttagtgttgttctttgaaagttccctcttaatccaagagtataaaaacattaacattttttttctagtgcttttttgagtctggtatagagtagggatctaacttttttttttcccccaaagggttaacaaattttaccagtgacaatttaaattatcaccaatttgtaatgcttactttatcttattcatattgggtttgtttttaagttatctagtttgttccacttatctgtaagtctactactgcatcagtgttacgctgatttagttgttattatgtactagttaattgtgagtctcccatcattattcttattttttcaatagattttgaaaaatacatagtttcaaaaataatttccggaattagtttgaaatttaccataagaaatcttttcaattttattcattcagttctgacagttaatcagaaaatgctccatttaagtttcattaaatggatttcttgaaataaccataaaacatcttcttaaaccaaagacagataattatttcatcttagcagatatatattacacatttgaaaacaatgatttagttttaatgtcatattttaaaaacccagataattcacaaaacaatttagaaagcaaacatttaaaaatgtttatctttgacataaccaaataaatacaaattaaagcaaactatatctaccattagaaaaaaatacggttttttggyatgtaatcatattcaaaaccatcttttgaaaaaatattagtttcttcagttactggtagcactgtaaatgtgtccaacttttagagaaccgacattttgcaaatgccaatttgaccttaaaatcctgttctgggaacttattctaaggaaatgattcataagaaaagtgcaaacacacacacactaacacatacatacatacacacactcacattttttgcagcatgtatggtgttagtaaaggtgatttagtaaactatggtgtatctaccaaaaattacayagacattaaaatagaaaggaatactttccagaatcatggaaatgtggaagtatttatgaaataaaatttagtaaaacagtagaataaaaaacaatatatattatgattacaatttacagtatatgcagatggaagctaacaatactccaaaacaaaaatagtgaaggtatgataggattaattatatctttaattataatttttttaaaaaaatttttcaataggaatattagctattttttaaaaagctgcaaaatgaattggttgttattttacccaaagacaaaataagcaaatattttatcacaatcacaaattattctgtcatgcatgggtgaatataactactgccaaatccaacaactaattaaactacatcaattgaaacacacaagcatatatgtcctggctatctctctcccacttttactgtgtatacatttttagaaaatgaaaacaaagtatatgtagttacaaattttaactgttgtagctattacagaatgattttaaaaatcaaaaaatatataaatatataaaattggctatttctgccaggacagtctgaatgtcaggctgagtacttggtttatatttcctttgagtgacaggcagtgatgacccactgaagtggacctaatactaggcttggctcactggagagggaagacagactggagataccctgaagactactactcactataatagtcccagaaaatgtgatgaaggcctgaacaagggagacaccaatgaaacagcaaagagtgaagaaatatgtaggacctgtcaaaaaactagatgtagagggatagggagcggaagaagccaaagatttttccagtttcaagtctaagggattatggagctgaagagcaccaaaattaaaatataagaagaaatttactatgggatagaaatagctttcctgctttctttctgttatgtaaaggccttcccccactaaatatgaattagagatataatttcctcaacatctgggaggaaaggattaaaactctggatacaggctgggcaccgtggctcacccctgtaatcccagcactttgggaggccgaggcgggcagatcacaaggtcaggagattgagaccaatctggctaacatggtgaaaccccgtctctactaaaaatacaaaaaattagctgggcatggcagcgggcgcctgtagtcccagctattcgggaggctgaggcaggagaatggtgtgaacctggraggcagagattgcagtgagctgagatcgcgccactgcactcctgcctgggcaacagagcgagactctgtctcaaaaacaacaacaacaacaacaacaacaacagcaacaacaaactctggatacattagagtatgcccaaatttaaatttcaaatgcattaaacaaaattgttcactgaattaatctctatagaaaatcaaagaaccacaccaatattcttctgtgattatgtgacagttctatactcatacaagccctgaaactcttgagtttgaattctatagaatataaaaatgtagcagaaatcctctttattttatttaaggcctttattttatgtaggccactgaaatgaggaatatgtgtaggatgaaggtctgaatatcttagacaagttagctgataattatttttagattacatcgggggaaggaaacttacatgaattgatataagcacctgctaacataggaaagggcagcagggtgagaagagtaaggagctcataaaataagaattaacaaagtaatggtagttttctagaaaagaaagggtccttcttatcgactactcctattgctacccggactgaggctggaatgaccagtgctggaactgggcctgtctgatgataaaaggaccatatcactcccctacgcaaaaccctccagtggttctttattgcatttagaataaaatcaaaactccctcccatagtgctcaaggctctagatgatttggaccctgcctacctacccctgcaggcatctcacatcacttycccctcagtctatgccccagctcttctggccttccagtttcttgtttcagcgtaaatgctactatgttagcggggcttcccctgataagcttttcaagttggtttccctactgctcatcatttttttttaagagacatggtcttgttctgttgcacaggctggagaggcaatcatagctcactgcagcctcaaattcctgggctcaagcaatcctcctgccttagcctcccaagtagctgggactataggcatgtcccaccatacgtgactatttttaaaaaactttgtgtagaaatggggtcttgctatgttgcctaggctggttttgaactcctggcctcaagtgatcttaccttggcctcccaaagtgctgggattacatgcgtgagccaccatgcccggcccccataattttcttttagccagagggcttatttgtttctcttggagaatttatcataaatactaattattttatgttcttatcacgtattacaatctaacaatatttattcttttgttttcttgcttattcctgtcttcttaactagaatgcaagctctatgaaggcaggaaccatcactgtatcagtacatagtctggggtacatagtaaaggctcagtaaatatttgttgaatgaatgaatattgaagaagggaatcaagagagttttattaaaataatttttatgtattagtagaggagatgagtgaagtattttgttattatatcagggtgtcattatatcacaaacatcctgagtataattaaaatgaaagttcctgctatttaagaagtaaacttaaccaagcaatcccagtctgtcttcaagtcttatgaatttttccttagaaagatctcttgtatcagttacctctgttcgtttccaactgctcccacctagctcagacttttgctacatttactctccttgcttcctgcctggcttcccttacttcctgcctcagtcactccgttttggatattatgccagaccaattctttattacaatgaccacattacgtcattcccttctagcgcgtccaaaggtgcagttttctgctgtatcaaatctaagctaagctcctccccaggttctgacggctttctgtaacatggctcaattctgtcstgtccacgcctcacaccctgccaccatgtgctatctgaggcagacaaggcagtcttcacagagtaccctgacaaactgctccaatccagttcctgtgccttagggcaggttgtccctttgacctgaaatgcccctcttcttctcttcataccatgtccatatattacagtcaaggttaattttcatcttcttcatagtatcttccttaatcaatctagtcctcatttattttcctcttcccaaactaagtttactccatataatttagtgcttaattatacactgacttacactacttattaacattttaaatactgtttttccaaccagattgcaaactcttagagaaaggataatgtctagcagttttaaatacagactacatgtgaaagacagaagaaaaaagggaaatcatagcgggtggggccaagatggctgactagaagcagacgcgatcagaggctcccattgaaaagaaccataacactgtgtgaatcctgcaccggcaaccgaggtacccaggttccatcatcagaactgactatgtggctggtgtgacccgcagagaggaaggaagagcagtgtggtaaggcggcccacctgagagccacacggggcagaggagtcacccccagccaaggtaggcagtgagtgagtacgctacccagcctgggaaaacatgttttttccacggaactgtgtaacccatggatcggaagatcctactcgtgagcccacaccaacagggcctagggtcccaaccatggagccgcacagattctcaatagccactcggctagaatgtgcttaagcctaccaagctcctgggggtagcgggggtggtgaccagcaccacggctgcagctgcctgctgtctaagccatctgagctccttggggaaggggcaacagcgaacaataggactgatagctgcctaacacactaagctccctgggcaggggatgggcggcagccatctctatagctccaggctgcgctttcccctgccggagcaagggaggatggatggcttagtcccaagaggtgtccttcacagctgaacacactggctgtggcagaccgcggacagagtgcctcttcaggcctgacccatccctcctcattgcacggggcctccctgcaggaactccaacaactccagccagggactcagggatagaactctaatctccctgggcctgagtccctaggtggaagggtggccgcagtctccatggaccagcagacttagtctttgctcctgcatagttctgaggaatccagggagcccagacaaggccccctacccagcaaagcacccccgtccaccaagggacagtcaaagtgctttgttaataaacaggtcctgctccccgtgccacccaactggttgagaatctccaacaggggttgtcagacaccctatacagaagcgttcctactggcatcaggtcagtgccccttgaggtcagagatcccagaggaaggagcaagcacccatctttgctgctctccagcctcctcgagtgagaattccaggcacaggagtgaaccagatgaatagggcctgaagtgaacccccagcaaactgcagcagccctacagaagagggacctgaccattgcaagaaaaacaaacagaaagcaataacagcatcaacaacaagatacccacaaaaaccccatctaagggtcagaagcctcaaagatcaatactagacagactcatgaagaggagaaagaatcaatgataaatgctgaaaactcaaaaggccagagtgcctcttctcctccaaatgatcgcaacgcctctcctgcaagggcgcagaactggatgaaggatgagatggacgaatagacagaagtgggcttcagaaggtgggtaataaactccgctgagctaaagtagcatgttctaacccaatgcaaagaagctaagaaccttgataaaggttataggagctgctaactagaataaccagtttagagaggaacataaatgacctgatggagctgaaaaacacagcacgagaacttcgtgaagcatacacaagaatcaataactgaatcgaccaagcagaagaaaggatatccagaccatcttgttgaaataaggcacgcagacaagattagagaaaaaagaatgaaaaggaacaaaaaaacctccaagaaatatgggactatgtaaaaagaccaaacctgtgattgactggagtacctgaaagaaaggaggaaaatggaaccaagttggaaaacacacttcaggatattatccaggagaatctccacaacctagcaagacaggccaacattcaaattcaagaaatacagagaaccccagtaagatactccacgagacgatcaaccccaagacacataatcatcagattctccaaggttgaaatgaaggaagaaatgttaagggcaggcagagagaaaggccaggtcacctacaaagggaagcccatgagactaacagcagacctctcagcagaaaccctacaagccagaagacagtgggggccaatattcaacattcttaaagaattttcaacccaggatttcatatccagccaaactaagcttcataaacaaaggagaaataaaatcctttccagataagcaaatgctgagggattttgtcaccaccaggcctgccttgcaagagctcctgaaggaagcactaaatatggaaaggaaaaaccagtaccagctactgcaaaaacacaccaaaatataaagaccaatgacaccatgaagaaattgcatcaactagtgtgtgagataacaagatagcatcatgatgataggatcaaattcacacataacagtattaaccttaaatgtaaatggactaaatgccccaattaaaagacacagatgaccgggcacagtggctcatgcctataatcccagcactttaggaggctgaggcaggtggatcacctgaggtcaggagtttgagaccagcctggccaacatggcgaaactgtctctactaaaaatacaaaaattagccaggcatggtggcgcatgcctgtaatcctagctactaggggggctgaggcaggaggatcccttgaacctgggagttagaggttgcagtgagctgagatcatgtcactgcactccaccctgggcaacagagcaagactccatctcaaaacaaaacaaaaaacctgacacagactggcaaatcggataaagagtcaagacccatctgtgtgctgtattcaggagacccatctcccgtgcaaagacacacataggctcaaaataaagggatggaggaaaatttaccaagcaaatggaaagcaaaaaaaaaaaaaaaaaaaaaaaaaaaagcaggggttgcaatcctagtctttgacaaaacagactttaaaccaacaaagatcaaaaaagacaaagggggcattacataatggtaaagggatcagttcaacaataagagctatcctaaatatatgtgcacccaatacaggagcatccagattcataaaacaaattcttagaggcctacagagacttagattcccacacaataatagtgggagactttaacaccccattgtcaatattagacagaccaacgagacagaaaattaacaaggatattcagcacttggaactcagctctggatcaagtggacgtgatagacatctacagaactctccaccccaaatcaacagaatagacattcttctcagtgccacatggcacttattctaaaatcagccacataattggaagtaaaacactcctcagcaaatgcaaaataactgaaataataaaaaacagtttctcagaccacagtgcaatcaaattagaactcaggattaagaaactcactcaaaaccaaacaactacaggaaattgaacaacttgctcctgaatgactcctgggtaaataatgaaattaaggcagaaatcaagaagttctctgaaaccaatgagaacaaagacacaacttaccagaatctctaggacacagcaaaagcagtgttaagagggaaatttatagcactaaatgcccacatcagaaagccagaaagatctcaaattgacaccctaacatcacaattaaaagagctagagaagcaagagcaaacaaatccaaaagctagcagaagataagaaataactaagatcagagcagaactgaagagtatagagacaagaaaaacccttgaaacaatcaatgaatccaggagctggtttttgaaaaaattaacaaaatagatagactgctagcaagactaataaagaagaaaagagagaagaatcaaatagacacaataaaaaatgataaaagggatatcaccactaaccccacagaaatataaactatcaccagagaatagtataaacacctctatgcaaataaactacaaaatctagaagaaatggataaattcctggacacatacaccctcccaaggctgaaccaggaagaagttgaatccctgaatagaccagtaacaagttctgaaattgaggtaataattaagagtctaccaactgaaaaaagtccaggaccagatggattcacagccgaattctaccagaggtacaaagaggagctggtaccattccttctcaaactattccaaacaactgaaaaggagggactcctcctttactcattttatgaggccagcatcatccttataccaaaacctggcagagacacaacaaaaaaagaaaactttaggccaatacccctgatgaacatcaatgcgaaaatcctcaataaaatactggcaaaccaaatccagcagcacatcaaaaagcttacccaccacaatcaagtgggcttcatccctgggatgcaaggctggttcagcatatgcaaatcaataaacataatctatcacataaacagaaccaatgacaaaaaccacatgatcatctcaacagatgaagaaaaggtctttgataaaattcaatatcccttcacattacaatctctcaataaagtaggtattgatggaacatatctcaaaataataagagctatttatgacaaacccacagctgatatcatactgaatgggcaaaagctggaagcattccctttgaaaaccggcacaagacaaggatgccctctctcactactcctattcaacacagtattggaagttttggccagggcaatcaggcaagagaaagaaataaagtgtattcacataggaagaggggaagccaaattgtctgtttgcagaagacgtgattctatatttagaaaactccatcatctcagcccaaaaactccttaagctgataagcaacttcaacaaagtctcaggatacaaaatcaatgtgcaaaacccacaagcattcctatacgccaacattagacaagcagagagccaaatcatggatgaactcccattcacaatcactacaaagagagagaataaaatacctaggaatatagctaacaagggatgtgaaggacctcttcaaggagaactacaaaccactgctcaagtaagaaaggacatgaatggaaaaacattccatgctcatggataggaagaatcaatatcatgaaaatggccatactgctcaaagtaatttatagattcaatgttattcccatcaaactaccattgagattcttcacagaattggtaaaaactactttaaaattcatatggaactgaaaaagagcctgtatagccaagacaatcctaagcaaaaagaacaaagctggaggcatcatgctacctgacttcaaactatactacaaggctgtagtaaccacaacagcatggtactggtaccaaaacatacatacagaccaatggaacagaacagagacctcagaaataccaccacacatctacaaccatctgatctttgacaaacctgacaaaaataaacaatagggaaaggactccttatttaataaatggtgctgggaaaactggctagccatatgcagaaaactgaaactggaccccttccttacaccttatacaaaaattaactcaagatggattaaagacctaaatgtaaaaccctaaaccataaaaaccccagaagaaaatttaggcaataccattcaggacataggcatgggcaaagacttcatgacaaaaatgccaaaaataattgccataaaagccaaaattgacaagtgggatctaagtaaactaaagaacttctgcacagcaaaagaaaccatcatcagagtgaacaggcaatctacagaatgggagaaactatttgcaatcgatccatctgacaaaagtctaatacccagaatctacaaggaacttaaacaaatttacaagaaaaaaacaaacaaccccaccaaaaagtgggcaaaggatatgaacagacacttcgcaaaagaagacatttatgcagccaacaagcatacaaaaaaaaaaaaaaaaagcttaacatcactgaccattagagaaatgcaaatcaaaaccacaatgagataccatctcatgccagtcggaatggcaattattaaaaagtcaataaacaatagatgctggtgaggctgtggagaaaaaggaacgcttttacactgttggtgggaatataaattagttaaaaaattgtggaagtcagtgtggcgattcctcaaggatctagacccaaaaataccatttaacccagcaatcccattactgggtatatacctaaaggaatagaaatcattttactataaagacacatgcacacatatgtttattgcagcactatttacaatagcaaagacatggaaccaacccaaatgcccatcaatgatagacttgataaataaaatgtggtacatatacaacatggagtactatgcagccataaaaaagaatgagatcatgtcctttacagggacacagatgaagctggaagacatcatcctcagtaaactaacacaggaacagaaaaccaaacactgcatgttctcactcataagtgggagttgaacactgagaataacaaggacacagggagggaaacaacacacaccagggccagtcgggggatgtgggggcaaggggaggaagagcattaggacaaataactaatgcatgtggggcttaaaacctagatgatgggttgataggtgcagcaaaccaccatggcacatgtatacctatgtaacaaccctacaagttctgcacttgtatcctggaacttaaaataatataaaataaataaataaaaaaggaaatctcatgattgtaggtttttacatatattcttcacataagttttttaaaatcaaggtgaaattaatataaaattaaccactttaaagtgtacaattcaatggcatctagtacattcacaatattgcacaaccaccacttctatctagttccaaaacatttttgttgctccaaaataaaaccctatattactaaagagttattctccattgctcccttcccacgtctctggcaaacaattcgctttctgtgtctgtggatttccttatttggatatctcacaaacgagatgtgacattttgtgtctgtcttctctcacttagcataattcaaggttcattcatgttgtagcttgtatcagtacttcattccttttgatggctgaataatatacattgtacatatataccatgatgcttatccattcatccactgatgaatatttggattgtttctacctttggctactacaaatagtggtgctgtgtatattcgtgtgtatgtatttgagcacctgttttcaattctttgtggtagatacttaaaaatgaaattactggatcatatagcaattctatgtttaactatatgaggaaccactaaactgttttccacagtggctgtactattttacattcccaccagcaatgtacaagagttcctatttttccaaatcctcattaacacttgttagttttttttgtttttattacagccatcctagggggtgtaaaatagtatctcactgtgattttaatttgcattccctaatgactgatgatgttgaacatcttttcataagctagacatctgtayatcttctttgaaaaatgtctattcaagtcatttattcatttttaaattgggttgtctttttgttgttgacttgtaggagtttttttaatatattctggatactagacccttatcagatacatgatttgcaaatattatctcccattttgtgggctgtcttttcatttttttcacagtgtcctttgatgcacaaaattaattttaatgaagttcaaaatatcttattttttggttactgctgttcctcatgcttttggtgtcatagctaagaatcttttgcccaatctaaggtcatgaggatttttcctgtactctttttctaagagtcttacagttggagctcttatctgtaggttaggttgttgattcattttgagttttctgtatggtgtgaggtagggtccaacttcattcttttgcaggtagatatccagttgtcycagtaccatttgctgaagagactattctttcctagacttagcacccttgttgaaaagcaattggctatagatgtatggggtttatttctggactttcaactgtattacattggtcttttatgtgtattcctatgccagtatcacagtgttttgattaatacagctttatgacaagttttgaaattgggacgtttgacacttccaactttgttctttttcaatatcattttggctattcagggccccttgcaagtccatgtgaatttgagaatttccttttccattcctgcccaacaggctgttggaattttgctagggattgtgttgtatttgtagactcctttgggtagtaccaatatcttaacaacattaaacattaatacagtatatagaagaagcataactgctttttgtgagctgatattgtatccagcaactttgctgaattcatgttattagctcaagtttgtttgtttgctttttgtagatttttttttctgaccctttcactttctcttctcctgagactctcaagtgcacatttacaaacttgatgatgttccacagatcttgtaggcttgttcatttttccatattcttttttctttctcttctttagactgaataattccaactgtttatcttcgagttcactatttcttctgcttctgcctactcaaatctgttgaacttctctggtcaattttaaattttatctattgtacttttcaactccagaatttctatttgtttcctttttataatttctgtctctgttgatatactctatttgctcataaattgttctcctggtatcctttcatccatggtttcctttagctctttgaccctatttaatacagctgatttaaagtctttgtttgataagtccaatgtctcagctgcctcagggatggcttctgtcaatttattttttccagtgaataggccaaactttcctatttctgtgtatgccttgtyattttgtatcaaaaactgtgccttctgaatattataatgtggtaagtctggatatcagattctgcctccttcacagggcttgctgttattgcttattttggccctactgttgtccctttagtgacttttccaaacaatttttgcaatgactctactccttattgtgtgtagtcactgaagtctctcttctattatctcagtggtcagccagtgatctgacagatttcattaaatgctgaaattgagtaacctctttcttcattaggcactcctcttgtagctttaagttttgattagattccagaattctgaaaaagatgattttgtcattttttgccagcttaatggttgcttcagggcaaggactgattcttagagcttcttactctgcttttctgtgatgccatttgatagcaggaagtagctaaccactcagggggtttcttgggcatctgagagcccttgatggaaaagcagacattcagacagatgcactgagctctagctgagtagtcttaggcaggaaacaggaaatagaaagatcagctggctcyatgacttggggaggtaaaaagagggagataaacctcacccaggactgcctcagttgtgggctctcctgacaaacggaattatgggcccctcataaaattcttatagtatttttatggacaagtctaattagtcttatagggatgtaaggccatgtagttagtttaagaactagacccaaaacctagttctcactctaaaatccaggccttttctattatattatgttgtatttgttctaaaggatttgattattacatctgaatgtggcatgagttatcccactgacgaccagaattgattaggcttatatgactggctaagccagcttctttccccttatctctctttgtacttccctttaggaattttcatgcttggccagagatgacctttccagagtggagaactattcagagacttcgttgctttctaaatagacttatctcttcaggtccaagattactttacatgttgtttcaaaggaggctttcatgaatatgactaatgctaatttataacatggaataagtacagactcaaaggcctcagtttctgagaaatagtctattaagataacttgttctcatgttgacataatgcctcatcatattttattctactgagaaagctttgacattttaaaaagttatttaaaaaattttctaaaaacgtaattaattcacaaaagcctcaagagaggaacacagacaaaattagcccagtaccatatggcaaaacaactgtagacaccaaaaatggtgtctgtacagcccagaaatggatggtttctgtacctcaaaacctagggcttttatcagatcaatatgataaaagaaagccctactttctatgtactcgactataaatttagaacatatgaacaagaaagcactgttggcctgcattacggggatgaatgtaatgaatattctctgtggggttcacatgcctaaataaatgtttctttattttgaatatctgctggtttccaagagattttctaaggcagaaaccactgaaggaattcagtgacaagttatcatcccaactatagctgagctaaggaaaaaagatgaactaatccatatcatttagcaacagaatgtgactttcttatccgcagcacccagaaaatggtacagccaaggcagcaacagagcaggaagaccactccacccttctaaaagcattccagtaaagtatactaatacctgcaatttactttgaaatgcataaaaaatgataggtgcataaagagataggtagatgaacagatgtgataaaataagacagtaaaatgtttatgatgaaatcaagttggtgggcatatgagtgtttgttgtaaaattcttccattttgtatatctggaaatttttctaataaaatggggaaaaacataaaaaggaaaagcattctaatagggcatacaaaaaagataaacttgggaaggcagtttctttttgtttttttttcaagacagggtctcattctgtcgcctaggctggatggagtgcggtggtgtgatcacagcccactgcagtctcaacctcccaggctcaagcaatcttcccatttcagcctcctgtagctgggacacaggcacatgccaccatgccgggctaatttttgtatttctttgtagagacagggtttcaccatttaccacgctggtgtcgaactcctgaactgaagcaatctgccagctctggcctcccaaagtgctgggattacagccatgagccaacacgcctggcctagtagtttctttaaggatttaagaactcctccagtctttaatcactgtgtctatctcttcaatgtaaattaggcttatggcagacaaatgaattccttctaggaaagtttctgtgagatcatcaataattgtaattatatatctaggcttataaagaaaatgtaggggctgggtgcagtggctcatgcctatcatcccagcactctaggaggctaaggtgggaagactgcttgagcccaggagtttaagatgagcctggataacatggcaaaacctcatctctacaaaaattacaaaaattagctgggtgtggtggcatgtggctgtagtccgagcctgaggtgggaggatagcttgagtccaagaggttgaggctgcagtgagctgtgattatggtactgcactctgggtgggtgggtggcgggcacccacgggaaaaaaaacaaaaacaaaaaaaatccttacctttcttcaactaaggcaaagtgtaaacctttaataaacaaagaaaaacacattaaggctaacagatctgtccagtcaaatgcaaatataaacagctgcagctagggaaaagaggggaaggggaagtgggggctctaactggatcttgactaatgcatatttattcatggaaaacaaccatgaatcatttaaagagaagtcagtcacaggactggcagaagaaagtgtaacacagccaaagtctggtgcaaataaaagcagagttgtatttcctcacattcttctataatgactataaagtctagcctcgaagtacctctgttcctttgagcaaaagataatttggggcttatttttggggttcattccatgcatgctattctctacataaaacagggaaaacacatgtgcttcatacaaaacctggtatcacattagcaccaaacaaaaggcaaaacacacacttattttttcttaatacttaaggccatagtaggagctcatttttctactgagtttctagaagaaactcattcttccatttacaagagtcaagtctgtttattcttggtgctcaggaataggactagagtgggcagctattcctatcccaggaaataagtttttgaagaacggaaagcaatttgaatcaggtcctaaaacacactctaaagataatggtctgaaaaatgttcactctagatacattctgtaaagaaaattagaataaataaagcagaatcgcttttttgggtgagcagggaagcatatagcagggagggtaaactgtggacttggagtcaggctgcctcagtttgcatcgtatctctgtgcaagcttaggctagctgcttatgttattgatatttcagtttcctcatgtttaaaatagggttaatgataccatggagataaaatgagttaatacatgtgatgtgcttaggacagtgtctggctgttaactgtgttagctgttatcaccatccatatcatcaagccaacagagacatccagtgtaatcataatcaccccatcccacacacacttatttaaaacaaaactaaacaaaaaggataccaaaacatattggccctttttgagccatcttccctttgatgctgcttcttcatctccattcttccttttaccacccaaagtttggaaagaaccatgtttgcaattttcactttcatagcaataatttatagcctggcttccacccaaaatattctgctctaattgttttagttaaagtcactaaagactttctgttaaatcaaattatttattttcagtctttatgcttcttaatcactttttagtatttcacactgtttacccatccccactttttgaaatagcctcctttcttgggcttaacgtgacgacactttcttccagttcttttcttgtcttctcctcctgatatatctttaatgactcctgctttctgcccatctttaaaatactgccaatcctaggttctatattttattgtttttttcttatcaatctcaaaggaagacactagtgtctttcacacaatctaagtggtgatggtgcccaagtttattctattctagacctcattcctgtacagcatttccaacaacttagaagagttatctgcttggatatccaatagaaatctcaaacttaaaatgtttaaagctaaatttatctcgcttaccttaatctattcgttcttttccatttgttaccacagttaatgaaatatcaccatctgtctggtcttccaagatagaaacttgggacttacccataatttcttcctccttaatcattacaactaatttgtcacaggtcttatcaattattcttgaggaatatctcttagatataatccctttcctcttttcccattccactgttgtttatagtgctgtaatcttggaggggttgctggttcactctaagcctgttttgtcatctgtaaaatgaggataataagagcatctacctgataaggttaaacgaggaaatgtatgttaagtccttaatcagaacctaggaagttctcaatgaatgatagccatataatttaggttctcaagatgttttgcttttattttaatggataatcttgcatctctcacatttcttttgtataaagccaccaaatatttgtatctgacatgatgatgtccatccctacactgctacccttgcatctcattaactcaccccaccataatcatccaacctagtgttactacagttcttgtcagagggtatgtacattccagttcttgtcagagggtatgtacattccataatgtttagtaaacggatttgtgaataaagctaatatgatttccactctcaactgcagagaaatgtgtatagacttggttttggtagaacaggaaggctaggggaagacagttaaggatgcaaacccagcctttgaaaatcactgctctgtactatataataaaagaaaatgaaatcatttgtttgccatctttcaggaacacattccctgtttaaaggctactgtcataaacaagaagactattaaataacgagagggaagaaaaaccattttccaagctctgtgcatgtcacaggtaagacttggatactagccaaggcacttataatcggtgaatagtatttcctataggaagctgggggaagggggaaaatgcctcagagttagtatttagagaggacagtatgaatttttttttttaagactcactttcatttagaaaagttattgagaaggctggatccacatccatccatttagtaactaaagtcttgctaatgttacatgttaagtttattgttatgtaaacaatgactcatttaactcttcattattgtaagtacaatatgcattgtagcttatggagaacctaattctaactaccaagacggttaccttctaatgagacactggtttatgttctggtctactccatctataacattcttcttaaaaatttgacatgaatttccacttctggccaagatggagtaagcggcactagattaaccctcccacctaaagcaataaacaaacctttacacaaaatatatgaaacaataggttttaagacagcagacataaggcaatgaaaaacagtggttcctcagatggaaaacaaatgaggcaaatcctgtgactgcccacttattgccttgaaagcatttccaggccacaatgtaagaagggagacttccagtttccagtttcacatgtaaggagcttggaagtcaccacttcatcctaacaacaagtaaaaacctgaacagactaaaaattcaacaattccaggatccataagaggtgagggcacagggcaaatcactgagtacagtcagggagtcacagcttaccagagtggaaaatgcagtgggaaccagagccagggtaggaaaacctgacttgctactgacaaattgctggaggctccatgtggacaagtctgagagttaacaactccaggggcactcagagatgggggccgccaccattttgtgtgacttacctctaggagcccaaccaggttctcacagtaaatactgaagaaaaatcccctcaagcttctagcagaagaaggggaaaagtaaccattttgaaacatgccaaagcacaatgctcttaacaaggcctgccctcaggggaacctagttcaccagagcccaacctgctggagtattatcagtgcctaactgaagggaagcattccttgtgggagaagggaaatacccaactgtctcccactctagtcctcctctcccactgaagggggggaaggaaaacaatacctgaggaacacttatgaagcttacagttcagaggcacaagctcactaaaaaactgagacctacttactgaactacagaacgcttcctcatccccacagctcactaccacatgattaataataaaggcccacttacagcagttcctttaaaacagtagatcatatccagctatcaagaaaaaagcacaaggaatactaaaaggcaaagaacacaatgtgaagagacagggtgagcatcagaaccagacatggcagagatgtaacacacagacagggaatttaaaacaactatgattaacacgttaaaggcgctaatggataaagtagacagcatgcaacaatagtgggtaatgtaagcaaagagatggaaatcctaaggaagaaccaaaaagaaatgctagagattaaaaaacactgcaaaagaggtgaagaatgcctttaatgggactattaatggactgtatgtggtctattaatagataaaaatcagagtaaagaatctctgattttgaggaygtatcaacagaaactttcaaaactgaaaaacgaagagaacgaagactgaaaaaaacccagaataaaatatccaatgactgtggaacaattacaaaaggtgtaaatatgcataatrgggaataccagaaggagaaaaaagagaaaaaggaacagaataaatatttgaaacaataatgactgagaattttccccaaattaatatcagacagcaaaccacaagatggtcggagaacatcaaccataataaatgccccctaagctatacttaggcgtatcattttgaaactacgataaagaacaaatcatgaaagaagccagatttttaaaatgcctcatctatagaggaacaaagataagaattacatgtgacttctcagaaaccaagcaagcaagaagagaggggagtaagatacttaaaatgttgagagaaaaccccaccaacctagaattctgtaccctgagaaattatccttcagaagtaaaggagaaataaagactttcctggacaaataaaaattgaggaaatttgttgccagacttgccttgcaagaaatgttaagaaaagttctttagagtgggaaaataatataggtcagaaactaaaatctacataaaggaaggaaaagcactaaagaaggaataagtgaaggtaagatacaaacttttattttttttttattctgaattgatctaacagataacaattaggaacagggaggggtattacataatgataaaggggtaaattctccaaaaacatatgaagatccttatagatctcatatatagatttcaacatccttttaacagaaatggacagatccaacaggcagaaaaatcagtaaggacacagttgaactcaacgataccatcaaatacctgaatataactgacatccatagatgactttacccaacaagggcagaatgcacattcttttcaagttcacacggagtatttaccaaaccagaccacattctgaaccataaaacagatcttaatgaatttaaaatagaaagcatataatatctgctctcagatcacaatggaattattagaaaccaataacagaaagatagctggaaaattccaaaatacacagagattaaacaatgcaaagagagagaacccagtcagaatctgacacattcccttacttgaggaggtggagctgagaatcccaggagaccaagrcagtgagaattcaagggacagagttctgggaagaagaaagctgtgcagaaataattctggagatctgtggaaattaacccttgagaaatcaatggagtactcactggcatgtgtatgtgaggaaactatccaaggctgagaaaagatctatccaagattagaaaaaaaagtatctgcttcttacatagggccagaaatagtacctgttcctaccagccagaatggaaaaatttacaggacattcggccaggcacagtggctcacgcctgtaatcccagcactttggggagccgaggcaggcagatcacctgaggtcaggagatcgagacccagcctggccaacatggtgaaaccccgtctctactaaaaatacaaaaacttagccaggcatggtggtgctcacctgtagtcccagctactcaggaggctgaggcaggagaattgctgagactaggagatggagactgcagtgagctgagatcatgccactgcactctagcttgggtgacagagactcctcaaaaaaaaaaaaaatatatacaggacattcagtagaatactcagaagggtcttatctcagaagtaccaaacaattagacctggaatacatgctgctgtggtcctgcttaacaaatgattaaggcaagacagaaaactgatcatattgtctgcaaataacatttcagaaaaaagcttaagaatatgtataagaatacaaaaatttctaacacccaacaagctaaaattcacaacatcagataaccaaaaagagattatcaggtatgcaaagaagcaagaaaatatgattcatatttaggagaaacaaaatcaatcaattgaaactgacaaataagacagatgttagaattagtagagaaatatcttaaaacagattattactgtattaaatatgctcaaaaggtatgaacaaggaagctataagactcaaattgaacttctagatataaaattagaacatctgaaatgagggcgggtgcagtgactcacacctgtaattccaacactttgggatgctgaggtaggcagatcacctgaggtcaggagtttgagaccagcctggccaacatagcaaaaccctgtctctactaaaaatagaaaaattagccaagtgtggtggcggctgggtgtaatgcagctactcgggaggctgaagcaagagaatcatttgaacccgggaggcagaggttgcagtgggccaagattgcgccactgtactccaggctgggtgtataacaaagagtacagagagagactccatctcaaaactaacaaacaaacaaacacacacacacccagctgaagtgaaaaatacactagatagaattagtgacacatttgacgttacagaggaaaagatgaatgaccttcaagacaaaggaatagaaactatacaaaattaaaaacacagagggaccctccaaaataaaaatgcatcagtgaactgtgagataactccaagtggacaaatatagttgtaattgcagtctctgaaggtgggggaaagaagatacatttaaagaaactatggctacaaaatttccaaatttgaagaaaactataagcccactgatccaagaagttcaataaacctcaagtttaagaaacatgaataaaatgacactaaggcacatcaaactgatcaaaacagtgataaagagaaaatcttaaaagcagctagagaagaaatgacattaagtacagaggaacaaaggaaagaatgacagcagattccctgtcacaaataatgcaagtgagaaggcagtggatctgtagttttaaattatggaaaggaaaaaaaatctgtcaacttagaattctttacccagtgaaaacatctttcaaatatttcaaaaatcatattaaaataaagacctttacagacatatagaggctgaataaattaatcactagcagatccacaatgcaagaaatgttaaaggaagtccttcaggcagaaggaaagacagcagatgcaaatatggattaacacaaagaaatgaagagcaccagaaatggtaacgcatggataaatacataagatttttatcttattggttaaaactctttaaaagataactaactgctgtattgtggggtatataacatttatataagtaaaatgtctgacaacaacaacatagaagttgggaggggacaaatggaaatatacatggtgcagaaataattaatataacaggtctgaggctgctcccctcagaaagcttgcttacaaggttgactcttggcaggagtctgggaacttggatttcaggagggttcttaccattcccagaactggtaagaacggctcattgtacctaaacagtttgtataaacaatgtggtttacctgctccccttctggctgcctggaattttggtatgtgttaggcaaggtgggggtctgtatgaccacacgccaataaaaatcttgggtcatgaatcactaatgcgttttcccggtatacaatatttcacacatgttgtcacaactaattgctggaggaattgagtgtatgttgtgtgacttaactggggagggtacttggaagcttgtgtctaatttcctccagacttgcaccatgtggcttttccctttgctgattttcctttgtatcctttcattataataaagcatagctgtgggaatgactatatgttgagtcctgtgagtcttcccagggaatccgtgaactgaggggcactcctgacataactattgtaatgctcttatactatacatgaaatggtgtaatatcacttaagggtacactgtaataagttaaacctacatagtatacatgatacagtgaacaaacaataacaaagagtacagctaattaactaaggagataaaaatatacaaataatcaaaatgtgrtagcaaaatagagaaaagcaggatgagaacaaggaatagataggataaatgaaaaacaaatagcaagaagataaatttaaacctcccctaattaaaaaaaagtaaatgatctaaatatttcaattagaagccaaagacagattggataaaaaagcaagacccatcactatgatgctaataagaagctcactgtaaatataaataaacaaataggctaaaattaaaggtatggacaaagataactaatatatgctaacacaaataatagaaaggtggagtggtttttattattagacaaagtgatttcagagcaaagagtatcatcaaggattaaaaaaaggtcattccctaatgatcactgggtcagtgcatcaagaatacataacagtcctaaatacacgctctaataacaaagctccaaacacaaagagcaaaaactacaaggaataatacagaaatccacaaaatccatttttgcagctaaagatttcaatgtctctcttctaataattaagcgaacaagtagaaaatcagcaaggatatagaagacttgaaaaaaacaatttgacctatttgatatttatagaagtgtctactgtaaaatagcaaattcttttcaattgcatatgaaacatttatgaagacagactatattttgggccgtaaaaaattctgtataaatttaaaagaaatcatgtcatacaaagcatgttctttgataacagtgaaattacacttggaatcgatagcagaaatatatctggaagttccccagaaataaatacatgtaaatcaaagaaaaagtcaaaagacaaatttgaaagtattttgaatggaacgcaaatgaaatgctttaaaaaaaagtaaagaggaggkaatactttcccattaccatgatactaaaaccagacaaagacatcaaaaaaccctagaaaccagtatctctcatgaacataaatacagaacagtaaatacaaaattgcagcaaattgaatccatcaatatattaaaaagtcatgaccaagtagcttttctcttaggaatgcgaagttagattcaaatatcaatcaatgtgatttgcaatgtttaactaaaaaagaaaaatataacttctattgatgttgaggaattctgacaaaatccaatataaattcctgattgaaaaaaaagtatcaacaaactaacaacagcaaagaacttccttaatctgatatggaacatctatggagaacatattgacatagctaatggtgaaagactgaawgctttccacctaagaccaagaaaaagcaagaatttccgctctctttgtttctactcaacattgtactagttctagtcagagtaataaggcaagaaaaagaaaaaggaagaactaagattatctttatttacagacaacatgatcatctatgcagaaaatcttactgaatctattaaaaaaagtcattagaactcataagtgagtttagcaaggttttaggatacaagagcaacatggtaaaaatcaattgtacttctatatattggcaatgaacaattagaaattaagctaaaagcaatatcatttacaatagcataagaaatatgaaatactgaaggataagtataaaagattttcaacatttatacattgaaagctagaaaatacagctgatagaaattaaggaaggtctacatgactgcagagatatactatataggttggaagattcaatactgataagtcaattttctcccaaattatctatcttcccccctcaaattgatctgtctgtacgtctgtccatccatccatccatccatccaatgcaatctccataaaaactctagcagtttttttttttgtagaaatttataaggcttcacacggaaatgcaaagaatctagaatagctgaaataactctaaaaaagaagactggagtgttgacatgatttcaagatttactataaagctacagtaataaagtatgttattagtatcaatacagaatattattagataagtgaaacagaagtccagaaatagaactatatatctatggatgaataatttttaacaaaggtacaaaaggaatccagtagatgaatagtctttacaacaaatggtgcgggaacaactaggtatccgtatcttcccctccaaaaagaagaaaccgaaaagaaaaagaatgttgacacatatcttgcatcatatacaaaaatttactcaaaatcaatcagatacctaaatgtaaaacataaaactacaaaatttctaggagaaaatatttgtgtcctttcatttgtcagagaaatcttaaacacgacactaaaaggccagtcctctaagacataaattcacaagttggacatctaaaaacttctgtcttcaaaagacactgttaagagaatgaaaagagaagtcataaacgaggaaaaaatatttgtaaatcaagtatctgttaaaggacgtgcatccaaactagataaaaaaagtttcacaacttaaagaggatgttcagatagcaaataggcgcacaggaagattttcaatatcagttactagtaaatccaaattaaaggcgcagtgagacatcactacatagtagtagaatatcaaaagtttaaaagattgaccacgctgtgtaccaacaagaatggggaggaactgaaactctcatacatggatagtgagaacgaaaatgatacaaccactttgaatatcattttgcagtttcttaaaaagttaaacatatacctgtcagatgatctagccacctactcttaaatatttgatagaattcaatggtgaaaccacttgatcatgaagttttatttggtggatggtttctgatagcaggttcaatttctcaaaggaaatagagaccctgagatattttatttcaccttgtgttagttttggtaagttgtgcttttcaagaaatttgttattttcatctaagttgttgcagttactggcatatataatatctctttatattttcttattatcctttctatgtctgtagaatgtgtagtgatatctcctctttcattcctgatattagtaatttgtgttttctcccatttttcttaagcaatattaagattcataaattttatttatggggttcataaattttattttttcaaataacgaattctggctttgttcattattgctaatgtttgtctatttcttactccactgatttctgctcttatctttattataatatttccttcctttttactacattgggtgtattaatttcttagggctgccataacaagttaccactaactttgtggcttaaaacaaccaaattttattttctcacagttctggaggctagaagtccaaaatcaaggtgtccctagggccatgctccctctgaggctcaagaaagtttttccctcttcctagttttcggtagctcctataaatccatggtgttctttggcttatacagctctatcactccaacttctgcctccaaattcacatggcccccttccttgtgtacttctgtgtgacttctcttctttttaaaaaataccgtcattggatttagggctcaccctaatttagcgtgatctcattttaatttaattacacctgcaaggtcttagttccaaaaaggtcacgttcttagattctgggtggacctgaatttttgggatacattattcaattacactgggtttaacagatacattttagaacctctggattctgttatgttcctctcaagtatgctgatttttgttcaagtatgctgatttttgttcaagttaacttagccggattcaaattctcttcggttataataagcagctgaaaagttctttcagcttctgggtgtttctttatttgcagagcttattaggatttcttctatacatatatggttcagtagtcagccaaggatctggggcaaggcttacacacacattttgggacctaccgcctctgcagctccctttcttttagaaattccttgctaactttccagtattctgccagctttgggattctgtcctttgatacttcaagtaagtaaagctgtggctttctgccacctgaagccatccacagattggaaagagtccttaagcaaaatgctacaaacttgaaaatacaagtttgtccttatattccaaatataagttttggtccctatatttcaaatgtaaactcacttcccacttccatctgctttctgccactctccagtgccttcaaatagttattttttgtattttgttcataattcttaattgttatccatggaaggcttagtccaaaaaggcaattcttccactaacaaaagctggaattcagacatgtttttattatggctttaaaatgctttagcaaagtgcgcattcatttgtcaggccagaggtgccagatgatgattttacctcattaactctgagaggaatatttttagcttaaaaattctcagcaagtagttcttacagtacagccagtatagctacctatttataggtaggtgttagccaaagtaaaaaagacctactgaagttccagaagcattcagcagagcaacctgtccctatagatcagtattacataaaatctacctagcaatttttctaaccctatcagatttctgctaataaacagaatcagacaaagaagtaacagatgtatttaaacaagtcatttttagtggaaagaaaaaagggagaaagcaagaacaaaagtgactaagctaggagacagatattttcatcatatcttagtaattaattactacaaaggatggtgggaaggactcttaaaaaagcaactcttttaaaaagaggagggaaaggatcaaccttcactattagcagacatcctcaataattaagaagatatgatatttacttggcagcctacagtctattctatatagagagtaggtcaatacctaaactgaattaaaaaaaaactaggttttacttttttacccaacaattaaaaaacatatctggggtttagttttaactatttagactgaaaagtacatttcatcctgagatttggcaaatctgtgaaattcgagagtgtaacagaatcgtggagagggtaagagagaaatgaactaagttagatctggattctagttcatggtttattattctattaccctgggcaagtggaattaactgcttttggaggcagtttcattaaatgtgaaacaaaggacttggatgaaatctttaagattctttcttagtgctaaaaaaagctttacgtgaatcagattttaaacatatgagaattgagtgatactgactatgaactaaccatgactcaaatgttatttcccttgttccttcacagaatccctttgccacttcatttctccccacttccccataatctttcgtaaaaaacagggtcaatgaagtcaggcatgtctctgaaaagaactctctagagctgatgattctcaatctaagacctttctagaatttgatctaaaacttttatctcactcataagacataggggaataaaagttaaaaatgggtgggggggactccttgggaacaatcagtttatttttgaaaacactatgttccttgttgaggtgtcctttctgtacagtgctcaccagtgaggattgctgcacctagtctaagactttcagtcctttgaaaacattatgtgatatgacaggtgctatataaaagcatggggtttcaggagtttagtatttcctagcaaggcttagagctttttccttttactagatcagctacactctctatatatcttaatttacctctcctttgggtcacaatcctctgtttctaatttatagcccctaagatcatttaaccacaggtattatatcagggtaggttatatgctcagacataacaactctgtgaccttttgcaaattacttaactcctctctccatcttgatttcttactctgtaaaaggggatacatayacctcatggggctgtcatgataatgtagttattagcatgaaacctggtacatagtaaatgctcagtaaatgctagtgatggtcatgctttcatcctgtcttcccattcttgatgacgaactctgctcaagtcttttcactttacacatttctcaatcactttcaggagtcttggcagcatcatggacttcccctcaccttcacgtttcagtgccatctgttgcctactcctgatgtttgttcttccatagggggagaggctaattaaagcacaaagctaccctcttaaatttttaagtgaatagtacagcatggctaactataagcacaatgttgtacagcagacctctagaactttttcatctttcatgattgatactttatacccattgaacaggaactcccyatttcctctttcccccagctcctggcaaccactattctactttctattctgatggttactttagatgcctcatgtaagtggaatcatgtcatatttgtccttttgtgactggcttacttcatttagcagaatgttctcaagtttcattcatattgtagcatattacaggatctcttttccattgatatatagaccacattttcttgatccattcatcctttaacatttaggtagtttctgtctcttggcaattgtgaataatgctgcaataaacataggagtgaaaatatctctgagaccctgatttcagttcttttggaaaaatacccagaagtgggattgctggatcatatggcagttctattttaaatatctgatgaacctccatactgttttccatagcaactgcaccattttacattcccaccaacagtgtatggggttccaatttctctacatcctcaccaacacttgttattctttcttttttttttaaataatggccatgttaacaggtgtgaggtactatctcattatggttttgatttgcatttccctgacaataagtgatattgagcattttttcatatacctattggctatttgtatgtcttctttgaagaaatgtctatgtaagtcctttgtccatttttaaacattgttttgttgctactgagttgtaggagtttcttatatattctggatattaactcctatcagatacatggtttgaaaatattttctcctattccatagattgccttgttactctgttgcttctccttatccttctccttaagacaggtcctcattctgtcagccatgctggagtgtggtgacacaatcatagctcactgaagctgcagccttggactcaagtgatcctcctgagtagttgggactacaggcgtgtaccaccgtgcatggctaatttttaaagtttttgtaaagacaggtctcactatgttgcccaggctggtctcgaattcctagcctcaagtgatcctcctgcctcagcctcccaaaatgatgggaatacaggcacgatccactgtacccggcctgttacctctttttaagtactaaaaatactgatgccaaatactgatgactcatctggcatagaaataattttagtctttgtttttttttttgctgaattaataaaattcattaagcattgtgttggcatgttcttatacattatcttactatctctgttcctttagttcttttccattacatgttccatttcattgtccatctggcagtgtctattctttaaattttttttttttagcttttcttaagtatcaatgagttaattttaaaggtaataaactgtaacttgttttcttcaaaactgcttttaaatgttgctaatttctattcctgcacactaactgaacaaggatgctggcaatgataacttaagacagagaaatgacatgattctgagctgcattttagaaagattactttggcagccaggcattatactgattagatgacagaaagaccagagaagcagaaaagataactgatgggtcttcggcttaataccggggtgacgaaataatctgtacaacaaacccccgtgacacaagtttacttatgtaatgaaccttcacacgcaccccggaacctaaaataaaagttaaaaaaaaaaaaaaagaagaagatggaaagaccagaggagggaggcaagctaattagcaatattgagaatggagaatatggaaagaatgtgagaaactctgtgagagctgaaccctcagggtctggtcctgactgcatataggagataatgtagatggtgcttcaatgctgactccaagatttaaagctcaagtgagaggaaaactgaagtactatttaggaagagaggagtcgaagctggtttgggtgaatgaatcaagtatcctctctgaccacagctcctgctgaaatattcaacagtctttgccatctccaataccgcagagtacagagtatctaccataagccaatgtactgctattactgtattaccgattgctttttatattaagttgtctatgacatagtttccttattaccactacttaaagagttgtgaggattaaataagaatatgtttaaagctctaagcactgtgcccacaaagagtaagaactccaataaatgtatgctatcacttttacaccttttgaagagtgtctcactgttaacatttgtcttagtgttttaaaaagtccattgccttctattaatgtggggataaaaaagggggaaggcttattttactctgaaaaaaatcttactttgaatctttgaataacttccatattaaatttcagctttctgacattggtcttatgggaaaacatttgttgagaaaaatctgcagtcactgctgagtggaattttcagaaagagaacaaagatctttggagaacagttaaaaaaaaaaaaaaaagaaagggaaaacccaattctcccaaaggttgctgcttttttatatgcttcctcacatttaatacctgaaaatgtagagaaaacataaaacagtaaaggttttaaaataggaaatatttgataaaatatttataactatggcaatacagttgttttaagtattgtgctcttagagtgttggcttttaaggtgatatacaacatttatttttgggaatataaaaactgggtattttaattcgttgaaatttaagataaaacattttaaagtgaactctcattgatgaaatagcctttcgtttgtggccttaaaatgaaatcatctagttctgtaattttatgagcatctggggaagttatttcacaacaaaccttttatatactacaagattaaaaaacttagatcattttactgaattacaaaatttttttgcaaagtcttatctaagtaaatttattggcattatggttactttaatagacctagtcacttttgaggaaaataataagattaattgggaagtttattctttaatttagatcaaaacatcaaaataggttaagagtgtgttatttttctttactgcactcaaggcattttaaagtatttccagtgagatatcttgcagagttagatgtcatgatgagagttttgttcatgttacttcacagtcttctctgcagaagagctggttgggggtgaggggaacaacctcatacaactaaaacttacaatctacccatataatatttactataggaagttatgtgcatgcaaccttatccttgggttttgaatctacttaagaaaatttaatcttacttgtagggatgaaataatgaacaatgaggtagaaaagactgatggaaatattcccttgtaaatgtgagagccagccaggcaatgatcaagatgactaagcaacctcagggatgtgtgactcagtaggctaatgtaagagcatttagcttcatgacatgcatcttagtcatcatcataaaggattcattgtttcagaacagtacgggactcataaatggtgtgaagcacagatttgataaaaattaaatttattgctttgataaaaccaagttaactgtggcagggccaatttcacataaattctgccaatgaatcagactatcatttgtacatatgccctccaacctagtgtctattaaagtagctaataactaaacacaaagcctctgaatggctttttatgtaatgagatttagtaaaagttctaaggaaaccaccatatattgagaaatgaagttttaattagcaatatataatttcttcaagtagaagagtgtggttgtaacttaagaccaggcaggttagggtctcaatattaataatttgttgttaatttaacccacgtagctaccattcaaagtcactatgctacaatttgccttgtatattttaactcctcctggttccctttatataatccatcataagatttattacatttatccataaaaataaactatttcttccttccttgtaataggcagcaaacttagtttctatctttctctgcggaatgagagagctttcattaagatgatcagaaagagtggacattttcaggtggataatttttagcataactccacattaacctaatggtgattaaatttaaaaacatgaagccaaaaataattaaaacaatttttttgagactgttgcccaggctggagtgtagtggcacgatcttggctcactgcaacctccacctcccaggttcaagtgattcttaagtctcagcctcctgagtagctgggactatgggcccacgccaccatgcctggctaatttttgtatttttttaaagtagagatggggttttaccatgttgcccagggtggtctcgaactcctgacctcaggtgatccctccaccttggcctcccaaagtgctgggattacaggtgtgagccaccatgcctagcctaattttaaaattttaagttaaaaactttattagttaaattaattcaaattaatatctatcaaagacattaggctttgggactagaaaaggcgcttgtagtaggttagctagctatatactctgtactagtacacaatcttctatgacttttatcattagtattcaagctcttggatggttgacagctaggaatctgttaagttgctttggacagttgactcacatgacctctcccccgttgggccgggtttctggaaatatcaatttttgtagaacagttgttcaaaacagctgtcttgaagagtgaaaaaaaaaaaggactttttaactaatgaagcaatgttgatgttaatatcccacttggagatgttatcccaacttctgcttcagcagtcaaaagactaccattatcatcaaacaactgcagttactattaaggcacctgttaaattaattatgcctgtattgttaaatcatgttcatgaataacatgtaaccagctctcaaactacgcatttttgcacttttgtaaatagactgatggaccttgaggcataaagcttatcttcaattacaatgacatcctctaaactagtggttttaaaagtgtgatctgcaaaatcacctgcaaggtttaagacacggcttgccagccccattctcagaatttctgattcagtaggtgtggaatggggctaaagaatctgcatttctgaaaacttcctagataatgccactcctgctggtcccaggaccacactgtgagagccactaagctcgcctactgcaatagtctcagtgagaggcagtattgaaggaggtgaaaagtagttggatttgggagctctttggaggtgtagagccaacaaaacttgtttttaaacattgtgatcctaaaataaaataaaagcgtcatctggggatccctagattcttgagatatgttcttggagtttgcaaagtcaaaactatatttacagtactaagaggttatttgcctttttccactctcattctttcacaagtgtacagtggaattttccacagcttacataactttaacatgtaatgggtctattatttataaaaaaatgaataaatgagttatttcaacaatccctattattattttaaaacattattttaaacaaagtatatttaacatattatttttaatttctaatatgataatatcaatttatcccatataaatataagctcaataattttttaaaaatgagacagggtctccttctatcacccagactggagtgcagtggagcaataatggctcatggctcactgtagctttggcctcacaggctcaagtgatcctcccacctctgcctcctgagtagctaggactaccaccatgcatggctaatttttaaatttttttgtagagacagggttgttgcctaggctatgttgcctatgttgcctaggctggtcttgaacttctggctcaagtaagcctcccaccttggccttctaaggtgctgggattacagggacagccatagccgcctgtgtaatttttttatgagtataaaaggctcccgggaccaaaaagtttgagaaacactgctcttaacagaatagtacaagattctgcctatatgaagttcccaatcaatgcakggcttgycacctcaaatgttctttggacatacatccagaggatattatttcagacactctctacacttgaaatcagtcagtcaataaacttagttatctactgggtatactacagtgtatataagcattaactaccatctctaggatcatttaaaaccagaattgtgattaaaaaactatttcagaataaaatacctaggaatacagttaaccaggtaggtgaattatctctatcaggagaacttcaaaacactgctcaaagaaatcagagatgacacaaacaaataaaraaaatttcatgctcatgaataggaagaatcaatgtcgttaaaatggccatactgccaaaagtaattggtaagattcaatgttattcttatcaaactgccaatgacactctttacaaaaccagaaaaaattattttaaaattcatatggaaccaaaaagagagcccaaatagccaaggtaatcctaagcaaaaagaacaatgctggaagcaccacactacctgatttcaaactatactacaggactgcaataaccaaaacagcatggtactggtacaaacagacgcatagaccaaccgaacataatagagaaccaggaaataagactgcaaacctacaactaccyggtcttcaataaaactgacaaaaacaagcaatagggaaaggactccctatttaataagtggtgctgggataactggctagccatatgcaaagactgaaactggatcccttccttacaccacataagaaaattcactcaagatgaattaaagacttaaatgtaaaaccccaaactataaaaacctggaagacaacccaggcaataccattctggataaagaaataggcaaagatttaaagatttcatgatgaagccaccaaaagcaattccaacaaaagcaaaaattgacaaacaggatccaattaaactaaagagcttctgcacagcaaaagacactatcaacagagtcaacagacaacctacagaatgggagaaaattttgcaaacgatgtctctgacaaaagtctaatacccagcatctacaaggaactttaagttaagaaatttaattaattaaatttaaattaatttgttaagaaaaaacagataaccctattaaaaaaaatggacaaaggacatgagcagtcacttttcaaaagaagacaaacatgcagccaaccagcttatgaagaagagctcaatggcagaacacacagacacagggaggggaacatcacatactggggcctgttgggggatggggggggcaagggtgggaacagcattaggataaatacctaatccatgcggggcttaaaacctagatgacgggtagataggtgcagcaaaccaccatggcacatgtatacctatgtaacaaacctgcatgttctgcacatgtatcccagaacttaaagcaaaattaaaaaaaaaaaaaaagaaaaagagctcagtgtcattgatctttagagaaatgcaaatcaaaagcacagtgagataccgtctcataacagtctgaaaggctgttaataaaatgccaaaatataacagatgttggcgaagctgtggagaaaaaggaacacttatacacagttggtgggagtgttttccacaatcagttcaaccactgtggaaaacagtgtggcaattcctcaaagatctaaaaatagaacggccattcaatccagtgaaatcactgggtatattcgaaggaatataaattgttatcataaagacacatgcacacatatgttgactgcagcactgttcacaacagcaaagacatggaatcaacttcaatgtccattgatggtagactggataaacaaaatgtggtacatacacaccatggaataccatgaagccgtaaaaaagaacgagatcatgtcctttgcaggaacatggatgaggctggaggctgttatccttggtgaactaatgcaggaacagaaaaccaaatgccgcatgttctcacttgtaagtgggagctaaatgatgagaacgcatggacacataaaagggaatgacaaacactggggcctactggtgggaggaggtaggaggagggaaaagattgggaaaaataatgaatggatactaggcttaatacttgggtgatgaaataatctgtacaagaaacccccatgactcatacctatataacaaacctgcacatgtacccctaaacttaaaagttaaaaaaaacctatttcacagaacttgtcagagtactcctttaaaatgtatgaaagatacacctctattctaaagtggaaagatataccttaatgcagactaaaaaagattttcaatcatttcattacttttttgggggtagtttcattttaatcataatcagaagaaaaatatgtcaaactgaaatatgactgtaatttgtacattcctttaaataaaattagaaagcatgatgtgacatgtttttaaaaattattccaggaaaacaaatctgattttttctgaaataaagtacaacattgtggatataataatcacatattataaaggcttgccaagcaggtctgaagaaacataaggaaagtttatctgcccaagtttgctttcctttcttgataatgtgttttaagtcgtatcctaagccatacaattcatctgtaaacaataattaagataacatgttactttttgagagaggattattgttcagggactctaaattctgaaaattctgaattaaagttattactagttttagtayactttacactgctaagtaaacaccttgctttttatggatcaatgtacccagctggatggcatgttctaaccrtttagactgctaaaaggaaagctcttgaaaaataaagatgacttcaaggaactgaaatactaacatcatagcatcttcatcaatggacaaactccagcctaagtattaatgtaaacaataagttaagacactatttgcaaggaatatgaaattagtatttttagaaattcaatattcagtcagagcccttcctaaagatttaggtgagctttgggaaaatctttgaatgtgcttttgttgtttcactgaatgcttcggctgaagatcaatgcaatggaaaagatctttgttgcattccagataaaactggtatttgtaaacatcaagctcaccagaatgtatctgttaaagaccttattaaatcttcagatactacaagcagataggtactaccacatatcaacagaactcaatataaaggtttcccaaaaatttcactgctgaaatctgtcaaataattttgttttctatgtagtataacatctattattcaatgattaktaaagcagaaaataaagtcaacaatgtcagtatgttttttagtaataagatggaagatgatgccaatgtggcagattttcaatcaaatctgaaggtccatatagatcagtagttctgtccaatcttctttattacggctgtgcattctggtcggggcgcaaatcaattatttggtctcttgatcaactttattcagactttagatgtaattagtctaaaatagtgcttgatatatttccattttctggactgtaaacacacagttgcatatgccatgcaactggtatatgacaaactgaagaactggcaagcaggatggacaaaaggactgggaactaaaagtatgactgaggctatcaactaactgctgttgatgggaggtatggtaattgttgcaatacaatcaattattttaaaatcctgtttgcttagccatcactgaaaaactgttagcataatgatgtctagagtggacagcagacatgtataaattccttcccatgggaattgtgcacgtggcactatactgcttagagtagggaataggacaaggggtgaagaggagagctaaagaaagatgaaaatcatccgtaagataaaattaaaaacacacttgtggtagagatagagattgctaacataccagagaaaggagactatctgttaaaagctatcagagacagtttggttcattttgagcaaacgagaggcatagaaataccaataagaggctcctcaactagaccatcactgtaacaaaatgacagtctttaaaaagatctggtgccagcttggagaagcatgtagcatgccacaaagaaggtaaggcaacaggtacctgagtgagaaaaggataggttgtgtagctcttgctaggccaggattataggcactttctaaaagaccaagataataaaatattgcatgttactagaaatggccactaaaacaaaaatgaaaaaaattccctagcaaaatacagcctgagtatcccttatttaaaatgcttgggatcagaagtgttttgaatttcagatttttttggactttggaatatttgcatatatataatgaaagatcttggtgataggacttgggtctaaacaagaaattcatatgtttcatacacaccttatacacatagcttgaaggtaattttactcaacattttgtgaaacaaagttttcactgcaacccatcacatgaagctaggtgtggaattttccacttgtggtgtcatgttggcactcagaaagttttggatttcgaagcattttgcattttggattttcagattagggatgctcaacctgtacattatgatcagcacagttcacctgcaatatggctagggctgaatctggtccgcagtcacttctgaaatccaagatcttagaaaggttatttcccccattaccacagcccctttacatytgttttctttcagaatttcgaggaactaatgcttccaaatgttgataattacacaatgcctgtctatgaggagtacaatgtatttgtgtttatctttctctagactcagcagaaatgaaytggtcacatgctaaaatggatcatttcacttcttagggaggtttaagtaagtatgggaataggagacaaagcaactttttggcttttgcccatttccatctgttcccgggcacccttaaagcccttctgtggttctaacctcttaaatcctgctgtgtgcgagcaccacccatgctctgtcttggcattcgtagagaagttctcaaaggtgtatgtctctgctcatccaggtaagcaaggtcttccaagtgggcagagctggtggctgacaagaaagaaaagtttagttagaatatttaagttcagaaaatgtctttcagctagkctgtatctccggaactttggaatcagggcttactccagccaaaaaatatatatgcaaaatatgtaatatatataaaatacatgtattttatgcctttaaaaatccaaataagtggtttgtaaaaaatattaacccttcatttcacttgctactttaagacagtacataataaacctgtgcttgctaagaggttctataaccttaaacagagggattaaatatttcctattcaaaaagcaaaacaaactaagcaaataaacataaacccttacttcataaaagaaatagataatggtagatttgagatttaaaatgaaaaacaaaatgctagtccaaaagcttaaaatgccatcttgcctctgaatgtctggatcatgaaagctgcagagacagtaacaaaaaggaagtttctttgttatcaaaagaaatagtaaatgggtttttactaaaaactgagtgaaagaaaaaattcattttacaaaaatgtttcaaattataagaaatactagagtatccattttattgtttgaaaatattagctaccagtggttcatgctagtaatcccaggactttgggaggctgaggagagtggatcgcttgagcccaggagttcaagaccagcctgggcaacatggcaaaaccctgtctccacaaaaaatgcacaaaaaaattagccaggcgtggtggtgtgcgcctgtagtcccagctactcaggaggctcagatgggaggattgattgaggctgggaggtcaaggctgcagccagccatgatcatgccattgcactacagacttggcaacagagagaccctgtttcaaacaacaacaacaataacaccacaaaaaaaggaagaaaatattagctaccaacttattactaacaactggtttgagytggtgagagggaaaaaaaacccctaagattatctttttatggctgctgggcctcaaatgttttgccaccaaatacttggggagtatatttctgtattgtatgatgtgttgagattacatggtcatttgcctcaaaaactttataatccaaaattttaatcaagaaatccaattttgccaccaatgatatatactaccttaccaaatagctgattataaataagctcttcaatataaactaagaagcaaaaaaggaaggggagacagctcagaattccctcagcataaggaaacaagaattatgacagtaagtaaacttacatctccaacctcatatataagttgtttatgatgattgacattgggtactgatattcatttgttaatctgttcattcatttaacaaatataacaaaattgttagtaaaaaaatgtcagcactgtgccgtaacaatacttttaccatagtttctaatcagtgtataggaaagaaaaaagatgagcaaggaaacattttactaaagaatgtagcagatagcagtcaaaagaatattttattaaaaatttattaaaattttattaatattttattacaattacaggaatggaatggaccttaagggctatcccatccaacacctgtgcaatgctcaactctgttatctttttcaatgtagttgtatagcttatgcctgaacatgtcactatctcttgatacaccatatttcaactttgcataactcttgttattagcaatatggttctatttctctacctcttaccctctctttctcttgatggtacagatgattcttctgcttwtatcaaaaagaagaaggaataatctttttaaaagtttattactaaggtgaaaagaactaaaaggaatgaacatgtatttattaaacacctgtaatgtgctgggtagtgtgcaacatgcttttcttgaattatggcttttattttaaagggaaacaaaaaaaaaacasaaagtgtaacaatgaagacattctgtctagtctcttaagagaaatgcatgggcttcttgcctggagagatgcttggaagatttctatgtctttgctaagaatccctatgggtaatttttggcctctcccatatgaagataataatattaggagagtctgagcacaactattcccctaattttactaaaactactactacaagcatcatctcccttcctttcctggatattttgaacataaatattacctaaaacacttactaagtagttacaaaacattagtcattatatgagtcctttgtattaggatatcctacttttcacagatatagattccaattcatatgtattccacagcagctctgaaaatgggtcattaatcccaaacagaggccataccattggcccagggagacaagtcagttgattaagaagactgatataggttgagtatcccttccctgaaatacctgggactagaagtgttttaaattttgaattttgtgggagattctgaaatgtttacattatacttactggttcagcattcataatccaaaaatctgaaatatgaaatgctccaatgagcatttcctttgagcatcaggtcagcactcaaaaacttatgaatctggagcatttcagattaggaatactcaacctgtaactgattctaagcagaagctttcaccaaaaatcttcctctgcccaaggactacacagagctcagaaactgttgcgactattctaacagagtaaactcttgatatcatgacatttagagtatggtaaatatatttgggagtgatgttggcaacaggagaaggtaatgagttccttttttttgagacgaagtctcactctgtcgcccagattagagtgcagtggtgcagtcatggctcactgcagccttgacctcccaggctcagggtctcctcccacttcagactcccaagtagctggaactacaggcatgcatcaccacgctcagctaattttttaaaattactatttgtagagacagggtctctctttgttgcccaggctggtaatgacttctttgctcttttcctgtgcctctccaatgccagcaagccacacacactattagcagtttactttccatatacactactataaaaataggtagtttctcaacacaaaaagttgagaaatcttttaactttataccatctccccaaattactcaattaaataagtttaatattacaatgaagctttcaatccaagttctcaacattcaagacacaatgataacccagtttctccttgcaaaggcgaggtgaaacactctggtgatactggcattttgcttggtcataatagtccaaaaaaggcagtggaagggagctactggttatctctgcatttgctgctccccaaaacatgcctggagcaaactgaaatactgcccccagttcttcagcctttcctatatacatgctctttctcatctgtctttgcagttctcaccaccagaccctgaatcccattttgcagtaattcccatcagaggttgagtacacttccctgcccttgactttgggtttgatcatttgacttgctttaactaatggtatattagtagatgtgatacaaggaaggatttaaaatgtgtttgtagaactgggcttgtcttttttggttctgccaacattatgaaagaatatgtccagttagcccactggtccaaggaggatagaataaggtagatctggagccagtctccagcttggagccaaacctaaccaaactgcctagaccaatcaatccatagttaacctgagatgagtgggtacaaataaatgattatgttgagctgttatatttccgtatagtttgttacacagcattattgtaccaatagcagagtgatatacctgtcgatctttcaacatctgagtatggcttaggctgtagaattctaatagctctacacgagcagggactatgtcttatttacattctattctcaataaatgcattatgcctggcataaaataggtgctcaaaaatgcttattaaattaatttgttgaaaggggaccaagggctgtttgggtaaagtatggtttcaagaacaggcttgctgactttcttttgtactgcatctacaaaggcagaggaaaattctttcctgttctataacatggtagattacactagctttctttggtttaaaaggtagaatcagctaatttcaagaataaatacaacaaaaaataaacaactcagatttgatttacagagaaatcaaagtgatattctgtgaaatataattggcacattttatggtactttaagcttcaaaagacatttttataattaagtgtttgaaccaacttttataatataactctgaaatgcccaattattttactgacactttggaccagttatcataaagattgccaggatgtgtcctgtctgctctagatctctgcttttatttgatcttcatttagttataatatataattatcctacttttctatcttaaataagcaagatttgcagtaaaagctctttttaaaagatttcttggcaggctgaaaattcagagtcagctcatcactattaatatatagagttttacatttaataacgttaatgttcttctctgtgctcaactatgataagagccgattaaaatgtgcttaacaatacacacgctttatgtttcccgtcttagttatctaggtctactggaaacccagctaaaggaatttatccaaattgtagatataatttctataaagaaataagtatttgaaagctagtttagggaacttaaactaagaaagggaagttagatgccacattttacatcagagagagtaaaagagtagcaaaagtattaaaaaaaatctttatctcagcattctgaagttaaaactacccagaagaggtatctaatgtcttattttaaaacattagggacaacgacaaaaccatccctattgctgttctaatgtttccatgaattctttctttcttttttgggggttgagaggagtttaggccaagatgcagggggtggccctggcccatagttgtttcttatgtttaatccaatgcctcctgctttaactgaagtctattttcttttgtttgattctttatcgatatctatgtagctaccaaaaaaaaaaaaagaggactactagggattcagacccatcaagaatgaagacttaggacatcctaccagggaaagaaccctgactagatgtggtcctggcttagggcaaaggacacatgggataggcagtagatgaaaaaagttacaaatatcagctgggtgcggtggcttgcgcctgtaatcccagctactaagaaggctgaggtgggaggatctcttgaggtcaggacttttaagaccagccggggcatcaaagcaagacctcatctctgaaaattaaacaaacaaacaaaaaaactgattgggtatagtgcgcatgtccgtagtgctagctacttgggaggctgaggtgagagaattgcttgagcccaggagtttgaggctgcagtgagcaccactgaactccagcctgggcgacagagtgagactcttgtctcttaaagaaaaaaaatcaatctcagtttcataactagctacagaaatgacgactatagcagctatgcatattttgttccttgcttttgttatatatgtgtgtgtgtgttatactaatttattctttttctcgcctcctttcccttattttataaatacaagttttgatgtaaattaagtttccaatttagtttttagataacaaaccattcagataggactgtgtcagagtttgaggaataattaacatagccagagatggatagtgttatatcatctaaacatagttaaagtgactgttggaactagcctcattttggagaggtaaatatgtcttcaattacatgaaagatacttccatcttgttaggttaaaatacagagtttgttgtgctgaaaatgtttggagtttcaaacatgtatagtttggaagctcaaataaatatagaagggtgagtatggatgctggttagccaaaaaggtggactttgttaattgttaaggttactggagaaataatttgccccttcctgttcctatcagcattaccctagtcttacttgttcagccaagcattggcagttcattccaggagcagcagttgaatctagtttgcagtttttccaagggaggcgggactaacctcatctcacgtcttcagatactggcactgggtgaccagtgccttgttcttagtggtctgggtctaatctccacagaacccttcttggagcccttgtattagcctcagctgagcaggatccccttcatggagatgtaagtgtcagctttgtgaggcctttcttccaatcttgtatagtttaataattcttgcctctttttgtttcctcaggtccacaggtggtaactacttcctgcagttgttaaatccatgatacctcaaggttttcttactaccttttcagttctttaaacctagttaatgattttttttttcttttttgagataaactagtcactctgccacccaggctggagtacagtggcacaatcacagcccactgcagtctcaatctcctgggctcaagccatactcctgcctcagcctccgaagtagctgggaggctaaggcaggcgcacaccactgtacctggctaatatttaaaaacaatttcttttgtagagatagggccttgccacattgcccaggctagtcttgaacccctggcctcaaatgatccttgtaacttggcctcccaaagtgctgggattacaggcataarccaccgtgaccagccaacaattatttatattatcaaattcaacccttattctgttaaaataagtatgcttttatgtctcctgactggcccctaaatgatacaggatagaaaagaattgaacaccagtccctttcatatacatgatgttgataataaagcaatatcacagaatgtagatgcaaaagaaatttttttttttttttgagacagggtctcattttgtcacccaggctagagtgcagtggtgtgattttggctcactgyaacctctgcttcccaggttcaagcgattctaccttagccttccgagtaggcgtgcaccaccactcctggctaattttttgtagagacagggtttcgctgtgttgcccaggctggtcttgaactcttgagctcaaagcaatcagcccaccttggtctcccaaagtgctgggactacaggcgtgggccatcgcacccagatgagaaatcttaaaagatcacctagtataaacaccagcaaatgataatctgtggaccaaatatggcctgctacctgtttttgttaataaagttttacttgaacagaaccctgcttattcatgtaaatacagtatcatttatatcagagctaagtagtgatataggccatgtggcctgcaaagcctaaaatacttactagctgccttttaataaaaaagttgctgaatcctgatctattcagatcctctcattttatgattaggaaacagtggagtgacttgtctaaagtgattcagtcactggcagtasagcagcccatgaagccaggtatcctgactctcagtacaatgagtgcctccttccttcccactttaaagctaaacagatttaaatctctttttaaaagcttattttttattccttattcatcttcgccactttcttttaattctgttttatggcttcaaagagtagtaatagtgaccttgctaatgcaaagtaatgtaccctgtatatcatatactaataaatcacagctctctgcgcttgaaatattttctgcagtaagaaacaaaatgaaaaaacaaacaaaagcccccaaaacactatttttcataagaaaataaaaataattatagggtactttttaagctgataaactgaagagtaatttgaaaagaagattaatggaaataagtatcttctatttacattaaagcaaaattcaaataaaatcttaacagctgggtgagcgacagaaatttctggttaccattatggcaatattaatggcacagtatataatttcaaagcaaggttctaggagagttcgtttattaaaatggctcacattaaaatggtttgacatgttttaattaaaagagaatgtatttttcattaatagtgagtaaaaatgataatagaaatgtataaaatggagtgcagcaaaatgctgtattaagggaaaaaagcctacgagggaaggtggaacaagatagtcaaataataccctccaacgattgtttccctgtccccctgcaggaacaccaaactgaacaactattcacataagaaagcaccttcataagacccaaaaatcaggtgagcaatcctagtacctggttttaacatcatattaaaactttgggtgctggtgacctagtgagacaccagctggggtggccaagggagtgctaacgtcacccctccactaaccccaagcagtgcagctcacagctctgggagatgccttccttccacctgaggagaagagaggagacagtaaagaggactttgtcttggaacttggataccagcttagccacagtagaatagggccgcaggaagagttctggggcccctatttcgggccctagctcccagaagacttttctagacataccccgtgccagaagggaacctgctaccttgaaaggaaggacccagtactggcaggattcattatttgttgattatagagcccttgagccttgaatcaacatcagcagtactcacacagcacttgccacaggccttggatgagacccagggccatgctgaccttaggtgtgactctgtgtattccctttttgagggaggactcctgcttgaggaaaagagaggcaggagtgaagggggctttgtattatagatagggtaccagcttggccatgggggtaaagcaccaagagggcttctgggttccccaattccaggccttggctcctggatggcatttctggacctgccttggaccataggggagccacctaccctgaaaggagagacccaggcctagcagcattcaccacaagctgaatgaagagctcttgggccttgagtgaacattagcagtagccaggcagtacttgccatgggcctggggtgttgagactccttctacacgatggaaggtgaggaagagtgggaaggactttatcttgtggctttggtgcccgctccactgcactagtatggaacaccaagtagatwtcaaggttcctgactccaggccctggctcctggacagcatttctggatctgccttgggcattaaagaggagacagagactggggtagaatgtttaytcaaagggagaataacagagaactaagagaaatatattaacattcaagtaaaagaagctaatagaacaccaagcagatttaacccaaataagactatctcaaggtactttttcccaaaggtgaaggataaagaaaggatcctaaaaggaacaaaagaaaagaaacaacatacaaaggagctccactacatctggcaacagacttctcagtggaaaccttacaggccagtaaagaatggcatgacatatttaaagtgctgatgagaaaaaaaattctatkgtagaatagcgtatccagggaaaacatccttcaaacatgaaggagaaacaaaggctctcccagacaaacaaaagctaagagatttaattaacatcagacctgtgctacaagaaatgctaaccagagttcttcaatctgaaagaaacggacattaatgagcaataagaaattatcttaggtacaaaactcactgtaacagtatagttcacagaccactgtaattgtgatttataaactactcatatcttgagtagaaagcctaaaagttkaacctatcaaatataataactacttttcaagacatagatagtataagatataaatagaaacaatacaaagttaaaaagcaggggagatgaagttaaagtgtagagagtttttattagttttctctttgcttattagttggtttgtttttgccatcagtgttaagttgttatcagtttgaaataaatgggttataagatgttacctgtggctgggtgcggtggctcacacctgtaatcccagcactttgggaggccagggcaggtggactgcttgagcttaggagctcaagaccagcctgggcaacatggcaaaaccccatctctacaaaacactacaaaaaattagctgagcatggtggtgtgcacctgttatctcagttactagagaggctgaggtgggaggatcacttgagcccaggaggtgggggttgcagtgagctaagaacacgccactgcactccaccctgggtaacaaagtgagaccctatctcaaaaacaaaaaccgaaaccagatgttatatgcaagcttcacggtaatctcaaaccaaaaagccaacaacagatacacaaaaaataaaaagcaagaaattaaaacatactgccagaaaaaaatcacgttcacaacaaggagggcaggaaggaaataaagaagaacacaaaacaatgagaaaaaaaataacaaaatggcaggagtaagtctttcctcatcaataacaaccttgaacgtaaatggaataaactctgcaatcaaaagacacagcgtggctgaatggaccaaaaaaaaaaaaaaaataccaaccaaccaaccaaacaaaaaacaagacccaattatctgtggcctacaagaaacacacttaacctacaaagacatatacagactgaaaataatgggataaaaaagatattccatgtaaatggaaataaaaaaagaataggagtagctatagttatatcagacaaaatagatttcaagacaaaaattataaaaagagacaaagaaagtcactacataatgataaagggctcaattcagcaagaggatataacaactgtaaatatatatgcacccaacactggagcacccaaatacatatgcacctaacactggagcacccaattattattagagctaaagagatagacagatttgaatacaataatagctggagacctcaacaccccactgtcagcattggacagatcatccagacagaaaatcaaaagaaacattcgacttaatctgcattatagaccaaatggatctaatagatatttacagaacatttcatccaatggctgcagaatagacattcttcttttcagcacatggatcattctcaagggcagaccatatgttaggtcacagaccaagtactaaagaattaaaaaaaatcatatgaattaacttctatgaccacaatggaataaaactagacatgagtaacaagaggaactctggatactatacaaacacatggaaattaaacaatatgctcctcatgatcagtgggtcaatgaagaagttaagaaggaaattaacagatttcttgaaacaaattaaaatggaaacagaactagtatggaacacctataggatacagtgaaagcagtattaagaggaaaatttacagcaataagtgcctacataaaaaaggtagaggccaggagcagtggctcatgcctgtaatcctagcactttgggaggccgaggcaggtggatcacttgaggtcaggagtttatgagaccagcctggccaacatggtgaaaccctgcctctactaaaaatacaaaaattagccaggcgtggtggtgggcatttgtaatcccagctactccggaggctaaggcaggagaatcgcttgaacctgggggaaagaggttgcaatgagctgggatcacaccactgcactccagccagggcaacagagtgagactgtctcaaaaaaaaaaaaaaaaaaaaargaaaagtcaaataaacaacttaatgatgcttcttaaagaacaaagtaaacagtaaactaaacccaaacttagtagaaggaaagaaataaagattagagcagaaataaatgaaattgaaacaaaaaatacaaaagatcaatgaaatgaaaagttttttttggagaagataaaattgacaaacttttagccagactaagaaaaaaagagagaagacccaaataaattgaaatcagagatgaaaacgacattacaactgataccacagaaattcaaaggatcattagagactactatgagcaactatataccaatcaattggaaaaccttgaagaaatggataaattcctcaacatacacaacttaccaagactgaactatgaagaaatgcaaaacttgaatagacaaagtaatgagatcaaaaccataataaaaagtctcccagcaaagaaaagcccaggatccaatggcatcaccgctggattctaccaaacatttaaaaaagaactactgccggccgggcgcggtggctcacgcctgtaatcccagcactttgggaggccgaggcaggcggatcacaaacaaggtcaggagatcaagaccatcctaacatggtgaaacctcgtctctactaaaaatacaaaaaattagccgggcgcctgtagtcctagctgctcgggaggctgaggcaggagaatggtgtgaacccgggaggtggagcttgcagtgagccgagatagtgccactgcactccagcctgggggacagagtgagacttcgtctcaaaaataaataaataaaaataaataaataaataaataaataaataaataaataaataaaaaataactattcccaatcctactcaaactattcaaaaaagtagaggaggagagtatttccaaactcattctatgattctagattacactgattctaaaaccaaatgaagacccatgaaaacaagaaaaccacaggccaatattcctgatgaacactgatgcaaaaatcctcaacaaaatactagcaaaacaaattcaacaacacattaaaaagatcattcaccatgaccaagtgggatttaacccagggatgcaaggatggttcaacacacacaaatcaatcaatgtgctacaccatatcaatagaatgaaggacaaaaataatacaatcatttcaattcatgctgaaaaagcatttgctaaagttcaacatcccttcatgataaaaatcctaaaaaaactgggtacagaaggaacatacctaaacacaataaaagacatatacgacagactcatagctagtatcatactgaatggggaaaaactaaaagcctttcctccaagaactagaacaagacaaggatgcccactttcacaactgttattcaacatagttctggaagtcccagctagagcaatcagacaagagaaagaaatatagggcatccaaactggaaaggaagaagtcaaattatttttgtttgcagatgatatgatcttatattttaaaaaacccaaagattttacaaaaaaacagaactaataaacaaattcagtaaagtagcaggatacaaaatcaacattcaaaacacagtagcatttctatgtgccaacagccaccaagatgaaaaagaaatcaagaaagtaatctcatttatgatagccacaaataaaataactaggaatacatttaagtagaatagtgaaagatctctacaactaaaaaacaataatgtaagaaattaaagaggacacaaaggaagggaaagacatttcatgttcattgactggaatcaatcaatattattaaaatgtccatactaccaaaagcaatctacagattcaaagcaatcctatcaaaataataatcacattctttatagaaatagaaaaactaatcctaaaatttatatgaaaccacaaaagaccccaaatagccaaagccatcccaagcagcaggcacagtgctcatgcttgtaatcccagcactttgggagaccgaggcaggctgactgcttgagcccaggagtttgagaccagcctgcataacatggtgaaaacctgtctctaccaaaaacaacaacaacaacaacaaaaaccctcaaaccaaaaattagttgggtgtgggtggcacacacctatagttccagctactcgaggtctgaggtgggagaatcacttgaagttgaggtccagggaggtcaaagctgcagtgagccataattgtgccactgcattccagcctgggtgacagagcgagatcctatgtcaaaaaaacccaaaaccaaaaatcaaataaaaatggattaaaaacttaagtttaagaccccaaactatgaaactgttaaagtaaaacactgaagaaatttttcagaaccctggtctgggcaaaggtttcttcggtaataccctaaaagggcaggcagcccaaacaaaaatgaacaaataggatcatatcaagttaaaaagctttgtacaagggaggaaacaatcaacaaagtgaagagacaacccacagaatgggagaaaatatgtgcaaactatccatctgtcaagggattaataagcagaatgtataaggagctcaaataactctataggaaaaaaatctagtaacacaattttaaaatgggcaaaaatagacatttctcacaagacatacaaatggcaaacaggcatatgaaaaggtgctaaacatcactgacatcagagaaatgcaaatcaaaacttcagcgagatattatcaaatggcttttatccaagagacaagcaataatgaatgctggcaaagatgtggagaaaagggaacccttgttcactgtcagtaggaatgtaaattaggtcagccactatggaaaatggtacagaggttactcaaaaaattgaaaatagtactactatatgatccactgctaggtatataccccaaagaaggaaaattagtatctgcagttccatgtttgttgcagcactattcaggatagccaagatttggaagaaacctaagtgtccatcaacagaagactgggtaattgcaccactgcactccagcctgggcaacagagcgagactccttccaaaaaaaccaaaacacaacaraacaaaaaacagacgactaggtaaaaaaaaatgtggtacatacacacaatgaagtactattcagacataaaaaagagtaagatcctgtcattgccagcaacatggatagaaccagaggtcattatgttaagtgaaataagccaggmacagaaagacaaactttgtatgttctcagtcatatgtgagagctaaaaattaaaataactgaactcatggagacagagagtagaatgatggttaccagaggctgggaagggtcgctggggtgggggtagtggggatggtcaaaaggtacaaaaatatagtttgacagaatgaataagatctagtatttgacagcaaaacagggtgggctatagtcaacaataattttgtacaacaaaatgtacaatattgtacatttaaaaataactaaaagagaatagttggaacgtttgcaacaaaaataatcaatgcttgaggtgatggttatgccatttactctgatgtgattattacatattgtatgcctgtatcaaaatatctcacccaccctataaatatatacatatactatgacccataaaaattaaaaagaaagaagcctaatacagatatatttttaaaaaattatactcatctaatattttaaagattaaactatgagagatcttatactgtggagtacatattccaattaaataatagtcatgtaattcattttaatttttgtatcaaaaaatcttctggcaagtacttttagccacaggtttagtttctcacgtttaacttcttatatttaaataaaagctggtggtttgtaaaatatcaatgtttagtgtggttttaacaagttaagctaatctttactattgaaatacctaggaagatgaacatcactattctatcgccttgatttatttcacaaaaccaagaaatatagtaaatatgctttggcatgagcacatttctcaatttcagacaaatgacactagaagaaaaagacaaatattgccatcactgaactgagtgaatagttcattccttcaaaaatccaaatagaagtacaatgaccttaaaaaaaagcagcgatattcaatatcaaatgcaatagctctggggtcctgatgttgggcttagacagctttccaatcagtaaatggggaactatggctttaatctgggactacaataaaattatggttggtgttatctgaatctatcattttccactgcctttttttcttattaatcattgtccctagtcctcttttagtttctctttgcttcatcattttcaaaattcttctcctttcaaatagattatttaaaggcatatgagacaaatattggaaagatcagccaggagacacaaacttctgttaggtgtttccctttgttcttctagttgtacctagttgtactcttcctcacagtcatttggatcttttccatttgtatatcattttctgataaaaaggcttggtcaaactgcgtcaaacttatctttccctttgccaaaactttgcttaggctgcactttccttgctttcctaatcaatctcccagtcagaattaattggttctccttctcagcaaccacataaatatatactgctgtttagaatttgtgttattcaggtaggtgtttacatgtctgccttccttcactgattgtagtaggttcttgagaacaagaaagaaatgcccaattcatctttcattactctaccacttcagagtaaatcagagtgccctgcacatgatactcaatgtagaactaaattccagactggtcctacttagatttcataatccgtttggcacgatcctcctcctcctcactgttttgctttcttaatgcttaacagatatcactaaaataatatgcttagcttcaacaacgtttctattatcttccttcagatattcatgatcccccttttccttttttccatagcatacaccaccttctagcatagtatataaattacttataaattaccagcctgggtaacattacttactaacattacttttcccagcaataatgtaaactacatgagaatgggaatctttgttttgtttattaatgatgatacttaagtgctttgaacagtgcctggcatatagtacctgctcaataaatacttgtctaatgaacgaataaccattattatatgcacatttcatgtttcagctacatttaacaatgagcaaacaacaacttaacttttgtcttactgggttattttgaaggagttggctatagcaacaatgccttgtacatcatcatctcatacaaacaccaatgacggctctatagggacacatacgttcctaccttatagcgctagtcttactacgcaattgtactgcaaaaatttttgagatagttctgtcagattaaattaacattatattgggaagatattaggttggaggattgcttgagcccagggatcgagaccaatctgggcaacactgtgagaccctgcctcattcattcattcataaataaataaataaataaataaatactataatatttaactaacactttccagatacaagtataagacataatcaggtgagttcagatgaatggagaaagcagaaaaacaaatctataacaaaatttttatgtaaagagaaaaagctttaaaaagtaaatccacaaagtttgtcatttaaaagacttgttttgagaaggaacagggaaaagaaaaaaagaacagcttttttttagatttcatcaggttgtaacagctgaggacaactcagcatttaactgacatgcatttttgaagttaaaataatttaaatacactacaagtgggcagaagaaatctaacagacatttggtatacaacattttagagataactctatactgagtttggaagacagtttgaattgtttcttcttatatcagttgccactaatgcaaacagattatagtagtaaaattgtcactctagctgacttgagcaaggaacctggaatgacactgtatgtttgctcctgcctgggcaagaagccattctgctgtccttatacccttgatacataaagccaacgttctgactgctgaaaagcccatttttgatttttgcaaaatctctattaaaagtttctgattgggtttgcttaaatccccctagattcccgttctgtatttacctgattcttaagatccttttcttaggaaaacatgaagctccaagcattaacatgtagatggccagagtttatattttagctgacttctgttgtttgtatgtttccttgatagacctctcattctcacacaaagcactgacgacagctgttgcaagcaaacatttcctgcttcccacatccctctaattcactgccaatctcatttttggacatcaaggatgaccgtagactgcctactctgataatttctgccatgcaaccacaagtccacaagagtcttctacttccttccaacacacaggcttaaaaacaaatatgcaatagcaatttacattttgaaaacaaaacacattgttaaatctttttaatattttagaattttaatttaaaggtgtatgaacagctaagtttatattcagaaaactgagctactccagaaaattccgagccttaatattgcagactgccaaaactcaactttaatcactttatcatttgagttaaaagttttcatgttttcagcaaacagtactatcctcatatgtggaacatggagtgttaattgttttatctattttaactatgaacttcactagttggagtctttatgtttttaaaagtatgcagctgaatctatttgaccaacgtattagtcaaacttctattttaatactgtaaataaaatacacgattttaaaaattttcactatatatatttcttccatttatstcatatgtaagttaaaagcttaraaaaatatttttaaaaataattcaccataaatatttgcatacatgctgactccattctccccacaaaagtgtcacaaaagccacaagtcatttctgttctttttaaaatcaagaatcttggcattatggaanaatatatatagttttattcattacagttcaatccagtagcagcctcaaggattttaaataatcccctaaaaatttcctggtcatgccagaagatgtggtcctaaaaagatgctaaggagcttaggcaatagaaggtgatcctcttcccaaattggggagaaatctgtatcatggcaaggaccatttaaacaattattaacccaggtttttaaaagttactcaaatgatatttttcacattattattcaacatcatttggtctctaaaataaataattatattagtcacacagaaattaagtttaaaaaagatgagaagtttaaaagttggatctgaataaggctttttattactggcattcatcattcccatccccatcctgcccttgacgttcagatgcttagaacaatttaataagtgtgaatatacttttttttcctatttcaagctcacttcatatttgaaatcctcaattattcctgttcaccagagatttagcatcggagtctccccagtttagggaaccacttctatgtacccattagaaaggaaaggaaagtatgtgtatctagagctaaatgaaaagagcagaccctcctgagacgagaaaatttaatttaaaaatggtttagatacgtaatcatttaagctaccagaggttgtggttttatcaaatatttacatacattatacatttagcagggcaattccctgtgaaagtaattttatttctctacgttctggaaaaattttcaatctacaatctactaagtgttgaaaataactgagtcatttggtttatagcttccttttctgcctctttctgagcatcctgaaaccatggtttccagatacaaaaaacaacctaatacaaactattccctgacatatgacttgccctgtaggccaaagtaggtctgtttgtattatgttcaacactgacaagaaataattttctgatgaagtattttgttcaacacagtcaatatgtactactccagtagcatataatcttgttctccaggacagagctatctgatctctgatggtatatttaccttttacccttcctttaaggatgagtgataagtactgcttaagaatctaaagcactctgctagccagaaagactaacattatgggaagacaattgtggtaaataaaaaaatcattcacaattaaggtctagtctacagatgtaacaattaaggtctagtctacagatgtaacaatttaggatgatgtaattgtttctattttttttttaacatgagtaggggaagaggagggacaagagggaaaaaatattaagtatttcaggaagtattttccaatacttgagttaaaacaaaccccaatgtcgtaaagaaatcagttttataatacatgatataaacagtatgttttctattaaaaagataaagaggaaagtgacatgaaaaacatggtctatcagaaaaaaaattgacaaattgacctcaccaaaatttgacatttttatatttcctaatataccagtaagaaaacaaaaagacaagcaacagactgaagtatttgcaaatacatgtctgatgtgacttgtatccagaatatacaacaagttcgtacaaatccaaagaaaataacccaatatgaaaatgtgctaaagtttgaatagatatttcactaaagaataaatgaatagataacaatacacaaaataagctcaacattagcagtcattaggaaaatgcaaattaaaacctcatgagatatcatttcacaccagctaaaggtaagacagtaacaaaggagatgtagagaaacaggaatccttgtacactgccggtgggaatgcaaaacagtacagctacttttagaaaaacatttttgcatttcttaaaaagttaaatataagcttaccataagattcagcaattctactcctaggtatctatctatccaagagaaatgaaaacatatgtctacccaaacacttgcaaacaaatgttcacagcagcactattcacaatagaccaaaattggaaacaatgtctatcaaatggtaaatgaatagacataatatggtacagtcatacagtggaatcctacttgaaataaaaaggaagaaactactgatatatatacgtcataaacctcaaaaacattatgctgagtgaaagaagccagatacaagagacgacataccatatgactccatttatgtgacatttccagaaaatacaaatatatagactctgtcaattagtggttgcctgggaactgggagagggaatgggattaatgttaaatagatgcagaaatctttctgaggtaatgaaaatgtcctaaagctgattcatggtgagggttacacaacttgctacatttactaaacattactgaattgtacacttgaaatgggtgaattttataatatataaaataagactcaatatacttgtttttaaaaaaatttttttaaaaatccacacacagactgctgctttagaaaaaaaaacaaaaaaaaaagttctggccagtttgggtactcatcttaggtttatatactcaataaaatgaaacattttaaataaattatctatttgttgtagttattaggttttattaagcaacactaaaatagataattcagacaaagatcttgttatgtttcctaggactgctatttctataccaaagaaaagagaaaatccttctgcaragacaacaggcctacatacatataattttttttttttttttgagacagcgtctcactctgtatcccaggctggagtgcactggtgcaatcttggctcactgcaacctccgcctcccaggttcaagcaattcatgtgcctcagtctcctgagcagctgggattacaggtgcacgctaccatgcacaggtaattttttttttttttttttgataaggagtcccgccttgttgcccaggctggagtgcagtggcacgatctcagctcactgcaacctccacctcccgggttcaagggattctctgtgcctcagcctcccgagtagctgggattacaggcccctgccaccacgcccagctaagtttttgtatttttagtagagacggagtttcaccatgttggccaggctggtcttgaactcctgacctcgtgattcgtctgcctcagcctctcaacgtgctgggattacaggtgtcagccactgcacctggccaatttttgtatttttagtagagacggggtttcaccatgttgttcaggctggtctcgaactcctgacctcaagtgatccacccaccttgtcctcccaaagtgctgagattacaggtgtaagccactgtgccctgccacattttatatattttaaaaactggtatgatttacatatatagagtatataaatctttggtgtatagcttaattatttttatacatgtgagagtcttcaaaaagttcattgaaatgcatcttatgaaaaaactatggatgaatttcaaaaattttttgcatcaaaataaattcatactaacttattataagatgtctgaacaggatatagtttgaggcattaagaacaagacattagtgtgaaaaaagccctcatcagagcaacatgaattctgctaaaattgaagcaaggataaacagcaaagttatggtgaagcctgggtggaagaatagtaaaatcactgatttttacaaaacatttatggagactgttattagtccattttcacactgctaataaagacgtaccctagactgggtaatttacacaggagaagaggtttaatgtactcacagttccacatggctgggggcctcacaatcatggcagaaggcaaggaggagcaagtcacctcttacatgacatactcccctttataaaaccatgagaaatcaagagatttattcgctatcatgagaacagcacaggaaagacctgcctccatgattcaattacctcccactgggtccctcccacaacacttgggaattgtgggagctatgattcaaaatgagttttgggtggggacacagccaaatcatatcagagacaatacgctaaagaaatcggcggtttacaaatggataacttgttttaagaagggatgagacagtgttgaagcctgcagtggcagaccatccacaaaaattcatcttgtttgtatcccaattgaaaaggacaaatgataacagcacaaacaagagccaacatgacagatgtctcaatgggttctgctttcacaattatgactgaaaaattaaaatgggggcaaactttccactaaatgggtgccaaaaccattgtccccagatcagctgcagaaaagagaaatgctttcaatgaaaatttaaaacaaaatgagtaggattcggatcctggagcatttctttgaagaatggtaatgggatgaaacatggctttaccagtacaatcctgaagacaaagcacaaccaaagcaagggctaccaagaggtggaaatagtccagtcacagcaaaagtggactagtcaagagcaagcatcatggcaacagttttctggggtgatcaagacattttgcttgttgactttctggaggaccaaaaatgacccgcctgcttactatgaaagtgttttgagcaagccaaagcttgagcagaaaaacacctaggaaagctccaccagagaatccttttccaccacaatgatactcctgctcattcctctcatcaaacaaaggcaattttgcaagtttagatgggaaatccatcttacagtcttgatttggctytgacttttttgtttcttaatattaaaatctgtaaaaggcatgcatttttcttcagtttataatgtaaaaaagacttaattgacatggttaaattcccaggacactcagttctttagggatgaactaaatggctggtatcatcacttacaaaggtgtcttgaacttgatggaacttatgttgagaaataaagtttatattttttatttgtatcttttaagtatgttttccatggactttttgaagtcttctcatgagtataaatccatgtaactaccatccagaccaagatacagaaagctcccttagtcaataatcctaccaaaggtaaccattactttagttctataattatagaagtgtgatcattttgtttctatgaactttatatcaatgtacatactttatacagaaggcactcttttgagtcttcttttgttcaatatcacatctgtgaaatatattcacgatgttgtaacagtagtgtgttctttttcattgctgcatacaatttatcagttccactgttgatggacatgtgaatggttttcagtttttagatattatgaataaaactgataaaactttattttatctgtcttctcataaacaaaagcactcatttctcatggacattctattcagaaatggaattgtgaggttttagataacatgcatatatagctttatatacctttaatacatcttgtcaaacaactttacaaaatggagtaccaacttattaacatactcccaccatcaatgtataatttcaattgcagcatttccttgtgttgcttgccattgccatttcttttaattttgtgggtttgggtatagcgatatctcactgtcaagaattgtgaagaatctgtaaactaacaagcttggatgctggaaaaagatatgaaactttgggtcggagatcaaagacagttttttactcagagcaatagcagtagccagaggatcaacattgtgccactttcctgagccctaattcccacagggcacctgtacttgtagatggtcgcagtataacagaggcaatctatgcctacagattagtttgcattttctaggattttatacaaatggaatcatatagcatatatttttttaatctggcttctttcaaatagaataattattttgagattcatgtatgttgctgtggtatccataattcatttccctctgtagctgagtagaatttcactgtatggatacacaattgtttatccattcacctgttgatgggcatctgggatgctcagttactggctactacaaataaaactgtgatgattatgtatatatttttaagaacatatgctttcatttcttttgaatgaatcccactcatttttgacctcatatctctcttacatatattataattaaatgcaatcatcccttggtatctgcagggaattagctccagaacccctggagctatctgcaataggataccgcaatctgcaaatgctcaagtcccttttagttggccatccatatccatggatatggaaccacagatacagaggatcatgtataggtatatatgattatatatcacatacagatattataatgttttatatatatagatatattttaaagaatcagaaatattaacctttggagagagatattaggtgtagagaggagagtggcttttacttttccttctgtattttttgtttacaatagtattagcctcacagacactgagaggaaaagcttatcgggcttttataggagtacaggagtcttagacatctcataagctcacagttagcatttttttgggtaaaataatgaatctcaagagatatgtctgtttaagaagagcaaagtaattctacattcttttcaataaactaaaaagaagtcaagagaaaatgagaacgaatatattaagagacttctccaccaccaaaatgaaaattcctaagtttggaaatgagggctctagactcaagcaggtgaccaatttactattaggcactgtctatgcaccacactgatgatgagtctagctaaatgcatattacaaaaacttaaaacttaagggtcaatttcagcttttttgtctctttcaaatccgtttagtgtctttgctatcttgtatcagtatagctgagtaacaatgtcctctcayggaatttttacacatttctgatgctctatgtaattcatgaagtcatgtgaaacacatcatgaaactttcataaagtctaaaacagtttctgtccctatgcacagctaacactgtatatgacctgtatagccgagatgcatcgccgaggggtgacttgaatccaacgccagggtaagattttagaatgaacgttgggattgccctttttatacaggctttgtaggccactacaatgttaactgtatagcttatgatctctgttccaacaactgaactctgttgtggtagagcaaagtagccataaataaataaatgagtgtggttttgctgctatgaaactttatttacaaaaatagagtgtgccaaacttggcccatgggccctggtttgctgactgctctcttagagaaacagaaatctcttaaaatctccatttttttccccaataccattacactgctaattgaataagggcttctgattaaccactgaaaaatatatattgccagttgttagcaaatagtgataaatgctgtttatacattccattattaaagagaactacagtttataattttggaagaaaagaaattgtgagatactagtaagtccaaaactgttttgtaactggctcatactaccatctcatatagagcttactttctgtaaataagcccccaccccacctttttctgggtaatctctcctatgagaagactatattctatagtaagatgaagaaaattatcattagatttactaactacattgttatttttgtttaaagctgatatcacagattggttggttcatgcatatattcattcattagttcactcactatggaacctctactggagtcttctcagttgctaatgtcaaaaagtttagattgtgacagtcagaccaacacatatacacaatagctgcacataacacaaagtagactgttgccaacacaaaaagagaatgctttctagaagaagaagcaattacttgtggctgggagatgactggagaaagtttcatgaaggaggaagtatttgagttcagcctgggaaggtggctaggaattagatggagatagtttggtagttgcctcaaagcttattactgtctrgtggttagtttcatgtggtcctgatggctttctgagaccaacagcaaaacattaaattaaccagcttgcttgttccattctctcttcccatagtctgttcagttctggcactgctctgaaggtacaggatacaactagagagggagcacttggctaatagggaagtacaacagttctgggatacacttggggctaagggaagcctgaggaagagctgagtcgcttttaaacaaatgagaaggtccttgattaacacagtgaaaaaaggttctaagggatacacataaaatataatggggagtaagtaggaagaagacagtaatacacaatgttgatgttaagtagtgaccaagactcatagccctgaattaacattgttcattcagactgactacatagttccactcattgagacaaagcttctttgtcttctactaagtgttcagtgcctttctcaaataatagaaccagaattttcttagaaatcattgtagcttagttaggaagtaagttgggacatactattatggttggtagttacattcctctatttatatacgagcaaggatttacatgcttcttttcggaaaagactcaggcttgcctggaacttttcataatgtacagttgatatggtttggatctgtgtccctgcccaaatctcatgctgaattgtaatccccattgttgaaggtgactggatcatggggcagacttcccccttgctgttcttgtaatatgagagttctccagagaatgggtcatttaaaagtgtgtgcaacctcctcctcctcctgctcttcctcctgctttggtcatgtgaggtgcttgttccccctgtgccttttgccatgattgaatgctctctgaggcctcctcagaagccaagcagaagctgctatgcttcctgtacagcctgcagaaccatgagccaattcaacctcttttctttataaattacttagtttcaggtatttctttatagcagtataagaatagactaaaacaacagcattctaggattctaatatgacatggtagttggggattgacatagttagaaggtcctaggataaaaaatttcctgtcactatataaaagtgaataatctttaacaattaatattaaaatcttccatagttacttatctttcagatgagccatttcccctataatcacacctgatgacagatgctgatggtctcccagagaacaaagaacacgtaggaaagggaactgggaatggcaagaagcattacactatcagctacataaggagtaattatcagtgagataatctatccaggtcttcatgaggaaagtaagagaagcaaacataactttgattttatagtctggacaaagtccagatgatgacatattttgaaaagtcagaacattcaactattcttcaaaagtcccaggtttgaattattaaacagcaatttagctgtagtaaaaataccccttgacatcaattttgaggagagtaggtgctaaggaatgatgactccgtatttcaaccacttaaccctcagtatcatttctttcttttttttttttttttagagacaaggtctcactatgttgcgcaggctggtcttaaactcttggcctcaaggaatcctcctgcctcagcatcccaaattgctgcaactacaggcatgagccaccatgctatatcatttctgatatggtttggctctgtgtccccacccaaatcttatctcgaattgtaatccccaagtgtcagggacctggtgggaggtgattggatcatgggggtggttctctcatgctattctcgtgatagtgaggtagttctcattagatccgatggtttaaaactggtagttcccctgtgtgcttgctctctctcctgctgccttgtgaagcaggtacttgttcctcctttgccttctgccatgattataagtttcccaaggcttccccagctgtgtggaactgtgagccaattaaacctcttttgtttataaattatccagtctcaggtagtatctttatagcagtgtgaaaacggactaatacaattttttttaaccgagtttgctagtggtgttgcagaattattctttagaaatgtagccacctggtgattcktccatgaaatgatagccaggatattgtgaaaatactgaaactcacgggatgaggaaaagctgaattcttgtctgccttccacttttacaaactatggatgatgatttctgataatacaaattacactgagatatgccaattttagtaatgttttttaaaactaagattttaagaaaagaactaaaacctcaaactaaaattctttcaaagacttctcattgagagaaaagacttttagttgtttgatgatatattttataggctgtttctgaatttctatgtgtttttgtacattttgggagcagaactaagcaatcactcgaggaagatgaaccttctcccagattcaaataatatatacatgtatattacccaaacacaaaagaacagcttagtcagaaaagatgaatggaaaatttaaatactgtcagagcaggatttattttcatttcaatatatactggagtaaaatgattatttaacaacagcaacaacaacaacaacaacaaaaacttacctgctactgaatttggccgtggcatgagatacaaaggaatagactgtactgattgagataacactgtttccaaatttctctctgggatcttattcagactataggtggaagcagtcatgttttcatctactcgatacaaacaggagtccatgctggatttttgagaytgccaaggttttatgtttcctccagatcctaattctttactgctttccccagcatattttgtgcgttccacattttcagaatagcttgttaatgtagctgaaaaaaaaagagtaaaatgaatttaataaagccacatacatacagttattaatctttgacaaagttgataaaaacacacattggggaaaggacaccattttcaaaaaatggtgctagaaaaactggattgccatatgcaggggaatgaaactggacccctatctctcaccatatgcaaaaatcaactcaagatacactaaagacttaatcctaagactagaaactaaaaatactacaagaaaacctacagaaaacttttctggacattggtttaggtaaagaaattatgactaagacttcaaaagcacaggcaacaaaaacaaaaayaggcaaatgcaactaaaactaaaaagcttctgcacagccaaagaaataatcagcagagtgaaaagaacctgcagaatgggagaaaatatatgcaaactatacatctgacaggactaacattaagaatatacaaggaactcaaacaactcaacaaaaacttcacaaataatcccattaaaaagtaagcaaaggacataaacagaaattttccaaaaggagacatacaaatggccatgtacatgaaaaaaatctcaatattagtaatcatcagagaaatgcaacttaaaaccaccgtcttataccagtcagaatggctactattaaaaaatcaaaaaataacagacggtgaggatgcagagaatgctcatatacaccgttaacgggaatataaattacaacaaccattaaggaaaatacagagatttctcaaagaactaaaaatagaactaccattcaatccagcaattccaccactgggtaactacccaaaggaaaagaaatccatatgtcaaaaagatatctgcacttgcatgtttaccacagcactatttacaatagcaaagatatggaatcaacctaaatgtccatcaacagatgaatggataaagaaatgtggtatatacacacaatggaatattattcagccataaagagaatgaaatgtcttttgcagcaacatggatggaactagaaatcttaaacaaaacaagttagacgcagaaacacaaatattccatgttctcactcacaggtgggtgctaaaaaaaatgtgcacatattgaagtagaaaatggaatgacggacaatggagcctctgaagggttacaaggtgggggaaaggtggatgatgagaaattacttagtgggttcaatgtacattatttgggtgatgaatatcctaaaaaactcagacttcaccactacgcaatttatgcatgtaacaaaactgccttgtacttcattgatttataaaatttaaacagtgaatttaaaagaaaatctaaagtagagattaatctgtttatgattacgtaaattcatgattagataataagaatatttagtaacattatttttaaaagttactgatgatcatttcacttctttcatgaagtttacataactgaaaccaaaatacagtcatctctcacatatttcaacaactctatttaaataaactaaaaaaattcatgtatcagtcctagagaaactacagctcaggtctattagtggtaaaattttcagaatttcatcaaaagggaatttatataatcttcaaggactgctggagagcctcagcggtccctaaaagatctctatattctttttattctgttcttttcctcatttaaatttatttccttgcttctaatatgtaacaaagaattagaataaaataagcagtccctaagcaggaactaatagaagagacagaacctgcccaaataagtaagcaataacaggccctacttgtacagatctctgtagctctaactttatggatttaagtaccttaataaaataaactgaaaggtctcttgaattttatatagtcttactactaattatacacaaatagaaaaattttaattaatgctagaaatgaaaggattaaaaacattaacatctagattataattttttagcaataattataaaacaagaataaaagatatcatcccagaggagtttttatatgttagttcattttctcttcttatattttgaatgtacctattgccaaaagaagagacctaagctcatgaggtaatttccacaatcgtttttagtgaggttctctctctgcaaatttaaatggagttctggattttctaataacacgggaagaagatgaattataaaggatgacctaaatttctctctaagaaagaaaatctgactttgttgtcacaaaaagtaaaaggctaaggaagaagaaatctaagtaaactagaaaaaggtagagaagtgggaagagggaaaattttataaacttaagaattaaaagagagatgagggtatgtgcttttgggctccacctgagaaaggaaatcagaaatatcacagaaccctttggaaaccttatgagattttggaagataagttcccgtatttattatactctatttcccctttagtgattagttgtaaaatcttaaaaaatagacaacctatgctcattttggaaagacagctaacaaaaagaaagcagagaaaattatattcctacattttggctggtctttggggacaaaaaaccaaggatagtatgtggtagcaaatctggaaaacagtttctgaaactcagaaaatctttccaaaggaagaacatggaaaacaaataaagaattgaaaagtaactccaggggcctaacaactcaaaggccaaagtgatttttttgataactggtaaaaaaaaaatcacctcagaaaaagctcatatacattttaagcaagatattctttcttctgtattagatcataagctttaatactagtaatcataataaattcatacttatcaccttataacctttaaattgtacmatgagatacagtaactcattcaattatcaacagaacactctaagcgggactgatattactatcttcattatgcagatgaggaaaccaaaccaatgtgcagattaggcatcttgcccacttatatagctaacaagtagtctcacaggcaactaattacttggaatcttaatcatttactatcttatgttgttccttaactcttttgtagatgtaccttgcctcctttactacactgtacatttctggagagtagaaactatattttaagggttttttcatatttaaattaaaaaaaaaacttttagcacccagctctgtaatgcccacatgatgataggagagataaaacaaaggaaagcacagaggctaaagccctgctgttctctacaaaagtcataggaaaatagcatgcagtgaacattcaggagaccctcagcacagaaggacactgcagacattaacaatgaaatatcagaacgaaaataatcggcctcattcttcagggcattttttwctactacttacattaaaaatattgttaccaatgatatgagtgtatatgttatctgggaaattatttaagccaagaaactgcctacttttagggaaaaaatgtaatgagaggacatagtatttaaagacacataagctaagctctgaagaatggattcagtattggtgaagtgtttatgtctgctaggaatatagtactgtactcttaatgtggaaaaggctttatatttgtggtaggggaataggtgcaagagatcaatcaggctttctataatattttaggatactgtgaaacaattaaataggtactgaactattagctcttgagaagactgcatcttcaataatggtcaaggacttcaataaaagtccttgcaatacctacccaactcccagtcattccagataacaacttcacattcacctaaatttggtcttttatctttacttaatttactttattttactttacctgttggaaaaagaggtttgctttatgagaaaggagacagaaatctaacccagacttgagggctagagaatactcttgtcgaccaagttgagttggtcaggtaaagacgaaaaaacaatggtttatccaaagacaaaaacattcacaagggcacagcaaagttcgtaagaattaagtaaattcaatagactaaaactttggaggtgggttggggccagtggtgtgctggtacaagtttaacatcttggctctctaaaaaacaacaacaggccggaggggccaagatggctgacgagaaatatatgcgtttggaggctctcacacagaagaatgaaaatggtgagtgaatcctgcactggcaactgaggtatccaggttctcttattgggactgactaggcagttggcgtgagccatggagagcaaggaaaaagcagggtggagccatggcccactcaggagccacacagggcaaggggagctcccacccccagccaagggaggtggtagtgagtgattgtgttaccctgcccaagaatccacgatccacggtttttccatggatctgtgcaacccacagatcaggagatccccctcgtgggcccacacacaccaccagggtttgggtcccaagcacagagctgtgcagattctcggcggcctcttggctggaaactgcctaagactacggcggcctcttggctggaaactgcctaagactaccgagttcccagggggaggggtggccatcatgactgtggctgcctcctacctaagatgactgagctcctgggaagaggggcagcagccatcactgcagctccagtctgctgtttttcccctactggtgccagggagactgggcggtttagacccaggaagaattccccacagtgcagcacagcaactgtggcagattgtggccagactgcctttttagaccagaccctgacccatccctcctcactggctggggctcccctgtgggaatttcagtaactccagccagaggtttacgaacagaactctgatctccccagaaggagaggcagccgcagttgcagccgcagtctcggttgatcagcggacttagtctttcccgctgctggctctgaggaatccgggtagtccagacaagtgggattccccccagtgcagtgcaccccctctgcccaaggggcagccagagtgctttgttaaccaggtccctgatcccctgcctcctgactgggtgagaacccccaacaggggtcgccagacaccttatacaggagggttcccgctgacatcgggtcagtgcccctctgggatggagctcctagaggaagaagcaggcagccatctttgctgttctgcagcctccactggtgacacctccagttgtaggagggacccaggtgaacaggatgggatggacccccagcaaactgcagcagccctatggaaggagactgttaaaagaaaaacaaataacagaaagcaacaacaacagcattagcaaaaaatgtccccacaaaaaccccatccaaaggtcagcagcctcaaagattgaagctagacgaactcacgaagatgagaaagaatcaatgaaaaaattctgaaaactgaaaaagccagagtgctcttctccttcaaatgattgcaacacctctccagcaaagggcacagaattgggcagaggctgagatggatgaattgacagaagtagacttcagaaggtgggtaataacttcacagagctgaaggagcatgttctaacccaatgcaaagaagctgagaaccatgataaaacattacaggagctgttaaccagaataaccagttgagacaggaccataaatgacctgatagagctgaaaagcacaaaacaagaacttcacaatgtaactacaagtatcaacaaccaagtagacaaagtggaggaaagaatttcagagcctgaagactaacttgctgaaataagacaggcagaaaagattagagaaaagaagatgaaaaggaatgaacaaaatctccaggaactatgggattatgtaaaaagaccaaacctatgactgactagggtacctgagacagggagaatggaaccaagttggaaaacatacttcaggatatcatccaggagaacttccccaacctaacaagacaagctaacattcaaattcagtaaatacagagaaccacagtaagatactccatgagaagatcaacccaaagacacataataatcagattccccaaggtcaaaatgaagtaaaatacattaagggcagccagagagaaaggccaggccacctataaagggaaacccatcagactaaccgtggacttctcagcagaaatcctacaaaccaaaagagattcgggaccaatattcaacattcttaaagaaaagaatttccaatccagaagttcatatgtggccaaactaagcttcataagcgaaggagaaataaaatccttttcagacaagcaaatgctgcaggaatttgtcaccaccaggcctgccttgcaagagctcctgaaggaagcactaaatatgggaaggaaaaaaatgttaccagtcactataaaaacacactgaagtacaaagactaatagtaccatgaagcaactacatcaacaagcctgcaaaataaccagctagcatcatgatgacaggatcaaattcacacacagcaatattaaccttaaatgtaaatggactaaatggcccaattaaaagacagagtggcaagctgggtaaagaccccttggtatgctgtattcaagagacccatctcaaatgcaaagacacacataggctcaaaataaagggatggagggaaacttaccaagcaaatggaaagcagaaaaaagcaggggttgcaatcctagtctctgacaaaacagactttaaaccaacaaagatttaaaaaaagacaaagaagggcattacataatagtaaaggggacaattcaacagtaagagctaactatactaaatatatatgcacccaatacaggagcacccagattcataaaacaagttcttagagacctacaaagagacttagactcctacacaataatagtgggagactttaacacccaatgtcaatattagacagataatcaagacagaaaattaacagatattcaagactggaactcagctctggataaagtggatctgatagatagctacagaactctccacccaaaaacaacagaatatacattcttcttggcaccacctggcacttactgtaaaattgatcacataaatggaagtcaaacactcctcaggaaatgcaaaagagctgaaatcataacaaacagcacaaccaaattagaactcaagattaagaaactcactccaaaccacacaactacatggaaattgaacaacctgctcctgaatgactcctgggtaaataaagaaattaagacagaaatcaagaagctatttgaaaccaatgataacaaacaggcaatgtaccagaatctctgggacacagctaaagcagtgtttggagggaaatttacagcactaaatgcccacatcgaaagctagaaagatctcaaatcgataccctaacatcacaactaaaagaactagagaaccaagagcaaagaaaccccaaagctaccagaagacaagaaataaccaagattacagcagaactgagggagacagagacacaaaaaacccttcaaaaaaaatcaacaaatccaggagctgtttttttgaaaaaaattaataaaatggatggactgctaactggactaataaagaagagagaagaatcaaatagacacaataaaaaatgataaaagggatatcaccactgaccccacagaaatacaaacaactgggccaggtacggtggctcacaccagtaatcccatcactttgggargttgaggtgaaaggatcacttaaggtcaggagtttgagaccaggctggccaacatggcaaaatccagtctctgctaaaaatacaaaaaaattagctgggcatggtgggacacacctgtaatcccagctactcaggaggctgaggcatgaaaatcgcttgaggctgagacatgaaaatcacttcaacccagagggcagaggttgtagtgagctgagatcacaccaatacactccagcctgggcaacagagtgagattctttctcaaaaaaaaaaaaaaaaatacaaacaatcattagagaatactataaagacctctatgcaaataaactagaaaatctagaaaaaatggataaattcctggacacatacaccctcccaagactgaaccaggaagatgttgaatccctgaatagaccrataacaagttctgaaattgaggcagtaataaatagcctatagtaataaatagcctaccaaccaaaaaaaaaaaaaaaacccaggaccagacrgatttatagctgaattctatcagaggtataaagagttgctggtactgtttgttctgaaactattccaaacaactgaaaagaagggactcctccctaactcattttatgaggccagcatcattctgataccacaacctggcagggatacaacaaaaaagaaaacttcagcccaatatccctgatgcatattgacggaaaaatcctcaaaaaatactggcaaaccaatccagcagcacatcaaaaaacttagctacgatcaagttggcttcatccctggggtgcaaggctggttcaacatacacaaatccataaacgtaattcatcacacaaagagaaggaaagacaaaaaccacatgatcatttcaatagacgtagaaaaggccttccataaaattcaacatcccttcatgtwgaaaactctcgataaactagctattgatggaacatatctcaaaatagtaagaaccatttatgcaaacccatggccaatatcataatgaatggggaagagctggaagcattttccttgaaaaccggcacaagacaaggatgccctctctcactactcctattcaacatagtattggaagctctggccagggcaatcaggcaagagaaagaaataaagcatattcaaataggaagagaggaagtcaaactgtctgtgtgcaaatgacatgatcctatatctagaaaatcccattatctcagccccaaagcttcttaagctgataaacaacttcagcaaggtctcaggatataaaatcaatgtgcaaaaatcacaagcagtcctacacactaacaacagacaagcagagagccaaatcatgaataaactcccattcaaaattgctacaaagagaataaaatacctaggaacaccgctaacaagaggagtgaaggacctcttcaaggagaactacaaaccactgctcaaggaaatgagagaagacacaaacaaatggaaaaacattccatgctcatggataggaagaatcaacattgtgaaaatagccatactgcccaaagtaatttatagattcaaacccattcccattaaactatcactgacattcttcaaagaattagaaaaaactactttaaaattcatatggaaccaacaaagagcccgtatagccaaggcaatcctaagcaaaaggaacaaagctggaggcatcatgctacctgacttcaaactatagtagacggctacagtaaccaaaacagcatggtactagtacaaaaacagacacatagaccatggaacagaatagagatctcacaaatgaagaccacacatctacaatcatctgatttttgacaaacctaacaaaaacaagtaatggggaaaggctttcctacttaataaatggtgctggggctgggcatggtggctcacacctgtaatcctagcactttgggaggctgaggcaggaggatcacttgaggtcaggagtttgagaccagcctggccaacacagtgaaacccgtctctactaaaaatacaaaaattagctgggcatggtggtgcacacttgtaatcccagctacctggaaggctgaggcaggagcatcgcttgaatccaggaggcggaggttgccgtgagccgagattgcagcactgcactccggcctgggtgacagaacaaaactctgtctcaaaaaaaataaataaatgaaaaataaataaataaatggtgctgggagaattggctagccatatgcagaaaactaaaactggaccccttccttataccttatacaaaaattaacaagatgaattaaagacttaaatgtaaaacccaaaacaataaaaaccctagaataaaatctaggcaataccattcaagacataggcatgggtaaagatttcatgatgaaaacatcaaaagcaattgcaataaaagccaaaattaacaaatggcatctaattaaactaaagagcttttgcacagcgaaagaaactatcatcagagtgaactgacaacctatagaatgggagaaagtttttgtaatctatccatctgaaaaaagatctaatgtccagaatctacaaggaacttaagcaaatttacaaaaaataaaacaaaaacaaacaatcctattaaaaactgggcaaaggacataaacagacacttctcaaaagaagacatttatgcagccaacgtatgaaaaaagctcaacatcattgatcattagagaaatgcaaatcaaaaccacaatgagataccatctcatgccagtctgaatggtgattattaaaaagtcaagaaacaacagacactggcaaggctgtgcagaaacaggaatacttttacactattggtgggaatgtaaattagttcaaccattgtggaagacagtgtggcaattcctcaaagacctagaactggaaatactatttggcccagcaatcctattactgggtatatacccaaaggaatataaattattatattataaagatacatacacacatatgttcattgcagcactattcacaatagcaaagatatggaataaacccaaacacccataaatgatagactagataaagaaaatgtggtacatatacaccatggaatactatgcagccataaaaaggaatgacatcatgtcatttgtagggacatggatgcagctcaaagccattatcctaagcaaactaacacaggaatagaaaaccaaacattgcatgttctcacttataagtgggagtggaacaatgagaacatatggacacaaggaggggaacaccaccactggggcctgtcagggaaggtgaggggaggaagagaatcaggataaatagctaatgcatgcagggcttaatacctaggtgacgggttgataggtggagcaaattgctaccacacatttccctacgtaaaaaacctgcacatcctgcatgtgtatcctggaaatttttaaaaaattaaattaaaaaataaaagacaaaaacaaaacaaaattctgatttgcagtgtttgctgatctccgtggtataaatgtacactcaagctacctatgacttaactggctcacaaaattaccaaaatcttaaaaactgaatcttgcaggtgctagctggccacagcacaccactggctagaatgacagagaggagacagagtccagatcagactagaactcgtaagccatattaaagggattagattttatcccggtttctcctaagggcaaccgaggcacatgattaaaggcttttgagggacataattaaacttacattttggaaagattactttggttctagtgagtagaatacattacagtaaggtgttgccacagaccccctatggtgtctggtgatgcctaaaaagactctttccataatatttctaaatgcatgaaataaaatgcaaaaacaggagaaatcaattattttgaaaaacagtaatcaaaataataaaaaatagatttgtgacacagtaatttgtgagtttcattaacattaagtgataagatctagtgcaagtctactatattttcaaggtggtgacaagtgtgatattttatgatacctacaagtaacatgaaaatatctgaggtatttattggtgacaaagtcacaaaaacttctagtgcttctgtggtttgttacctacattcaaaatagaagttctaaatttcaattagaaatcaaaaaatgaaaacgtaatctttttttacaatccaaattcatgatctcctgtgtcagaggattacctgattgaaggcaaacagaaaagttaggttttatagcaatccgagttagaaatattgacctgtattaagaaatgacaaaggagatgaaaaataatgaatggacttgataatttgattagatgtaaagaatgaggtaaaaatgcagtcatgaataatatcctggtttctggctggggcaaatggctagatggtggtaccatctacttagggaatacaggaagagaagcaggattaagaggaacataaatttagctcaggaatatgtagaatttgaagtgtctatggggcattcaaataaagatgtacagtagacagtgagataattaaactgaagctcaggagaatagagagtcagatgtcaaagttattaaccttaggagctgactattgtctcttaagaagtttgtagagtgaggggagaggaaggcctaaaatgacacccgttgaaacacaattaggcaaagcaagaagagcctgcaaaggagtctaagaaagaacaaccagaaagaagaggaaaacaaggagactgtgggcaagtcaggcaagagagagtttcaaaaagtaaacatgcgtcagaaaacattaactgtaataagaactaacaatcattattggctcgatctatatggaggtgatctagataataccttgggtgagtagtataggcagaaactggaatgtcaatggttccaaagtgagagggagatgaaattaagaaaaggtgagaacaattctttcaatgggtctgtgaagggtagagggagatagaagatgcaaaaagacttgatcatgtttaaatcctaattaaaatggaataaaataggcagaaaaaaagatataggagacaaaggagatctatatgaggatggttccttcaaacctggatatgatgatggcctataggaaatcagcctgagatgatcagctagaacttcctgggcatagtactgacaaatgagtcagaagattcatggtggtggagattagaagggactaccacataagaccaataataccatgacctctctccactccctggaggcctaatggacactcctttcactaaggcaatgagaaatgtactggtggcagtggtggggaacactgacatctttgaaaagcctgaaggtgaccatcctctctaagtgcagttaatagggagatgttatcatagaactggggtctctaatatcagtgaggatacagaggccagttggcagcacgtatttctcagatgcaaggaggatatattattgtaaagatcagcaaggctgggacgggtgtggtggctcacgcctgtaatcccagcactttgggtggatcacctgaagtcaggagtttgagaccaccgtggccaacacggtgaaacctcgtctctcctaaaaatgcaaaaattagctgggcgtggtggtgcgcccctgtaattccagctacttgggagacggaggtggaagaactgcttgaatctgggaggcggaggctgcagtgagccaagatcacaccactgcaccccagcctgggcgacacagggagaccccgtctcaaaaaaaaaaaaaaaaaaatcagcaagtctgggagagcaaccagggtgctttgactaaaagcatcagtggtgatggttaacagatgacaatgtttctagtggcaagatggttgaacagattaggatgctgcttactttattttttaaaaagaggctaacatcaggcatagtggaaaatggcagtcccttaggtttcagatctaaattagttcacagaccagaattcactggtctaggattgaaaaggaagttggagctctttgggcaagggctttgcaatgccactgtagtaaaatattcctctgattctcacccaaagaaaattgtggctatgtgttaggttaactatgtatgtgtgcttgaggtaaaatacacataacataaagctacccactttaaagttgaggtaggagatcagyacccacctgtaatgaacctgatgattaaacacaggatgcagtaaagaaaatggcccaaatcagaagagggtgacgaagatgacctctgcttgccctcactgctygttattaaagacactccactgccgccatgacagtttacaaatgccatggcaacgcactagggcaatgacctgaaagttaccttctatggtttcaggaactccttgccccttttctagaaaagtcttaacactctgtcccttaaatatatatatatatatacactatatataaaataattaagagtgggtacagatatagctaaccagcaatgtacactgcagctgtgtctgctgttgctcctgcttcggactgctactgttgccatacactgctgctgtgctcctccgggctgctctgcctgtggagcagccactttgctgtactctgctcctctgggctcctctgcctatgggatagccctgctctctctatggagcaaccattttgctatatactattgctctaataaacctgctttctttcactgtcggctcactcttgaactctttcttgagagaagccaagaaccttcttgggctaagctctaattttggggtgcacctgcatcaaagtgaacaaattcaatggcatctagtacattcccaatgttgtgcaaccatcacctctattcagctccaaaagaaaacttcatacccattaagcagttactatcatgcccaccccctcaaatcaaccactagtctgcattttgtctctataaatttacatattctaaatatctactaagaagggaatacataatatttggccttttgtgtctggcttctttcacttagcatgtttctgagattcgccaatgttgcagtagcatgtatcartgtgtcataccttttcatcactgagtaagtttccattgtgtatatgccacatgtgtttatccattcatctgtgggtgggcatttggattgttgccaccttttggctactgtgaatactgctgctgggaacattcatgtagtatctgtttgactacctgttttcaattcatttgggcctatgcctaggagtaaaatagctgtgtcatgctagtgtgtatgtgtgtgtgtgtgtgtgtgtgtgtgtgtttaatcagttttattaaggtataatttacatacaataagattcatactttaagtaaaaaaatgcagttttgrcaaatgtatccagttatgctgtaatcaactttccatcatcccatacagttgcctcctaacattttgcggtcaatcctacacctttacccaccactctacaccttggcaactgctgatttgctatcattatagttttgccttttgtagaatttcacacaaatagaatcatacagtatgcagtcttttgtttcaagcttgttttatgtagcaaaatgcttttaacatttatccatgatgttgtattagtagttcattccattttttaaaaattgatatatcacagtatttatacatttgctagtttgatggcatctgagttgtttcaagttttcagctgctatggtctgtatgcttgtgyctcctaaaactcatacattgaaattctaacccccaaggtgatggtattaggaggtagggcctttgggaagtgatttggtcctgagtggggttgatccaccaatataagtgtaccaaaaaagcttcctcaccctttccatcatgtgaggatgatgctgtctacgaaacaggaagttggccttcaccagacactgaatctgccttgatccaggacttyccattcttcagaactgtgagaaatatatttctattgtttataagctatccagtttatggaattttgttttatcagcccaaatggactaagacctcagccatcatgaataaagctgctctgaatattcaactactggtctttgcgtagacatatgattttcttgctctcttgtacatacctaggaatagcatggctaggtcaaatggcagatttttgttgaactttataaaagaatgcctaaggagttttcaaagtggctgtaccattttacactcacaccagcagtgtctgaaaattccaactgctcccacatttttgccaatctttggtattgagttttagacattgtactaggtatacagtgatatccaattatggttttaatttacattttcctaatgattattgatattgaacatctatctcttgttattcatatgctttcatctgtgaagtatctgttcaaatcgcttgctcattttattgaaattcaagttgtatgcctttatattaagctgtgaggattcttcacttattctgaatagaactcttttatgagataagtgtttgaaaaattttctcttcatctataatttcccttttcattttctttcttttttttttttttttttgagatggagtctcactctgttgcccaggctagagtgcagtggcatgatcttggctcactgcaacctctgcctcccaggttcaagcaattctccagtctcagcctcccaagtagctgggattacaggcacacaccaccaccaccaccacgcctggctaatttttttattttttttagtagagacagggttttgccatgttggccaggctggtcttgaactcctgacctcctgcctgcctcggcctcccaaagtgccaagattacaggcttgagccaccgtgccaggcctttttcattttcttaataacttttgaggagtaaatattttaaattttggcagtcaaacatcagttatttttcttttagggttaatgattgtgttcaattttaaaaatttttgcctaacacaaggttacttaggcttatgttaaatctattatttcttcttgcagttttataattttagctcttaggtttaagtctatgatccacgttgaatttttgtatgtggggtagggtaaagacaaactgttttttcttttgtgtatggatatgcaaatattctgatgtatacgtacatatatacgtatatacrtatatacacacatatatacatatacacgtatatatacatatacacgtatatatacatatatacacatacatgtatatatacacatacacgtatatacacatatatatatacatatatatatatatatwtwtttttttttttttttgagactgattcttgctctgttgcccaggctggagtgcagtggcgcgatctcagctcactgcaacctccgcctcacgggttgaagcaattcgcctgccacagcctcccaggtagctgggactagagacacgcgctaccacacctggctaatttttttgtatttttagtagagayggggtttcaccatgctggccaggctggtctcgaactcctgacctcaagtgatctgcccacctcagcctcccaaagtgctgagattacagacatgagccaccgtgcccagcctattctgtaatattaatatttgctgaaaaaaatagccttttctcactaaaatgccttgattcctttgtcaaaaatgagttgctagtgtatgtgtgggtctatttttggactttttttttttttatgagacggagtcttgctctgtcacccaggttggagtgcaatggcacgatcttggctccctgcaacctctgcctcctgggttcaagcgattctcctgcctcagcctcctgagtagctgggattacaggcacgtgacaccatgccccactaatttttgtatttttagtagaggagaggtttcaccatgttggccaggctggtctcgaatgcctgacctccggtgatccacccacctcgacctcccacagtgttgggactacaggtgtgagccactgtgctcagcctatttttggactctttatgtggttccattgtccacctttacagcagtaacacactgttttgaattctgcagttttatagtaaacctcaaatcaggtagtataaatcctccaactttgttctttttcaaaatttgttctggctaatctaactccatacaaatgataatatcaggtcgttaatttctttttttttaatttttgcttttatttcttctaaaaaaatggatatatgtgcagaacatgcaggtttgttacataggtatacagtgctagcttgttaatttatactaaaaaccatggtgggctgggtgtgatggctcatgcctgtaatcccagcactttgggaggctgaggtgggtggatcacctaaggtcaggagttcaagaacaaccgaccaatatggggaaaccccgtctctactaaaaatacaaaaaattagccgggcatggtggcatgtgcctgtagtcccagctactcgggaggctgagacaggagaactgtttgaacctgggaggtggagggattttgtttgggattgcactgaatgtatagacgaggaattgaaaaactttttcttagggagctatatagtaaatgttttgggctttgtgggccagtaggcaacatccagattgttacatatctggatgttacaaatgttacatatctggatgttacaataatttgttacatattattatttatataataatttaaaatgtgaccatttaaaaatatagaaatcattcttagctttcaggagacaaacacgtgggtagccagatttggcctgcctgccatggtttaccaacccctggaatagatcaatttagaaagaattgacatcttaacagtatggagtactgtgatctttgaacatggtatattttcccacatatctttgttaattttgctcagcatgttttgcacttttcactgtgcaggtcatgtattttttaatttatctctaattattccacaatttagtgctttgtaaatgacccttttatttcaatttccattttttttgttgctggtacagagaaatacaatacttttttgcatattgatcctacaccttgagactttgctaaacttactatttttttttcttttttgagatggagtctcgctcttgttgcccaggctgcagtgaagtggcgtgatctcagctcactgaaacctctgtctcctgggttctagcgattctcctgtctcagcctcccttagctagcattacaggtgtctaccaccatacccagctaatttttgcatttttagtagaaaggaggtttcgccatgttggccaggctggtctcgaactcctgacttcaggctatccacctgcctcagcctcccaaagtactgggattacaggggtgagccaccgtgtccagctaactcactagtttctaatagttatttttggtagatttcttaaactttatacacagagtatcatgtctggaaatagtgacagttctactttttcctttctaatctagatgccttttatttacttactttattcatcttatttcactgattgagactgccaacataatattgaataaaagtgataggtgtagaaatctgtcttgttcatgattttcaagggaaagcatccaggtttttaccattaagtatgaattagatgtaggtttttcagttaccctttatcaaatttaaaaatttttcatccattcctacttttaactttttgtcgattttttttttccctcctctctatggggtcttgctgtgttacccaggctggagtgcagtggcatgatcacagctcactgcagcctcgaactcctgggatcaagcctcctgggtaactaagactacaagtgtgtaccatcacacctggctaatttctaaaaacttttgtagagacaggatctcactatgttgcccaggcaactctcgaacttctggcctcaagtgatcctcctacctcgacctcccaaagtgctggtattacggcrtgagccaccgtgcctaaccaatgctgttttttttttgtatttatcagatgatcatacagtttttcttttttagtctgttattaatgattaactacactgattgattcgtgaatgtagaaacaacctcaattcctggtataaaacccattagtaatgagacattatcctttttatatattattagattcagtttgttagaattttgttaagaactctgcattcatgagagataattggtctgtactctcctgttcatgtcatgtctttgtctggtttgttcttagggtaacaatattggcctcctagttgttcctctttaacttcctggaggagtctgtgtagaaatggtatcactcttctttaaatgtttggttgaatttacctgtcaatgaatctggaccaaaagttttccttatggcaaagttttaaacaacaaattcaatacagctattcaggttctttcttatcaagtaagctctgatagtttatttatttcaatgaacttgtccatttaatctaaattgtcaaatttactgacattaaaattgttcatttaagtttcttcccagtgtagagaaaaagaaaaataaatttaaaaaataaaattgtttgtgacattcctttagtattcttttaatgtcagtggggcctgtaataatgtccctacctcacccttaatagcggtaatttgtatcttctttttttgtcctagtcagtacaggtagaggtttattgattttactgattttctcaaagcaccagcttttaattcattgtttttctccactgttttctatttaactgatctctgctctgtatgatttcctaccttctgcttacattcggttgaacttcttatttttctagtttaactggaaattcagttcattgatttaaaaacttgctttctaaaaaaagctcttaatgctataaatttcctcctaagctcttctttaggtatattccacaaattttgatatgttttgttttcactgatatttaatttaaaatattgttaaatttccaccttcttttgactggagcattatttagaaatgtgttatttaatttccaaagatttgtgaaatttcctgatatttttctattactgatttctagtttaatcatgctgtggtcagagaacattgtttagtttgagtccacttaagtttattgagacttgtcttacagaccagaatatggtatgtcttggtgaaccttctaaaaaggaatctgtactctgctgtttttgggtggaccactgaaatatttttactcacaacacttctgataccatatgtgtgagtttttgctgccacccaacaatcaatttgccaattatctggacaccaactggtgccctacgattcatatgaattctaacactaactacccagagttagcacagactccacaggttaagggcttacttccacaaggctgtcctcactttgcatgccagctgcaagtcccaggttgtcatctgtatttctgaccaattggctatagagtggggattcacacaacctcctcgagttcaataatttgctggaatggttcacaggactcaggaatgcactttacttactattactgttttattataaagggtacaactcaggaataaccaaatggaagaggggcagagggcaggtatgaaagtgtgtggagctggccgggcatggtggctcaggcctgtaatcccagcactttgggaggccgagatgggtggatcacttgaggtcaggagttccagaccagcctggccaacatggtgaaaccccgtctctactaaaaatacaaaaattagctgggtgttatggcacgtgcctgtgatcccagctactccagaggctgaggcatgagaatcacttaaacccagcaggtggaggctgcagtgagccgagatcgcaccattgcactccagcttgggcaacagagcaagaccgtgtctcaaaataaaataaaataggccaggagcggtggctcatgcccataatcccagcactttgggaggccaaggcaggcagatcatgaggtcaggagattgagaccatcctggctaacacggtgaaaccccatctctactaacaaaatacaaaaaattagctgggcgtggtggcggacgcctgtagtcccagctactcgggaggctgaggcaggagaatggcgtgaacccaggaggtggagcttgcagtgagctgataccacaccactgaactccagcctgggcaacagagtgagactccgtctcagaaaaaaaaaataataataaaataaaaataaaacaaaacaaaacaaaacaaaataaaataaaataaaagtgtggcacctccatcccttttcctggcatgccttttccagtaccttggtgtgttcattaatccagaggctctctgtaccccatcatttagggtgtttttaaaatggaggtttcactacttaggcatgattaaataattggtcactgttgattaactcaatctctagcctctctcccctccctgaagtctggagtggggctaaaagtgtaaccgtagtcattccctggtctttctggtgaccattccctatcctgaagctatctaggggcctgccaagatgctcctatgactcggaaaattcaaaggtatttaggaaccctgtgtcaggaaccagggacaaagaccaaatagacatattttttattatcacattgttcaataaaagacgattaggtcaagttggttgatggaatggtttagatcctctatatgttaattggttctctacttgttctatcagctactgagagatgaatgctgaaatctgattatggatttctctcattttgaagttctgttagttgcataaacatttaggttatttcctcttgataaactgatccattcatcattatgaaacgactttcaattgtagatcattcctgttcttaaatctattttgacattttttgttctgaaatgggtagagggaaataatgagcatgcattatggtctctaggactacatggagcagcaaggacctaaatctttgtttactaaccctttctaaggctttttgggaggttacaactgactaccaacttgaaggactggatttagaacctaccctctcaggaaagaattgagagcatcattgcatcatcttcccagggtgagaccagatactcagaggatactactggatcaatgtggtacaagggttggactgtactgggtttggcatctgctattctctgaatgtttgtgtcccccagcaaattcatgtgttgaaacttacaatctccaatgtgatagtattaaaggttctggcctttgggggttgattaggtcctcacaaatgggattagtacctgtataaaacaggcctgaggaagcatgtctgcctcttcagccatgtgaagccacagcaaaggcttcagctacaagggatgagccctcaccagatatcaaatctgctggtgccttgatcttggacttcccagcctccagaactgtgagtaataaatgtcaattgcttgtaaattacccaagctaaaataatttgttatagccatttgaatggactaaagcagaatcctagatatagtcacctgccagttgtttggccaaagtggccttcacaacgatttgaacaattctcatgggttggagttaggtctgtgttactaatgcctctggcttcagactgagggattggctacaagggctgctccgagtcatttgtgttgatcctgggcacaagtcaatcaataccttacctcatgtgcatgctatacagtctgtctcctctgtccctggacttctctattgtcactgagacataagatatagtagggctactggttttgtgcaatagggagaataagggagataatactcaccaggctgtgaccaatacaggaagggagttagcagaaaaatcctctttggagtctcctttccatggttcagagacatgtggtctctcacctctgccagctctgtagtatcttcccttacattttttctctttcctttcctgtctcactccccctttccttcacgcttgcttccctggcttgtactctgttaaaaaggtcttaacatataaacttttgtctcaggctctgttttctaagaaatatatgctaaggcagtcctggtgctgaaaatgttgggaaccaggggctagatattyttaaagctaatttaaatgttcaagtcattattaagttatcatattatttcagcatgttgccaaaactattcattttaatgaaaacttcatttcacatattcagtctttcagtaatagcccaatggttcttaaactttttgccaccaaatacaatgttgcaccttccccaatgagatttgtatgaattccacagcatgttttataattatttctaaatgyattcattgatagtatatagttgtatatatttatattatgtgtctgtattgtttaaataaatgtatacttatcctgatttctggaagttgtcttattaaaatatacttaagtctttttcattcactaaaatctgactgaaatataatttcatttggtcagctggctctgtaattcttagttggaagcttggagttacatggctacacgggttgtacaccgaaagctagagaatgcaagctcctgcttcccagaggacttgtctaagtgtaaagtgtctgttatttaattccttgccttttgtggtgttttctttgtgtgtcctagcagatgcttctgtctttaggtaccatgtcacagttggctaagatgtacttgtctctgtgtattctaaccctggtatatatgccagaaacatagcccttttctctgacagaccatgagcacatacggtaggctccaaacactgaaacattacacttgtaaaggtctgagagggtagtaatgggtttcactattttcaatatttcatagactttataaataatcacatatttattggtgactagttaactacaacatcaagcctctgtaaacttagctagaattatatcaagggtgacaatattagttaccttattttgaacataagtgttagcagatatatgtctcataaattaaaaatgagcaactattgaataatgaatagagtaatgctgacagatttgttgaaaacatgagatctatcaataaaaatgatgaaagtagtcctgataggtggtagaaagttttgagttaatttgtggcacaaagacacaattattcatttggtctatggaccttatttaagtgctacatttcatagtaagaagggcttttaaaagcaaagagggtcgggcacggtggctcatgcctataatcccagcactttgagaggctgaagtgggagtatcgtttgaggccaggagttcaaagaccagcctgggcaatatagtgagaccctgtttctataaaataataaataaacagaataaaagcaaagaacaggaggacattccattttcctaatgtaagcactgatgttattttgcatttttgttgtattatttgcacaaaccaaacatatctgtcattacatggctcacttgtctttccacctaggtatttcttcaagcaccattccttctgcttgaatgaacatatttctatagctatttttatgtatggcaatatagatgatatccaattatagataatctaataatatcaaaagaacacaggaagaagctcagcaggaattatgaaagtcgttttaccaaaattaatcatagagaacttaagagaacaaagttagtcaatggagaattctaatctcattcaaaatccaataaagtttcatcttgtacccaacagtcactctaagcactgccaaaaaatgaatttaaaaaatgccaggtgttctcagcaaactatcacaaggacagaaaaccaaacactgcatgttctcactcataggtgggaactgaacaatgagaacacttggacacagggtggggaacatcacacaccggggcctgttgtggggtggggggctggaggagggatagcattaggagaaatacctaacgtagatgacgagttaatgggtgcagcaaaccaacacggcacatgtatacctatgtaacagacctgcatgttgtgcacatgtaccctagaacttaaagtataataaaagaaaacaaaacaactacaacaaaatgccaggtgagcctttcattccctcctcccccatcattaagctttccttctttttatacatttattgagcatctactatgctaccatgtgccagtcactggactaaatgctacagataaaaaatgaacatggcagtttctgctaacaagaaattaacagtcaatgggggaaaagtagactcaaaaactatgcataataccatgtgttaaatttaataatacagataggcacaggtattactgggaaagtggagtaataatatgtcctgaatagcagttggaagtgcagagctgaggaaaggtgggaggagtagtagtggtggtgacagaacacttctcagctggatttacgataaaagattagaggagataatctattatctcctctaatgttgggaggagagaggatatcatagtaagaatgatcattatgaacaaaatcacagaaatgaaaaaaaaactattgccgctagaacaataaatccaaggcaaaaagaagtgggagagaaggctggggaaactggccatcaccagatcatgagggcctaggtcaaaggaagcctatcgatctacaaaatgtaaattcatttacctataagtcttacaggcaaatgagagccaaaagagtgatatggtcagactttgttttcaagaagttcactttatcttttaggtaaccgggagtcaaatgagtaattgattttcaattaatttactttggttgctgagtgaaaaacaacagaaagaacaagatgaaaagtagacaaaaagatctgtattaatctaagtctgagataatgaggaccattgaagcaatgctatgaaggatgaaaataaaatacagggatgagaaatataaagagagggaggaggcaagggctcctctcaggtatctgtcttaggttcctgggtaggtagggatgccattataaaaggatattttggataattttatgctaaaaaattttaaaaagattaaaaactacaaggaaactgattcaaaaagaaaaagaaaacctaaaatgttctatagtattaaacataatacatagaaacagtagttaaaattgaaatgtgcatttattgcatgaagacagtgccctgattattttaagagcaaatctgactaaatattcaagaaacagataattccaatcttccacaaactatttcagaggatagaaaaaaaggttactctttatcacattgtgttgctctatgttatttactcaaaatgtttagttatttaataattatatccctataaagacttcttacataaaccacaatttagatattatgctaaatcccgagagtaaataaaaagtaggagacataaatcttgacattaagaagcttacataaagaaaataaatatataactataagtaactatactggttattggcaatgagtctcataagtgtagaggagggaggtagatagtgcggaaatccagagaagggagggataatcagagtctgcttcatgaagaaagtaagatttggtttgtgtgattattcctggacatgtgtccatgatgaaaagaatgtaataaacagagaaattgtggaaccaaaaatcagagctcgaaatacgaaataggagtcaaggaacagagagagtcatcccagcagggaaagcagactgagaaagatgacaatagaaaggctgagagtcagccttggggagtatttatatttggatgagctcaacctattttataaggctaacataatccttgatagcaaaacctgacaattgcagaaccagagaggagamtttcaagcacatctcactcatggatatagattcaaaaatcctaaacaaagtgttagaaaataagttgatttatttaaaaatgtatcataactacacgtggttctaggaatgcaaaatcaggttaacatttgaaaaattaatgtagtttacaccattgagagaataaaggagaaaaactatttcatcacctcaaaagatatttgtaaaagtatttgaaaaaaattaatattcgtttatggttaaaaatacataacaaactggaaataaacattttaaaaacctgataatgatgtctacaaacatctacaggaacataatacttaatagcgaaatactgaaagcattcctttagcccgagagcagtggctcacgcctgtaatcccagcactttgggaggccaaggcaggtggatcacgaggtcaggagttcgagaccagcctgrccaacatagggaaaccctgtctctactaaaaaaacaaaaaattagacaggcatggtggtgcgtgcctgtaatcccagccactcgggaggctgaggcaggagaatcacttgaactcgggaggtggaggttgcagcaaactgagattgcaccactgcactccagcccaggctacactgtgagactccatctcaaaacaaacaaacaaaacaaacaaacaaacaaaaaggattcctttaaaaatcagttacaagataaagatgactgcttccatcactataattcaatgtgccagagaattagctggtacaacaaggaaaaaaaaaaagtgtggccgggtgcagtggctcatgcctgtaatcccagcacttttggaggctgaggcgggcggactgcttgagcccaggagttcaagaccagcctcggcaatatgttaaaatcctgtctctacaaaaaaaaatacaaaaattagctgggtgtggtggcatgcgcctgtagtcccagatgcttgggagactgaagagggaggatcacttcagcaggagtttgaggtggaggttgcagtgagctaagattgcaacactgcactccagcctgggaaacagagagactctgtctcaaaaaaattgaaaaaaaaaattaggaagaaatcaatcaatcaataaataatacatgatataaggataggtaaggaaaacataaaaagtcattatttgcaaacaatatggttgtatatgtagaaaaccacaaaaaaactataaattatttaataagagactttgctgcagtgctgaatacaatacacaaatctctacatatttctatgcaataggtaagaagtataatgaaaaagacataacactgacaaacgcataaaaatataaagcatctaggaaaaaagatctttgaaaggatataccagaccctattgaaaaattagaacattttattgaaagatactaaagaagctctaaatgaaagagataaaaaatatattcctggattagaagatttaatattggaaacagttgtaaattcatcactcattgatctatggtttcaatgcaattctaataaaaatctcaaaaggggttcttcatgaatttggcaaattgattcttaagtttatttgggagaagaaagggtacagaatagccgagaatcctcaagatgatgatcaagttaggggactttgtttaccaagtatcaagacttatagcggttgtaattaagacagtacaatattgttataaggagagactgatttaccaatggattgaataaaagctcagaaaaagacctagaataaaagctcagaaaaagacctagacatttatgcttttggcagcaatacactgcatgcgaacatggtaatggaactagttatttgtatagaaaaacataaatttgtactcttgtaccaattctaggtgattttaaggacttaaatgacaaagcaaagtttcacaaaaatataaaatacaaaggaaaaaacaaaaaaacttgactacattaaaattaaggcttcctattaaaaaataaagatttccttcaaatctgtaaggaaaagaaaaatcacattaggaaatgagcaaaaacttgaacaggtatttcacaaaagaggaaacctaattggctaataaacatgtgaaaagattgtttaacctcatcagtaatcaagaaaacacaaattaatatcacaattagataactttcatatcatccagattggcaaaatgaagcctgacaatatcaaacatgggaaagatctatagcaaatggaacattttatagtatattgctagtgrcagtataaactggtatagtttcataaaagatgaaattattttataaagttgaaagagacacatttctaataatctgacaatttcacttctaacattccgaatcatacatatgactaacgacacaagcccaagaataatcacagcagcactatttgcaagagcaaaaatctggaaacaactcaacttttcatcaacagaatgaataaacaaatgtgctatattcatacagtagaatatgatatggcaataaaaacaagcagactaaaatgcaacaacatgaatgtatctgaggtacataacagtaagcacaaaagaaatttgtggctgagcgtggtggctcatgcctgtaatcccagcactttgggaggctgaggcgggcggatcacgaggtcaggagatcaagactatcctggctaacacagtgaaaccccatctctactaaaaatacaaaaaattagccaagcgtggtggcgggtgcctgtagtcccagctactcgggaggctgaggcaggagaatggcatgaacccgggaggtggagcttgcagtgagccgagactgcgcaaccgcactccagcctgggcgaaagtgcgagactctgtctcaaaaaaaaaaaaaaaaaaaaaaggaaaaaaaaagaaatttgcataaatatgctttcaggtatatgaaattgaaaacatgagatctaaataataaattatttagggatacaaatgtggcaaaatcatgaaagaaagtactggaatgataatcacaaaattcagatgacctctcagggtagggtatgaatagagaaatgggaagagatacagaagaaggctttagcatataagacaggtcatttttgttatagggtaagagaggtagtcaggtatttgctatattcttattgtctataccatatacatattaataaatattcttttaaaaatgttttactgtggtaaaatatacacgacataaaattattttagccatttttaagtgtataattcaggggcactaagtatattcacaatgttgtacaaacatcaacattatccatctctagaacttttcatcatccccaactgaaattctgtatccattaaacaataacttcctatttccacatcccaccaactccccacgccgctgcagccccactcagtactctctattctactttttgtctctatgatttagctactctggtattccatttatatgagtggaaccatatatatcatacaatccttttgtgtctggcttaactcagcataacattttcaaagttcatccatgttgtagcatacatcagaatttcatttctttttaaggtgaataatatttcattgcatgtatatatcatattttgtttgtccagtcatctgtccatattcatttgtattatttccactttttggccgttgtgaaaatgccactatgaacatcagcatacaagtatctgtccaaatccttcctttcaatactttcaggtatatacttagaagagaaattgccggatcatatggcaattctatgttgaactttttggagaactgccatactcttttccacagcagctgcatcatttacattcccagcagcaatgtatgagagttccaatttctccacgtccttgccaacacttgttatgttccactttctttttataattgtcatcctaatgggtataaagtagtgttttattgtggttttggtttgygtttccctaatgactagtaatgttgaatatcttttcatgtgtctattggccatttgtatatcttctctggagaaacgtctatgtaagtctttttcccatttttgaaatggtttgttgttgttgagttgtaggggttctttatatattttggatattaatccsttatcagatacattatttccaatatctgtgggttgtctttttgcttttttttctttttgagatgaagtcttgctctgtcactcaggttggagtgcagtggtgtgatctcagctcactgccacctctgcttcccggcttcaagtgattctcctgcctcctgagtaggtgggattacaggcttgtgccaccatgcctaatttttatatctttagtagagatgggggtctcgctatgttggccaggctggtcttgaactcctgagctcaggtgatccacctgcctcagcttcccaaagttgtgtaacctgtcccaaagttacaggtgtgagccacagtgcccggcctttttgytctcttgatagtatcatttgatgcacaaaagttttaaatttatgtcaagtccaatgtattattttcttctgttgcctgtgcttttggttcatatccaaggaatcaataccaaatgcaatgtccaaagatttcctcctatgttctctgttcctctcctatatccaatccatgaatacaggatgtctttctatttaagtcttaaaaatgtcttctgcaatgttttgtagttttcggtgtatgaggktttttttttttttttttttttttttttgcctccttggttaaattttgagcagttttacagtttttaactactatgtttaggtctttaatccattttaatttttgtatatggtagatggtaaatgaccaacttcattcttttgcatgtcaatattcaattttcctaacgctaattgttgaaaagactgtccatgccacatggtcttaggacgcttgtcaaaaaccatttgaccatatatgcaagagtttatttctggtctctttattttcatttatttatttatttttgagacagggtcttgctcagttgcccaggctagagtgcagtggcttgatctcagctcactgcaacctctgcctcccaggttcaagtgattctcctgcctcagcctccccagtagctggaattacaggctcctgctaccacgcctggctactttttgtatttctagtggagatggggtttcaccatgttggccaggctggtctcaaactcctgacctcaactgatccgtctgccttggcttctcaaagtgctgggattacaggcatgagccactgcacctggccccctatttctggtctctttatactgctttgattactgtagctttgtaataagttttgaaatcaggaaatgtgagtcgtccaattttgctctttttcaagactgttttggctatttagagtcctttaagattccatatgacttttaggatgagtctttctttctttcttctttaggatgagtctttctttctttcttttttttttagaaacagagtgtcgctaggttttccaggctggacttgaactcctggctcaaatgatcctcctgcctcagcctcccaaggagctgggactacaagttcacgccactattcccagctggatgtttctatttctgcaaagactactgttgggattgtgatagagattgatttgaatctgtagatggctttgataaatattgttatcttaacaatagcaagtcttccaatccatgaagacagtatatctttccatttaagtcttaaaatttcttctgcaatgttttgcagttttcaatgtagaatttttttttttttgcctccttggttaaatttattcctattttattctttgtgatgccactgtaatgaaactgtttccttatttttctttttggatttttcatctttaggatatacaaatacaacttgttttggtgttgattttgtatcctgcaactttgctgtaaaaatatttttatttactcagtatttatttaaaatgaatgaatccacacaccgatgtgcatttatgtaagttagggatacactttgcagtcacggcattaacatttgccacaacttctaaacaaataaatatgtattttttatatctacagaaggaagccaaatgtgggaaaaatatttacttttattctttaatcatcctcattttcctttgtcttctcaactttcgtcatttgttaagcaacctttccacacaccttccttggaacatgtgtctcccttggctttggtggcattgcactgccctaagttttctcctatttatctgactactttttttttggtgtccactggctcattcttctcccacttccaattccctgctctttgaatgtgctctaagattttgtgctcagtcctctgttttcttctctttggatttgccttctttagattattcttttcccaaaacttcacctatttccatttgaatgactcccttaacaagtatacaataggcagtgagcatatgaagagctgcagaacctctacactaatcaaagaaatgcatattaaaatgagacaattttataaccatcagatttactaaaatcagaaagtcagatgacacaggtctataatcgcatatatgaaactctgaagatgtgtttcaaaatacagaatgtctcatattttaaaaaagtaaaaaggcacagatactgtatatggcacagggaatagtatcctgtaaccgagtatattaacatttctacaataaaatgtatagatattcatatttagtaggataaagactgtaagtagcctcatcttagctcaggtaagattttacagccaaatgaatttgatgtaaatttatattttaaaaaacttacggttttaagagttttcagattttagaactgggctagctagtgtcaacaaagaacgagaaaagggaaaagaagctttatatactgctgatgagaatgtgaattactgtaactattctggataataatctgggagtatttcatgaagttaaataatcatatgccccatgactcggtaattccagtcctaggtataaactccagaaaaggtttgtacaaatggtagaggagttggaagcaacctaagtgttcgcaggtaaaatgtgaagaatatttacatcatcagaagcaagaaatttggtgttcatatagattttaaaaagcagaatataagatctgtattaacatgccactttataaattaaaatcacaaacacacacaaaaaacaacatataatattcaaggacacattaatattcaaggacttatataaatataatagtatggctgcaatgaaatgggattgaggataaagggaaaagtaataaactgagaggagctttgtacagaccaatctgtatatactgaggagtattattaattcagctctctgcacctggggcccagagcgatagaggaaaaaacataatcacttttgtctacctatgtataaatataagcccatacattcacatgtgcaatatcatagatgatggaacacattcattccccatttatgctctgctcctaaatacttaattggggttggcatatactataattttgggagtctgaagagaaacctagccataaataacttttaattaaaattattcttattaccacctatgttctttcctcttctttattctacataaagctgctggaggctatgacactgtcatcatctggttgttaggtagaaaaggaatacccagaaatgccatttatgttttggacagaagcccaatttccattttatcttctcacagagtataaatatatagttttatactattcttaaattcttatttctgactagaaaatgtacacagacttatttgtcaaaaggagtctattggtaactccattattaaaggaaatgcaatttttttagcattttgtaaatgacaatggtatagaataatgttcaatgtctgaatcattatacaacttgatagccataaaaactgagaagctccagaactatgttcttcccctactcttcttatctccatacctaactataagaagagcattagaacagtgtcccaaagagtaatcacaatactttaatattttctagttgtcaaaatgcattaataggaaatattactcaagaaagatcactcaaaattttgaatatgatgaaagatttcctgagctagaaatatcctatgattttcatagcaagaggtgttgaatcataacaatacatataaatgatgatggcctatctcctgaacatgaatgagccctccaacagtccacgtctggctctgatgaaatgtttacctagagtctaccggagataataaattacataatgtcccaatcagcattgcctttatcagagtggttttagtttctgctgcaaactgctaattgggttgaagattatttagaaatatttctaggactaagtagtcaactaggatctttggtaaaaaaaaaaaaaaaaggtataagaaaattcacgaggggaaaattaaatggaaaatttctttgcttgaatacttctaagtttcaagttctctttatgcccaagcttgccataaaaatgtattcgtataaggtttcaaatcataagcaaagaaataccatttttctactttgcagaaggtaaaaaacagggctgtcttattgacaagaagaaaaacaaagtctaaaggggctcccaaaactaattaaataactaatatatggtttgcacaaatagacccagaacaactcaaatcataactctttcgccacttaatctaatctcacctttctttcataaaactctcgactataccagtaaggaatgaactttttctgaactacttctgttggtagatagttgatgtacgtgcatttacaggaagaagtggacagaagttttttttttaaatccactccttcttatcagggaatatcctgataaggagtggttaagtagggaggaatacctttcattttgtttacccttaggtttctctctccagcatcattaaaaagaccaggaaagttttatatatacatctcaacaattcaaaagcagaatttttaaaaaccttaagcttgtgtaattattttaaaaaggaaaaaaaggacacaaaattatcaatataaaaaccaactcaccaatgatgccactatctctgctttcaagggtagaggttggactagtaacagccccatagctgcagtccttggcagttgcatttgtactgatgggtgggagtgtagagcaggggctactggctggtggagaggcagtgctgctagtcagagtggaacaaggacttatccgctgggtgattgctgaggtctgaaaaattggaatcatgaataagtaagataacctgatcagctgttaaagtatattttaagataaaataaatgctttgatgaaaaaaaaaactacatgcatagcttttacatctattaggctctatttgtttttgctttctcggataaggactttggggtctacaaattaatgtgaaacttgatgaacttaacattaacagagactgttgycagtttttctgcctacaaaatttccagtgacaagtaccctatcactgccattcattaatagaatagagaaattttttattaagcacaagttctccctgctattgcaagttttccttgcaatcaataaaactttttggaagacctggaactttgccttgttaataattttctttctttctttcttttttttttttttttttttgagacagagtttcattcttgttgcccaggctggagtgcaatggcacaatcttggctcactgtaacctccacctcccaggttcaagcgattctcctgcctcagcctcccaaatagctgggattataggcatgcgccatcacacctggctagttttgtatttttagtagagatggggtttcaccatgttggccagggtggtctcgaactcctgacctcaggtgatccacccgcctcaacctcccaaagtgctgggattacaggcatgagccactggacccagccaataattttctttagatggaagggaaaaaaaaaatctctacagctgggaagaaataaagttcttaatgcaaggaagtgtcttttcgatacataggcagctgtccagagacaatacatgaatgcagagaaaaatgccttattctaaaagtttgtctaataaaacagaattaatattagtttaatacaaacctaaataacttctctgtaacagcattacagcctgagatcactttgtatcctgaatgattcttacacttgaagctatttactttttaagttttgatgtgaaggaatgaataattactaaaaaggttggtggtaatatattctgatttacctaatttaatgacaattcacttttcttcaactctttctacacaaataaattactacaatagtgaataaaagtatattttttcaaacactaaaaacattttatccttttttttttttttgagatggagtttcactgtgtcgttcaggctggagtgcaatggcacaatctcaactcactgcaacctctgctgcccaggttcaagtgattctcctgcctcagccttccgagtagctgggattacagccgccaaatatcacgcctggctaatttttatagttttagtagagacggggtttcactgtcttggccaagctggtcttgaactcctgaatgtgtacttcccacctcagcctcccaaagtgctgggattacaggtgtgagccactacacccggccaacattttatcgtttttaaaattattaagtgatcagcagcaaaattacttgaagacgcactaatgataaatttaacatctttaaatgttaaatttaaaagaagcctttcaacttctttacaaatagagtctctattcatactctttctgctaaaatttaataactggagaatgtgttgataactagctatgagaatattaaggctcttcgactcatcctaagatgattcctagatgcagtcccttgtgtttaatcatctctgttgaatctaggttttgattttaatttaaatactataaccaggttacaaaagataaatttgactcaaccaaaaacaagtgacattctcattaccctccaaccaagtaaatcttttcaatcatatcaataatattagaatctaatttttcttaacaacacagtaagctctcaaacgtatccaaatttctcttctactatatgttatctctccagagaagaggagagtttcaattttttaaaatctctatttttataatatgatgctggtctaccagagcaatgatttttttttttttaaccttaaaatcttttttcccttacagagcaattattcctaactaggcacacagtaatatcacttgtgacatggaaaaaacaaacatgcaagctctcttacaaaattgacagatactgagcccccactccagacttattgaattggaattggaatccttcaggttagaaatgtggcaaacgatttttaacctcccactcccagtctgagacacatgtgagtagatgaactgtactcaggtcttttacattagatatagctatagtcattccatattgcaaaagttttaggcccagcatggtggcctatgtctgtaatcccagcactttgggaggcttgaggcaggcggattgcttgaggccaggagtttgagaccagcctggccaacatggcaaaatgccatctctattaaaaatacaaaaattagctgggtgtggtggtgcatgcctctactcccagctactcaggaggctgaggcatgagaatcattgaacccaggaggtagaggttgcagtgagccaagatcgtgccactgcactaccgcctgggcaacagagtgagactctgtctcaaaaaaaaagaaaaaaaaaagaagaaaagttttattatgataggaatctattacttttataacaactcatttctgttctaagattctcattctgttctttgtgaaagaaaatcatattatatgcataatatagacaatgtggaggttaagcccaaacagcacttacttatttttactctaagttattttgtgcaaaataaagcacatatcagagaatgtgtatcttaaaagctttaactgtaaacgcaaagcttaaatatcaagccatttagaaaacagaaaattgttcatggcttatgacttaaaaggcaggcctcatatttacttaaggagactagttaatgagctagagaaagacaactatttattcttcatgctgtaggctaaaatggacgtctatttaagccactgcacttcctaaacctttcagtgtttttcccattgcccttaatgttctccagaaggatcctaagaaagctcccaatctggatctcttaaaggtcctacaaatacacaacataagaagctaaagaggaaattcataaggtccatttgaataccttggaaactactgaaagaataaaggggtcaggtgaatatcactttcatgctttgttttttttgcagaaaaatgatgtacgctgacttgcattagattctgtcattactattttgagaatatcatcactacatgatctgcctaagcatagcagtttatctttgttaatacactgtttagctcagaaaaaagtcaccaaattaacatgacctcctacttcttcataatcttcctgagaccagaaattcaaatgatcaatttagccactttcttgtgtggttccaagatagttccagtgtatattatactgcaagaaggctatcatttagcttcattattaatattttaaatttgtataaagcttaacaatttaaaaatatttttatatattatctcatttactccttatcaacctggtatgagaggcataatgtatgttatttcccccacttaagaaatgtgaaaatgaaaccaatgaaagtacgaaagctatgatgtaatttcccccaaatcacacagttcctgcatatatttatatactaactatactgcatattattttatactttttatttatatgacattttacagcttacaaagtactttcatattcatgatttaacttgatcctttcaacaaccctgtcaggtgttattatttcacattacactggaacagtatggtgtggctgttaagagcatagattataaaagcagactgcctggatatgaataccattccatcactttctggcagtgtgtttccatatcttatttgaaaattggaatatgaatgaactctactacactgggttgtgaagaagcttaaacaaaacagtgcaagtaaaacaattagtacaataattggtacacagtaggtatttaataaatgtcagttattattacctatgaaaaatataaagctcagagaggttaagtgacacatccaaatttacaaaatggtaggtggcagagttggaactagaacacaaattttctccctcctggttcaatggcttttctattacaccatattgctttaattaaatcaatgatactactcatttacttaagattatgttattcagtaatgtacaagtaaggtgcactccatagacttgtgactttatgcagaaatcactgtgacatgcggaatctcaagaacaacaagtacaaattttatcatccaaggaaatgtagctgtgtagaaatgacagagtccttgaaaaatattcgggttataagatatgacatcaagttacctggtcattactataacagtcacattttaacttgacatgaatatcaagaaatgaaaggtgaaatagatgttttattgctcccaattttaaaaaatccctcaacaatattgttcccattttttattcacagagcagcacagcatattgacatagttacaatgtaaattgatttaaaaaatcatcagatctgacatcatgaaacayacattcttgtcataaggtaaaacaaccccacaactaaacatgtaatgtaatatcagttaatggtaagagctatgaaaaaataaagtagaagcataggggtatatggatgggcaggtgcaattattagaagaggaattaagtaagacctctctgaggaggtaacatttaggcagaacactgaataagtgaggaagtgagttatgggggaagaacattccagtaaaaatgaatatagctgatgtgactggcgaacgacaaggaggccaatgtagctggagagccgtgcgtgaaagggagaggggtaggaagtgatgtaggagaggtagcaagtggctagatcaggtgtagccttctgggccacagtaaagattttagattttattttaagtatgatgggaatacagtagaagattacaagcaaagtgacagaactggattcatattttacaaggatcactctggttactgtgtgaacagactacaggggggcaagagtggacacagagacctattaggagaccatttattcatataataaatacctactgtgcacctagtaatgacagtaatgttctaggggcagaggatacggcaacgggtagaataggcaaaaatcccagccttccagccttacattctagtacctattgcagtagcacaggcaaaagatgacagtggcttggacttgggtatagcagtgggaatagtgagaagggatcagattgagtacatattttgaagacagggtctacgatttgctgaaagagtgaacgtgggtctgatggaagtcaaatggctccaatgcttttgtcctaagcaagtaggtgataccatttactcatatgggaaacactgcagaaggcacaggttctagggagaaatctgacatgttaagtttgagatacattttaaacattaggtagaaaatataatgtgggaagctaaatatacaaatttcaagtaaaggggaaaaggcagggctagagataatttgggagttaasatagtatttaaataatgtgcagctagcaaaaccaataacctaaggagtgaggcttgaggacagcaccctggaacatctgaacttatccacacaatatataaatatattcaaataatccttgtatatctcattgtaacaaaagtagtatgtgatatagactcttcactaatatttattaataaaatatgcaatttaaaattaatttgtcatctcctgaataaaatgcttcactatcagacattcacgctgaagattaagatcatacaaatgaatctgactctagtacttttttttgctacatttaaactgaaaaaaatgaaaatagcaaaaagaaagaaaactataaaatattttttaaattgtagatttttttaactttctgagacggatacttagaaaatccccaaatatttagatattgagtaatacacttctaagtagcctttgagtccaagaggaaatcacaaaaaaatgagaaaatattttaaattggaataaaaactaagtataaaaaaacttgtaggatatagctaaagatgtgcttaaaaagaaatattagttttaaatgtgtatttcagaaaagtagaaaatctgaactaatgatccaagtaatcttttagatcccactttctaaattatcattttgtaattgataaattccactgtggtcacagtaactggaatctttggaaatttgtcaagacctgctctatggctcagcatataaccaattcggtaaataatccacatgcacttgaaaagaatgtatattctgcaaatttggggtgcagtgcttatatacgtgtcaattttatttgttggcttgctcgttcattcattaaatcaatcaaaacctaaaagtggctttttgggttgttaaatctaagactaaagctaaaagattattcataaactgaagaaataatagtgattatggaaagttaagttgtattctaggcctcaaaaggcattcaacaattgggattatttctggcataataagctgattcacaccatgtttcacaaaggtgatagcaaacagcttacctgattttcatcctgtacttccatgctgtattggtcacctggctgaacttctgtgactttctctccaaggaggaaacccagacgagtcatgagtgtgtttgctgcctcatctacagatggaggggggccaagctcctgttcagcatcacctgtaacaagaaggcattgaagaacatgaatctttcaaaataaaatggtctagttctgcaactatttgtacattcactttggtcatttctttagttttcacattttaactcaaaaattacaaagttatgaggtttttcttggactactcactcccaatataaattcgcttccaagtaaaaaatttacacgaatcaaataaaaatgagccagggaactcaaaatgattataaatgtgaggcagaaaaaaaattttacctaaaatgagtatctgtttatgttaggttgacttaccgtccatatttattcaggctttgttctaaattcagagcatttaatctcaccttgtaacaatccacagtagcacagattttaaaggacwttacaaaaatctttttatggggtcagatatatccattagcattacaagcattaactgaagtgtcatacggtttgatgccaaaacaacagcatcacaaaacacaatcatatcctattatttaggatattcagtattacacagtaaaccactccaaatgctaagaaggtaagatctgcattgttattattccatttaacatttatatcaacttctctaataaagtcacaagctgggggtcagagatagggtatatgtgtatttttgtgtattagtactgaactcaagttccatctgtgaaaaatctctacaaaactctcactgaatgtatgtcaaggtagaaaaacaaggctctatttttcctctcctattatcctcccagaggcaacataaatagatttctttgccacagaacagaaataagagaatcagtagggttatttttatgttataaacatttagataacttatttttttctcaagaacaattgaaagcttcttattccttgataaaatgaaaaggcaaaactggtctcttcaaattaatgagtaacactttcctccctcctaaaggttaaactaactaaycttttgcaaatttttctcattgtagattccagacctctagatattctggggctctatttcactgtctcctacaaagttactctgataataagtgtttcctatgtacatggttaacaacagatacgagaatttatacaacacggagatatagtcattgactttgaaaagtttataatctatatggaaaataagagtatatatttatttagcatatacttacataatgcttatgatgtacaagtcactagtgtaaacactttacatatattagcttaaccttcataactttagattccactttctaaggtagaaattattaccctcattttacagatgagaaaatagaggcacagatacattaaattatttgctcaaagtaataaaaccagtaaatggcagagccaggattagaacttgagctccctgactccagaatctatgctcccaatgagcacaacacagtgtcttcctcactggaaagaaatattacaaatggtgagaatgtctgaataagagataacttgtaataataggcatattgctcatagyatgttaatctcaataatcttaacaaagcatgttgtaaacactaagtaaggtaatcgaatggaggttcttaagagacagataactgcaaccctttctacattactactttcagtacttccaagtactaatgcagaaagaagttcaagaattcttctgtgagtggctatattagatactgctaccacaccaggtccttttcatctggtttgactggtattttttaaaccttgctaaatctactttttctttcctatttacttacctcgtctcaaaatatcatttgaggatgacattaatatattatctgtcgtgcactctataacgaaagaaatccgataccaggttatgatacgaaaaaactatctttggcaattacatttgttttgaacttttcttatttgttgatcttgagtaaaattttacacattatgaaaggcctagtagatgaattagtgggggcttctcaaataacagacagggacctaattgcgaatccctccatcttaagtcttagattatcaacggctgcctctgtctcctcttcctgaaagtatgccaggatttctggtggaataaagtagaaacagtagaggcacttcctttctggtttctagattacagacttaactgtcagtaacctcttccctattccactttcatttcctattttaaaataaattaaaaatagttacttctgaaaacaaacaagggtggggccaggcgcggtggctcatgcttgaaatcccagcactttgggatgccgaggcaggttgatcacttgagcccaggagttcaagaccagcctgggcaacgtggtgaaaccccgtctctgcaaaaaatacaaaaattggctgggtgtggtggcgcgcgcctgtggtcccagctacttaggagactgaggcaggagaactgcttgaacccaggaggccgaggtagcagttagccatgatcatgtcactgcactccagcctgggcaacagagcaagatcctgtctgaaaaataaataatatatttttttaaaaggtgggaatatctgaaatatattttgaagttgctctgtaggaccagatgaacagcttctcacttgcaggaatttattagtttggtgcaaaagtaattgaggtttttgccattatggcaccattaaaggtaatggcaaaaaccacaattacttttgcaccaacataatagtgtattcaaatactgtatgttgaaacacaaagccaggtcctcccctccaaaccatttcatttaaaatatgcttaaaatgtcaccaggtcacgcattttcatttttttcctacttagtgtacgttgattctgcattcttccttaaatactaccatttttcttccctttttgtttcatttctacttcccacttgcaagtaactgctacgataaaacctctctgcctgcaaaatgaaaatttaccaggagaaaaaagtctggccagtggaataaagatagcctttttccccctcattacaattaacaatagggccatttgaagatcactaaaagggaggatttaatggaaatagtggtagcttaagagagagaaatcagtgctaaattatcagggttattgggttcttaatttttaagaacagagaaagtgatttaaaaaaatttaagaaaattctttgacatactttaaagattgtctggtctttggaggcaatgtgtattttagaatgagtttcatccatattgtgtgtatcaaatcttctttttttgcaggggggagggtgcattatggttttccatgttcatggtttggaagacaattttgttatgatatcaatactccccaaatcaatctaccaatttaatgcaatccttatcaaaattccagctgcttgcttactcgcttcctttccttcttcccttatttttgcagaaattgaccagctgatcataaaaattatatggaaatataaggggcccaaaattaaaaaacaacctttaaaaagaagaacagagttggaagactcacatttcctattttcaaaatttattacaacgcaacattaatcaaggcagtatggtactggcatcagaatagaccaatgaaataamgagtccagaaataatactcttacattatggtcaattgatctttttttttcttttctaggacagggtctcgctctgttgcccaggctggaatgcagtggtacaaccatggctcactgcagcctcgacctcctgggctcaagcaatcctcttgcctcagcctcctgagtagctagggctacaggtatgcacygccatgcctggataatttttttaaaaatttttttgtagagatggtgcctcattatgttgcccaggctggtcttgaactcctgggcttaagcaatcctcccacttcaccctcccaaagtgctaaaattacaggcatgagtcaccattcctgccttggccaaatgatttttaacaaggatgcaatgacaattcaatgggaaaaaataatctcttcaacggtgttgggacaactggataaccacaaacaaaggtatgaagatgaagccctacctcatatatcaaaattaactaaaaatgtattgtggacctaaatgtataagctaaaactataaaactcttagaagaaaacatggtagtaaactttgtgacctttggttaggcaatgatttcttagatatgacactaaaagcacaagtgacaaaaggaaaaacagataaatcagacttcatcaatattaagaagtgtcatgcttcaaaggataccatcaagagagtgaaaagacaacccactaaatgggagaaaatatatgtgaatcatgtgttcaagggacttgaacccagactayataaagaactcctactactcaaccataaaaaggcaaataaatgaattagaacataggcaaaatactggaatagacatttcaccaaagagggtatacaaatggtcaataagtacatgaaaggatgtttgacataattagtcattaagggaaatgcaaatcaaaaccacaaggagatatcaagttatatccactaggatggktaaaacaaaaaagacaagcaataagaaatagtgaaatttattggaaccttcatacaataatggtagcaatgtaaaattgtgcagacactttgaaaatagtttggcagttcctcaagatgttacacatagagttaccatgtgactcagcagatctactcctaggcatatacccaaaagaactgaaaacacacatcaacttgtacatgaatggtcatagcagtgttattcataacagtcaaaaatagaaccccactgtccctcaaatggtgaatggataaataaaatgtcatatattcccattagggaacatttggccatgaaaaaaaaagaaatactgatacatgccataaaatgaaagaacactcactgaaagtattgtgctaagaaaatcagacacaaaagactacatattgtgtgattccaatcatatgaaatgtctggaataggcaaatctgtggaaataaaaagtagacaagccattgcctaggactgggttgtgtggggagtgactgtgaatgggcacgggacatttttttttgggggggggtgataaaaatgctctaaaattagtggtgatagttacacaagtctgtaaatatactaaagtatcactgaggtgtacatcttaaaaggatgtattttttggtatgtgaattacatttcagtatagctgttattaataaatatgaaaaccccataacagtacagatagaaccatgtacccatcacccagttttcccaaaggtaacattttacataaccacagtgagttatatgggaaaatgacactgggagaatacaattaactagactacaaaccttattcagattttgccagtttttttttttttttttggacagagtctcactctgtcaccaggctggagtacagtggggctcagctcactgcaacctccgcctcctgggtttaagcaattctcctgcctcagcctccccagtagctgggactacaggcgcccaccaccatgcccagctaattttttgtatttttagtagagatggggtttcaccatgttggccaggatggtcttgatctcttgacctcatgatctgcccacctaggcctctcaaagtgctgggactacgccactgcacccagccagattttttttttttttttaagagatggggtctcagctttgctgtccaggctgttccggaacctctgagctcaggtggtcctctcaaactcagcaccctcagcaccctcagcatgctgggaatacaggtgcatgtcaccctggccagcctgattttgtcagattttgcctgcactcrtttgttgtggttggggttttttgggtacattttgtgtatagttctgtgaatttccatgtggtatcatttttcttttgcctgaagaaatttcttagacatttcttgtagtacaagtcaactggtgataaagtcttccattttttatatgtttgagaaaaccttcactttgctttcatttttgaaatatgtatttttcagggtataccattctaggttgatagtgtctttgtctcagtaatttaaagatgctattcctaaatttgaaaattaaagaatttaaaaaaggatgctgccccacttgtcttctgtcttgaatttttttttcaaagagaagtgtgctgtcatctttgtttctccactgtctgtgatttttctgactgattttaatagtttttcctttatcattagttttaagcagtttcatattgtgtcttagtgaaatcttcatgtttcttgtgcttaggattcattgaacttcttgtatctgtgggtttatagttttcatcacacttagaacatttcttcaaaaaacacatatgtgtatgtgtctgtatatacacaaacacacacatatatgtatatatatatataaaaaacataatttttggtggttgttctctctggggcagattataacttttattagctataataatagctagctatatatggcaattaagtataccattaaccaaatctgagtaaggtctgtagtctagttaattgcacatgccaggtactattcctaagcattttacctatattaactaatttaatcatcaaactgccctacaaggtaggcaatattatccatactttacaaataacgaaaataaagcatacaaagaataagtaacttaccaaattcatatggctagtaagtggctgagccaggcaatctggctctagacctcaggctctttactcctaagttataccgtcatctccaagtccagtctctcaccatattgccaggcatcagtccccagctcccctctgcccactgaatttgctcaaaactctcaaaatttctcaagtcatcatatcaattatttgacctatatgtttgtctcatccatgaccatccaggtgatatgaagagggtctcatcttcataacacaatacactccaattaagatatgtccctaaacaaagacagtactttccttgaatggaattctgtaacttctttaataatgacgacaactttgaggtatgagaaacagatatctggttgttgaaaaacaatctctgtgagactgtgatacacaaaataaatcatacagcactcatgcattatgctgattaaaactatttaaatttgtagttcttggttttattttggctctttgtaagcagtgtgtttacgcattaggctacgctcccagaaatctggttgaggaatatgtcaccataaagactaagggattataagttttacatggaaatggaaagatccaagaatagtatagaagactcgaagaaagcccgggtgcggtggctcacgcctgtaatcccagcactttgggaggctgaagsggggggtggatcacctgaggtcaggagtttgagaccagcctgaccaacatggtgaaacccgactctactaaaaatacaaaaaattagccgggtgtgctggcaggtgcctgtaatcccagctactcgggaggctggggcaggagaatcacttgtacctgggaggcggaagttgcagtgagccgaggttgcgccattgcactccaggctgggcaacaagagtgagacactgtctcaaaaaaaaaaaaaaaaaaagagagagagagaagggcatactgcttaatatcgagattaatataaagctaaagtaattaagacacagctagacaaaagcatagataaaaaggtggtcaatggaacagagtttaaaaatccaaaaacagatctctctctatatataatcacctgattcagaacaaaagtttcactgcagtgtttcagtaacatgagagtgttttcaagtattggtgacagatcaatatgatatccatatggaaaagtaaatcctgtccttaaaagaataagtttcatatagattatagacccaaaggtaaaaagtgaagcaataagtcttctggaaaacgaccttttagtgtaactttatgacctagaactaggtaaatatttcttacaaaggcccaaaaggcaacaaccattaagaaaaaagattggcaaagtcaatcttttcaccaaagacaccattaagaaggtaaaagggcaagccatagagtgagataactactacaaatcaacaagaaagacaatccaattaaaaaatagacaaaagatctatacaggatttacaaaagagaatatccaaatagctaataagcacatgtaaaggtgttcaatattattgggaaatgcaaatcaaaactccaatgagatactgctacacatatacagtgcagaatggcacacaaaacaaacaaaatagcatctgacagtagggggcaaaggaacactgaaacactgctgtgctgatgggaatgtaaactggtagcatcaaatttggataaaaggtttggcatttaaaaaatgtatggtttcaaatttggaaaatgtttgccattttacagaaaccatatgactcagcaagtccactactagttgtataaaaaaaaggaaaagtatactaataggtgcatcaaaagacacataacaaatgttcataaaactgttcatcatagcccaagttgaaaatgtccatcaaggccaagtgcagyggctcacgcctgtaattccagcactttgggaggccgaggcgggtggatcactttaggtcagaagttcaagactagcctggccaacatggtgaaaccctttctctaccaaaaaaatacaaaaactagccgggtgtggtggtacatgcttgtagtcccagctattcgagcctgggtgacacggcaaaaccctagctccaaaaaaacatttttttaaaaaagaagccaggcctggtagtgcacgcctgtagtcccagctactcaggtgggtaaagtaagaggatggcttgagcctgggagttcaaggttgcaatgaaacatgattgcaccactgtactctagtctgggtgacagagtgagaccctgtctcacactctgtccccaaccccccctccaaaaaaaaaaaaccgtattactgaacaaaasaagatagtttcaaaagaatacatagggctgggtgcagtggctcacacctgtaatcccagcactttgggaggccgaggtggggggatcatctgaccaacatggcgaaatcccatctctactaaaaatacaaaaaaatttagccgggtgtggtggcaggcgcctgtaatcccagctactcgggaggctgaaacatgagaatagcttgaacctgggaggcggaggttgcagtgagccgagatcgtgccattgcactccagcatgggcgacagagcaagactccatctccaaaaaaaaaaaaaaagaatacatactaaatgattttatttatataaagttcagaaattggtaaaacaaataattgatgatggcagtcagaacagtgggtatgtttgtaaggggaggataatgatgcagaggaagcatgaaggaagcttctgaactgctgaaaacattcaatatcttaatttgtgttcacttcataaattttcatagcaaggcataactgttatttgcattcctttctgtatttataatttctacaaaattacaaaaaatgtattaaaaacttagggcactgaccttgagaatgaaacaatattctcaacaatacttgtttatgcttttttactctaagaaacaagtctagaattatgaaaaaaacaaataacactacatatttaagctatatattttaatactatttaagttgctcagatgagggatactaaatatcagcaaacttactactctaaacatttagatctttcatttaaagttcctgtcttataaagacataatattagaaatcaagagatttcaaggaaattatatatgaaatatgttatgttttaaatagatcttcaactaatgaaaacttttatctattttttcccactcaggaaagactgcaccaaacacatttgcatttctttttttttttttgagacggagtctcgctgtcgcccaggttggagtgcagtggcgcgatctcggctcactgcaggctccgcctcccgggttcacgccattctcctgcctcagccttttgagtagctgggactacaggtgcccgccacctcgcccggctaattttttgtatttttcgtagagatggggtttcaccgtgttagccaggatggtctcaatctcctgacctcgtgatccgcccacctcggcctcccaaagtgctgggattacaggcgtgagccaccgcgcccagcctgcatttctttttttaaaaaacaaatgacaaagactcagtttaccagatttacttaaattttaaaaaatattttatatatttagggaatacaagttcagatttctcacatgcatgtatgacacagtggtggagtctggactgtcagtgtacccatcactcgaataatgagtgtgcattatacgcagcaggtaaattttcgaccctctcaaactttagtttttaaatttcagcttaacattactaatttaaaccactgtcaaaactaagttgctagcattcatccacaactagaaaacatcctttatttatattaaactagaaatgtattacgacgaatgcattaatatcttgcactactaaatagagaaaaaaatagaaattatttctgtggaagattcatgctgccatgctggcaatgttaacttcacttgacagaaaaaaataggaattatttctgtggaagatttatgctggcaatgttaacgtcacttgacactacacctggctcacatttcagacacaatggaaaagcagatccatgctggtgttaagtgtacaatcttgtcctaccactactcaagagtcaaggttcaactaagagtatatttaataatgaaagcaaagtgcatacagagatttactattttgaagtttaaaaaaaaggtcctattatgtggcctcatcaataaattcaaaagtttaagacaaatagggactccaatgagctgtttataaatactctagattaggcacaatgaaaaagaaagtcgaattcatctgaaatcttcaaagaaatgttccttaatcctcaatggtgcttgttatagtttaacatttctgttcaaatgagtgtgttgagttacttgttatgcaagggtagcagctgctcctcaccatttatcggtaagcacttcgactctttcttgacccttttcaacaattctctttgtagtgattttctgccatcaactattttaggtataagttgatacaaatttgaagctgcccatggcactaccaccaaataacatggaggaaaatgaagtgaggcctccatgacctcatgattgaatgaagcaaattgtgtatcaaaagaagaaaatccacttccaaaacatggaaatccaatcaaggtggagaaaaatgactgttcctcagcttctgcttcttcaggaacccctttgattccccaaaaaagtcctcaaatgagttttcatagaagttgaataaaaatgggtcccttccaccaaaaatgtccctgaaggcatcatctgggttacaggaatgtgacgccaaactaaaacgaactgtcaaaatgacttccaactcctcctccaccatttaatttctctgccatatttgtcacagatgtcccattttttagcatctgataatatctcatatgcttcagctacttgtcggaattttctgtttcttctctattctcaggatttttatctggatgccactttggtgccagtttccaatatgcctctttaataaccttggagcggggggagccaggtgggcatgtctctacatgcctagaacttcatagtattctaccaagtttcaacagattgtaggaacaggctggaggacatgagcggtggtgtcaggaagaaggggaggcagggctcggctctggcacagcagtgctggtggcagtgatggcaccccacgctttcctctgaaaacctttgttttaaattggctatttaggaattctgtggaaatgacagccagaacacaagttctcaacttctcttccgcctactacctacacctcactggagtgatacaactgtcaaaataagggtggtagtgacacgaggcaagtacactggaagctgaaggtagatgagaacaggagtgatgcttcattttctgtaaccaccgaataacaagggaagagtgaggagccaagagcaagggaaacagcaacaaccttagatctctccagcttttctggttgacagatgctggtgaatccacttggagagggggctgtacctgctaaatgtggtccttggaggttcaatcattccgagaggcaatattattacccgacaaagcagaatttaaggtggtaggaggtgtcggtgtcaagtgaaatttctgttttcctggaattgacaagtagggcccacagggcaatgaacaaaagaccttgaagacgcattttaaatacagacctctgggactacctttctccctgctggcttgttgaaatgttccatttcagtaggcatgacaatacaactttctcccttcctcacctggttcatggttttcaacatgcctagaaagaagttcatgcctgtgcctataggccccaaagttgagactgtagagggtagtctataccactcaggttcatctaccttccactaggccaactgaacctacagggagctagtttagagagaggaccaacagcaagaggacagaagcccttccaacatcaaccctgggtaaattcaggttattatcagaagaccattaaagatatgtatcactaacaaaccatgggcagttatataaagagtatctttatttattctccctcctctctactgagaagagtaagcagaaagaagaggcggctctgtgacattgcaaatttagtaggaacacacacgtccctctaattcggagctaaattacatcactatgcctactcttttttttttttttttttttttttttttgagatggagtctcactctgtcacccaggctggagtgcagtggtgcaatcttgactcactgcaacctctgcctctcaggttcaagcaactctcccgcctcagcctccctagtagctgggactacatgcacctgccaccatggccggctactttttgtatatttagtagagacacggtttcaccatgttggccaggttggtctcgaactcctgacctcaggtgattcacccgcctcagcctcccaaatgctgggattacaggtgtgagccaccatgccaggcctttgcctacttttttctactactatattctcagtgcctaacacataggaggcattcaagaaatattttctgaaagcatgaagtaagtacttcttagagaaggacacaatcagatttgaatataataaaggttcttctggttgcattgagggtaatggattggaggaggatgaggcaaaaagactagaaagtttctcagcttcctgataacacaaacatataaatctgcctatacatcattcatccttttaaatagtgatactgtttaaatagtaatacttgtcctgaacccatcaactctatcatccttccctccttttaacagcaatattgtcccttttcctatctaaaatgaatctttccaattatattttggatcttactgaagcctgtcctcagggaaacttgataaaaaagattagtctttctcaaattcatactcgtgctttcagatgagtttttcccattgagtgttaaacatattccaacatcttccaacaaatcacaaacaactttacttgaccactcttctcatatcagctaacaacttaaagtggagcaatggcattaaggctagagggaagccattatttttgttttttgtttttttgagatagggtctcactttgtcaacccaggctggagttcagtgacacgatcagcctcgaactcccaggtgggcccaagcaatcctcccacttcagcctcttgagtagctggtaccacaggcatgtgccaccacaccmaggcttttttttttttttttttttaaagagatgtagtctccctatgttgcccaggctggtcttgaattcctgaccctcttgcattgacctcccaaagagctgagattataggcatgaaccatgcccagcctagaagaaatattttgtaaattaaaggaagtgctaggaagagcacagagacaaaacaattatccttattttgggagggtgaggggaggaaagggatggaacaggattcttagaggagggtgtacttgaaattaatggatgagtttgacattgaacagtagagtcagggaaaaagagcagagggaacaatttgtaggttcaaattgtttgacttgccaattcaacataaatacaggacttgatcacaactgattaaatgcagcatatttaatattattttaaaacagtgtttgaagtttatttctggaataatgttgatagtactattagtagtagtagtgatgactgtaacaataacttattgagatattactgtacttttctaaatgcactatatgtattaaatcatttaatcttcacgacatttcttatcttacaaatagcaaaagtgaggtacacaaagattaagttcttgcttgtctatggttacagagttagttaagtaacagagacaatatttaagtccaagcaatctggttcttgagcctatgttctcaaccatttcatcatcctgccaagaaaactgtgattattaagtacaaattgtctaaatagctacttaatatatttttatctttaacagcatctagcagaattatctgatgatacaatgagcacagtcccttattcttgaggagtttatagtctcacgggggaaataaaaaaataaagtttaattaaatcacagtaaattaaactctgtgataaatataatacaggccccctcaaaaagaggattctgtaaaaaagcaggtactgaatatttcagaatatatgttggtcattattttcttgatgatgccaattctccagtcagagatggtttacactttacaacatttgaaaaaagtaccttctacttaaggtagccagtgtgcacagggattaaacaatgattaaaactgtgccaagaaatgaatgtctaatagccaatgtatccaaattcctaatctgtattcctaacatggcaagctgcacacaaataatacacaaacactatatctctagttccccagactctcttaattctcagcattcttttagcatttgcacatcagattgtttacattttctgatttgttgattataaactgcttattctcatctatttcaagacttagaaatctgtgccatatttaatcaaataaactcatgctttctctttaacagagttgtaaaaacaatgattagtttggcccaactgccaaagcaaacctggctatattttcatttcttagttctcgaacgattacctgaatttttcattgttctgaggaatgttagaaaataagcagctgctaaaagcaggggccgcaatttgtcacaacaaatgttgaaaaaggcacggaagctcttccacatccttccaaaactgagctcctagctgtgagaatcaatgcccactacttttcaagaatcaaagcaaccacctctagcttatgtgcgcccatagggcagttttttgtktttttttttgagacagagtcttgctctgtcgcccaggctggagtgcagtggcgcgatctcggctcactgcaagctccgcctcccgggttcacgccattctcctgcctcagcctcccgagtagctgggactacaggcgccctccaccacgcccggctaatgttttgtatttttttagtagagatggggtttctccgtgttagccacgatggtctcgatctcctgaccttgtgacccgcccaccttggcctcccaaagtgctgggattacgggcgtgagccaccgcacctggcccagggcagttggttttaaggcgctgctccatatttattagtgcccttgagcataatagaagagggaagaaatataagaaacaagagttgcaaaatagagataattgttgaaactggaggatagggacatagaagtaccttggggttatgtttatttatacttcccacaataaaacttttttggatttgtccaagtgactttatttggacaatgcgatcttacgaggagaggcttgaaatgtgcctgtacagtttaacttgtgttcttgtgctctggtgatacaccaggagaagctcctggctgataccccttcagcctgaacccagaaacaatcacagatgatgagctcaacttgaatgctagagccatccagccaacctacagcacgaatcagagccatttcaaccaatacttgcaagcccatgagttttttaaagtgcttatttttggttgctgtaagttttggagtggtttctcatgtaccattattgtaggcatttaatttttaggtatttgactcaaatacaaccataacttaattagcagactacgataaaattctagtggcttttcttaccatatattttctgctcaatctaagcattctcttagtcattttcctactcactcactaccatctagttgctatcttattccagattcaattccatttcctattcatctactgatcttctctttctaaaactataattggcaaataataaactattacctatataacatatacaattcaataaattttgtgtttttttttttttttttttgagacagagtctcactctgtcacccaggctggagtacaatggcacagtcatggctcactgcaacctccacctcctgggttctagcgattctcccacctcagactcttgagtagctgggactacaggtgtgtgccaccatgcccagctaattttttgtatttttagtagagatggggtttcaccatgttggccagactggtctcaaactcctgacctcaagtgatccgcccacctcggcctcctaaagtgctgggattacaggtgtgagccaccgtgcccagccgcaattcagtaaattttgataaatatatacatctggtaaaactaccaaaatcaagatactgaacattttcattactctctggaagtctgtatgtgtccctttgcaggcaaactcactctcaactctagtcccaggcaaccactgatctttttcctgttttttttttttttttttttgagatggagtcttgctctgtcgcccaggctggagtgcagctgcacgatctcggctcactgcaagctccgcctcccgggttcaggccattctcctgcctcagcctcctgagtagctgggactacaggtgcccgccaccacacccggctaattttttgtattttttagtagagacggggtttcactgtgttagccacgatggtctcgatcttctgaccttgtgatccgtccgcctcagcctcccaaagtgctgggattacaggcgtaagccaccgcaaccggccttttttctgttattttagtttctattttctataatcttacataagcttatataagtaattaaataggttatataaggaattaaacagtatgtattctagtctggtttttcattcagcctgttttacagatcgtcatgttgttgagtatgttaatagtttgctccttttcatagctgagcagtattcctttgtatggataccacattttgttgtttccctgctgataaacattgtattgtttccagtttttggctgatatgtataaaagtgctataaatgtccatgtaaagtctttaagtggacatatattttaatttctctttggaaaacacataggtgtgtaatggctgagttataaagtttataattttagcttcataagaaattgccagtttccaaagtgactggtgactttatactctcccaggctgtgcatgagagttcctgttcctccatattctcgccaacacttggcagtgagagcctttttaattttagttatactaataaatacacagtggtatctcattctggttttaatttgcagttctcctgataatggtgttgaacatcttttcacgtgtttagtgaccactcttacatcttcttttgtgaacaactgttcaaatatttcatccattttaaaacttcagttgtcataataaaatggtggttgtttcaagccaaaaaaaattcagttgtcttcttgttaattagtagtaagggtttatttattttggatcaagggtgtcaggtatatgtacactgatattttctcctattttatggctccactttccattttctaaacactgtattttgaagaacaaaacttttaaatttaggtaaagtccaattttgcacatttttcttttatgactcacatttctcatgtcctatccaagaaatctttgcttgccccaaggttgcaaagattcagtcctagctcttacatttaggtctaaatctttttttttttttttttttttkggsgggggagacagggtctcactccgtcgcccaggtaagagtgcagtggcaccaacatagctcactgcagcctcaaactactgggctccagcaatcctcttgccttagcctcttgaatagctgagactacaggcacacagcactgcacctggctaattcttaaattttttctagagaccggatcttgctaggttgccagggctggtcacaaactcctaggtttaagcaatccttcagcctcagctaaatcttaacttttgtgtatggtatgaggtaagggtcaatgtccatttctccacttaatttccctaacatttttatttaaaaataagtcctttaactttattattcttttgtaaaattgctttaaacttcgttatccttttgaaaaattgctttgggtattctaggtcatttgcatgttcgtattagtttgcaaatgtctacaaatagtttttttctttggattatgttcactcaatttggggaaattgctattttaccaatattggatcttataatccataaacatgagaaatctgttggttgtctttaattggtcttaacaatgtttatttataatttttagtgtacaagtcttgatcaaattttgctaaatttatctctgataattttatgatattggatgctgttgtaaattaaattgtttttggatttaattttccaatggttctttgctagaatatagcaataccattcatttttatatagtgacctcactgaccttctcttctgaacacatttatatatgtaattacatttatataaatgcaattatagaaatctatattacaggtatttgtgtttatatattgctctgctaacatacaaacatatttatgtaatgtaaaagtagttagagtaggagaggggaatctccgcatttactctggaatactgacatatcaaagcaggttaccaggggctttatttacaccaaatttggtagaaataatgatgatatgctaaggaattaattagctctagcatcaggtttcttaaaccagaaacggagatggacaaagattacattctcaattcttcaagcatgtccctaaatgtatacagaaactttctttaatgttcgtaggagcaacaatttgggggggcaacactttgaaactttgtgttttccaacttaattccaggaaacagatttcaagtttctccaagtggggataaaggtaggtggagtggaggtagtataaggctgtaagaaaatgagggtaacaaaagagctgtaaaactagaagtactgtaaagaattgaaagagtataccagaaaagggctttacctcaccctgcatagctttactgccaagagatgactaagtcaaatcaattaatgtggaaaattatgcatcactaagacattaatagatgccaaagtcatgtcaaaaatctgccttcgtcactggcagtgacagcatggcagctgtcatgaagttcataaggtaccaacaaaagagaatggcacaagtggctgtaggggaggatgctaaggtgaaggtgttaacaacccaggccagtaaaagaaagaacttgtagagtggaattatagtagctattgttccaggtgaaatagtgttcttgtcatttttactaccatcggtgctatgctattgttctcataaagcataaggaagccagttacatcacttaatttttttatatgaataagtctgattattattaaaaaatttattttgtgtatgtatgttcaagcatggaagtcatacatattcttagaacagtgtaattatgtgaaaagggcatgaagtgaagatcaccccaatattaacaggaaaagcctgtttattcagcacttgctacagcaggggagtcagccacaatcacctgcatttggcagagacccaaaggcaggcacaggaatgggaaagttttataatagaaaaaaggaaaggcttcagatatgcgctaactggaagcacctggcttggagaagctacaggcaggttaactagaaacagggcataccatgagattgattaggggtgcatatttggctttctccagttggtcttaagttggaagcaagggcaaaaattagagaggtcatcagttaataatcaagccctggccattttgtcctgattgttacaagggttactgttatcttcttggactgtctgctagagacagtggtctgacttgtagatagcaggttggtttcttgggttggttgctgcagaccagaggacagagttctatttttatatatggtcactgtctgtctacacactcagtctctcaaaggatagtgttaagataaacttcatgtatttctcttttttccttgatttttgaggataaatgtgttatattttgctaacagatattttcctgaaattctctttgttttatagacaattatgttatctaattacatttattccctttccctcacactgattgatcttaggtggtggatatggcagaattctgatccagtaaagttttacgcaccttccttctgatatgccattcgcatttaccttgtatgtagcctcccttccatggaagaagataatttagcagaaatttaaaacaatgaaaaatcaaaaaccactaaaagatataccactccctaccctcctaacccccaaggtagtgaaattagattataaacacagattaagaagtcatagttgtagttgttcaggcttataagcctttttgcagtaaattagaaagtctaaagagaaattcttagtagagagaacatatgttatttatatatatttataacatactaagtttcttctttttcccttcctctgagttcttaggttcatttcactcattcagcacacatttagtgaacacctactatgtttcagtgactacatcactatggatacagtagcaggcataaaggagatgatgtattaaattatttaaatgggtgattttcataattttagtgtttatttttcttgtttggatgtttgagaagaaatgactgagggactgcagttattaaaagttttcattagaaaaatgctgtgatggccgggggcggtggctcacacctgtaatcccagtaccttggaaggctgaggtgggtggatcacctgaggtcaggagttcaaaaccagcctggccaacatggtgaaaccctgtctactaaaaatacaaaaaaattagctgggaatggtggcgggcgcctgtaatcccagctactcaggaggctgaggcaggagaatcgcttgaacctgagaggcgggggttgagaatgtgtcattgcactccagcctgagcaacaagagtgaaactccatctaaaaaaaaaaaaaaaagaaaagaaaagaaagaaaaagaaaaatgctgtgatgactcagctgtagtttaattctttcttctctccagggcaaccagcatataatcagtgtcattataaaaaatgttacttggttagggacgagataaggcagttattgtactggataattcactgtatagaataaattttaaccaagaaaataaaatatcattgctctggtaaggaaccagaaaacagcatccatattttatgcccttcattgtaatggaagttttacttctacacaaatgaattctaaccaatgctctttcactttaagacatgtaaaagaaactatgtaaaacaaataatacctttagattttaagggcagctttctgttccacagtaccaaagaggatttacagggattaacagaagagtaagtctttaatatgtagatatagtaggcatcttgtgttataatacaaaaatgtattatgtgccttttgatactcagttttaataaaacattaatcatcagataacattcatcagataacaacattcctttcaaaattggtttgcaacagagccaagaaacagaaatctagactgtattttaaagcttgtggctcataatcctcttcaaacccttaaagaaattctccagttgttttgcatgatagctcttattctctattaaaattttttttctggcagcaatataaacatcagcttcacctactcagaattataatgtaactattgtgactactgtagaaggtaatataaaagcagaaaataataatgctgagcatacttcaatgatctaagaaatagatttggggctgggtgcggtggctcatgcctataatcccagcactttgggaggcggaggcaggcggatcacatgaggtcaggagttcaagaccagcctggccaacatggtgaaaccctatctctactaaaaatacaaaaattagccaggtgtggtggtgtgcgcctgtaatcccagctactcgggaggctgaggcaggggactgcttgaacctgggaggtggagtgcagtgagctgagatcgcaccactgcactccagcctgggcgagggagcaagactccatctcaaaaaaaaaaaaaaaaaaaaaagaaagaaatacatttgggacatttgggatttgtggctggatgaagtagactatattctctatcccaccccactcccaatctaatgccaacagattgagtaacaccaaatggagatcagaagcagaaaggcaaatttttgagcaattcagtatcatgcgtagtaccataacaatgataggcaaaacttgtcaaaattttgatgcaaaattctaattcctttgagatttagtaccaagtccaaataagacagtttgctcaaagagatggatcttgtagtccaactctagaagcctccttgaaaagggaacttctttgtattacaagtaatcaactggttaataataccatttcgatttcagaatatatagaattccccagaatttaatggggattctgtgtccaaataggtggcattctaagagtcttttagagcacagtctactcctgtctagcttcattgtgagcacaaaataaaaaaatacttttacatactttagtatgtgtgtgcaatttaaaaatacaaatgctagaatttttcccccaaaggaaataatggcagggacttttcagtaattgaagaccttccagctgaggataactaataacaactgaacaaaataattttctttctttttttttttttttttaaatggaatctcgctctgttgcccaggctgtgagagcagtggcacgatctcggcttactgcaagctctgcctcccgggttcacgccattctcctgcctgagcctcccgagtagctgggactacagtcacccaccaccacacccagctaacctttttttttttttgtatttttagtagagatgggatttcaccgtgttagccaggatggtctcaatctcctgactcgtgatctgcccgcctcggcctcccaaagtgctgggattacaggtgtgagccaccatgccccgccaataaattttttttttgagacagagtcttgctctatcacccaggctggagtgcagttggagtgcagtggcgcgatctccgctcactgcaagtgccgcctcctgggttcacgccattctcctgcctcagcctcccgagtagctgggactacaggcacctgccaccgcgcctggctaattttttgtatttttaatagagacaggatttcactgtggtcttgatctcctgacctcgtgatctgcccgccttggcctcccaaagtgctgggattacaggcgtgagcctccgcacctgccataaatttttaaaattattattattattattattttttgagatggagtctcactttgttgccaggctggagtgcaatagcgggatcttgactcactgtaatctccgcctcccgggttcaagtgattctcctgcctcagcctcccaagtagctgggattacaggggtgtgccaccacacccaactaatttttgtatttttagtagagacggggtttcaccatgttggccaggacggtctccatctcctgacctcatgatccaatcccaaagtgatgggattacaggcatgagccaccatgcccggccattttaaaaattcttaaagcattaaagaactgacatgatggtgatgaatcaccaagacagtatcagggagaagatggaatttagaatggaggtactgcctagagagagccacttcagcactgggaagcatctgttaaccagggagaaatgactgatcagctggagagagagagaaaaaatcatcatcctagcttcatttatttctacaaatatttccaaatactgaatctaacatatacaaataattaggggcatgaaaatacaaaagaactaacataagtaataggcaatggaaatagtaaaggtgagcattagaggactatagctaatctcacaagataattcttaacactgtaaaaataaggtgtaaaagggttagtgtctttgggaggatgagtggtggagatggaggaaggaaagagaaagttacaggaacaggagtcatttgatgaccatttctccaacaccactagaggtaactggttgaggaaactctcctttctttcctttccaaagcaacttcacatttaaattgttcagtcatgtataatgaatcctccgggtatagctaaatcataatagctgagaacaaatgatattccaaacagtagcatacatgtctaagctaataaaggatctaaatcaggaactcttgatctgagaccctctgataaatgctgtttgagaagtctgcaaatcctttgaaactgtatgttttaacagtaagtgagtaacggatattttcattctcccactctccaatccttccttgccaccttctaaaaaaaagtaaggaatcccactaagccatagcaaaggttacaaactcaaatatcttcaggacacaagcagttttaacatatctcacatagctaggggtaatggttataggacatgataaagtatatgttgaattgcagagtataaatacagcctgaaggcattctaatttttaagtatatgctggcttaccagtttttggatacattctctagaataatttgttttaaaattaaatgtaagttggaagttaagatggtggtctgagatgtttttcatagtttcacatctctcactgtgaagggtccagagaacagaaaggtaggaagaatggtcccttgcaggtaggtagaaaaactagatccatattaagctatcaatggcacgagtcattattaacatgcaactggggaaaaataatgcctaattagggaagccacacaaaattatatgaaatcacaggacctcatctcttgaaaagtatgtgtttctctacttacccttcctcatcccctctacctctcctccgaaactactgccttctttgatttttctttttgaagatatgagagtcttgctatgttgcctaagctggtctcaaactcctggccacaaacaatccttctacttcgtcctcccaaagtgttgggattacaggcacgagccatcgtatctggccagctactgccttttaaaaattaactcacctagggcataagttaaagaatcaatttttagggaatttctctagttgcagaggggagtatttagatgcctagctttagggtatagaatgggagctagcaataatgcaacttggttagaacactctaaatctttttttctttccytttcyttttttttttttttttttttttttgagacagagtctcactctgtcacccaggctgcagtgcagtggtgcgatctcggctcactgcaacctctgcctcctggactcaagtgattctcctgcctcagcctcctgagcagctggaattacaggggtgagccactgtgccaggcctgaacactctaaatctttgattcttattaattttggtttgttcagactagttttcacataaaactattacactgggcaaacaaacctaaatgttttatttatttattttttggaaacccagacagtgggcaaaattttgtatgtaagtgtagttttctatagagttaattaatacatttcatcagttttttaaaagggcatgtgaccataaaaattaagaaccactgaactaaagataagcaaaaattaagccagtttaaaaatgaaataaactaagttagaaaacaaaagaaaayaacattcactgtagtgtacccattaatgaacagattgtcatgtaaatgccaccaacccaaccacattttctgaaattttatacttgtagaacatacaatataattatattttttcattatattatcatttttgagtatttactatgtgctaagccctttacttacttaggtaatatttaattctcatgacaatgctatgaggtaggtattattacctctatttcacagatgaggaacctgagactgaggaggttaagtagcttatacaaatgtacagagttcaaacttagatcaaagttagtttctaaccattaaccaatggttcttgaattttactgtgtgcacaagaattacatctatggcatagcgtcaatgaatggcactggaattcccactaccagaatgctttctttctccattcataattcttttccctctccttccttccttccttcttgtattctctccactcacctaagcttctgtctcctttttttctctttcttattcctatccccttaactgaactgcagacctaccagtagtgcttatgggcaccattcttagccccacaggaacacataaaccctatgtttcaaccaaacccttacaactcgaacattttccccatatatatgtatctgatgagaaaagaagcttttgtagccatctgcatggggctgtggagatctaacactgttatgggtagaagtggtatacctaaagatgccagctttgacttcttacagggttcttctccattaatgagaaattcaaccaatgggacaagttctaatattctcaacattactgttctgagctccacattcaaacctaaggcagtgagtttaatggttttcttttgcagttagaatcttaaattctctgacctttctttcagagctcaggactcctagcagaagctaataaagaatataagttttatagaaatctatgcttctacgattaagtgattttctaactatttgcctttgttcctttatatgcttcctaaaaacagtaagtaaatttgtctacttagtatttaataatcgtacataacttagacatacacagataaatggaaaaaaagtcctccaaacaatctctatctctctctctctctctctctgtgctatctaggaatacaatttttatgacattacaaactcttccttttgcattaaagaattcattagtttggcactttggtaggggaacagggtttcaaatgcttacactacaatcttccatcacaacttcctactcttctgattctctcccattggaaactggaatcactgtagagatgggatatacagaggtggaaagtattcactgtttagcaactcttgcactagtgtttcctggcatacaaaactgcccccagtctacaaggggtactacatgcacatcaatgtatgatgatgactatttggcttaaatgggatacaatatttgaccagctcaagaaccttcagtgcttgactgaaatttctaagactgatatttcttactgaaatgttcctttgggttttaaactgaggtttctattgtttgctttcaacagacatatgtttgacatacaaaatatggtaaagatccactacttctgcagtgttatatttccatattattcccttattggcctggatttcctcatcaatagcacaattcattcaaatgtggaaagaaaggcattgatacactgatcagagtaaggaaagtaatatcatatcatcaaaagtcacattaatctaaatgacaaatttattctctgttggtttccaaatctgggatgttttctagaagttgcacaataaataatatgatgtaattacctaggcttaaaagaaaagcaccattctaggaagaagtaatccactgcagtgtagcagtacagacygggtaatgggaaagacctacagaccgttataagaagggcagcagggagcttttaaaatgaaaaggctagagtatcagtagcactatggaacttttctgttggaagacaaggatgaacaattcatgcttccaggcaatggaatggcacatatcaaatacgccgaaatacagagaagacacactaaaccaggtatctccaatttgaaagctttttgggcataaactggaactttgtcaagtgcatttctttcttttttttttaaatagggtctcactctgttacagcccaggctggagtgcagtggtgctaccatagctcactgcagccccaaactcctgggctgaagcgttcctcctgcctcagcctcccaagtagctcagactacagccaccacgcctggctaatttttatttttgtagaggggtgggtctcggtatgttgcccaggctggactcaaaactccaggccttaagcgattctcccacctcagcctctcaaagtgttggaattacaggtgtgagccattgcacctggccagacagtgcattctgatggttaattttatttgtcaacctgactgggctaagagagagccagtaaaacaacatttctggtgagtgagggtgtttctaggggagattagcatttaagttggtagaccaagtaaagaagatcatcttcaccaatgtgaatggacattgtccaatctgctgagggtctgaataaaagaaaaaagtagaggaagggtgaatttgctttctctgcttgagctgtgacatctatcttctcttgctcttggacattggtgctcctggttctcagccctctggattcagactgagacttacaccatggttctcaagcctttggttttggactggattactataccaccagctttcctgggcttccaggttgcaggtggcagttcttggaactttatggccttcataattgcctgagacaatccctcataataaatgcctttctctgtatctttatctataacctattggttctgtttctccagagaaccctgactaatacattcactgcttcatttaaaacttataattactgcagttatagcttcagtttcctttgtatttactgtgatgtgttttggcttttatataaaagtatattgactaaaaatatgtaatatacttcatgccactttcatgaggtctgggtttagaaaaatctctcatggtgccatattaagattttgatgctggctaggcacagtggctcacacctgtaatcccagtattttgggaggctgaggtgggagggttgtttgagcccaggaggttgaggctgcagtgagctatgatcacaccactatactccagcctgaccaacaaagcgagatactgtctcttacaaaaaaaaaaaaaaaaaaagctgctgatgctgcagctaagatttgctaatttatctcccagtagtgatttgtttttcttgatcaacacagaaaggaatgttcaagaacaaaagtaacttagcacccatttgtactgtatctttccctactactactatttaaaaaattttcaaagtataacattattcctctcatcaatatgtagccagtctttaaacagccaaatgtatttatgccaaaaaacaaacatgtattacatacattatagaaaattactatacccagttactatcttggactatatttactgatttaagacagatatccttagaataggatttcctaaactaggatccagggaactgagatttggtttgtgctaaatgagctacgctaaactacgaggtctatgaatacaggattctattcagcattttcatcactgcatcccttgtgttcagaccaatgcctactactatagtcgtcaacaaatattaaatattaamcaaatattaaatatttcctttcaaagaaggaaaatatcagaataaaaggtagtggtaaagattagagatgtataatagtatatagtaagttactttcttccgtaacactccagcttaaaatcctacatcatcaaattgtaccaataactgtccttccttcttgtagtttccctagacttcaggtcagaccactcattctttgaagattatagctattggtttactctcatactctccaacagtattacaataacaatttttctattcacacagatgatcttctggcctcagtttgttgacttcctcccctccggtgatctcattccccaatcctctttcagtcacccactcccatagttatattcttaacactgtcattactaatgactacaaactgtccataaccttaatcttaaatgcctctgacaaccacttgatatttctagctcatttctttgagcctattggtacctaaaacccactgaatctacaaaagttcactgtccttcacccctcatgttctcatttcctctcctgcttggcttagatttcacagtcatcaccataatcactcctttgcaaataccctcaactcccttgatcctctttaatcttctcattccaatctggccaaaccccaaccctggttaaggtccaattcttcacctaatgtgtaactccagtatacagttccagtacagttaaacgtgtctgctaacaagtccctcgttaaattaatgaccactaacgttaagtgggacattagtactgcccagcaatcctactacatttccctaatccattcactctcggaacacattccatggcttcttctctttcttcaaatctcaatatttctttcctcatcctcactttcagctggttacatcactctccatttaatttagaaaataaaaacaatcagaagaggctttctaccagctcacgtcaccatatctacctacttacctgctgcatctgttcccataagataaccttttttctagttagttcactcctttccatagtcaaccccttcatttttgctttttatctcatttgtcatctactcaagtgtgttatttcagcatttcctatctttcttctgcatcatcaatttcctctctctaccagagcacagcattctagtttatttaaaataaactgaaatttattctagtttagaaaatccttgcttgtctcatagtctcctacagctacttccctactgctctgttccctttcatcacagaattctttgaaagagcagtttatactcattgattacaatttctctttcccactcacttttaaaccctcagttttgttttttttttttccagacagggtcttgttcttcacccaggctgtaatgcagtgacacaatcatacttcactgcagcctcaaactcctgggttcaagtgatcctcctgcctcagccttccaagtagctggaactacaggcacatgccaccatgcctggctttttatttttattttgtagagttgaggtcttgctatattgcccacactggtctccaactcccggcctcgaatgatcctcccgtcttggcctcccaaagtgctgcaattacaagcatgagccaccgcgcccagcctgcaatcaaatttctgccatcaagattctaccaaagtggcttgtcaagattgtcagtaacctgcaggttgcaattttaatagtgtcaatgcaaagtctcaatgaaaaggtgacattttagcaaagatcttaaaaaaggcaagggaacagggtagggctagtattaaaaatatttaacaactgggacagcatgagcacctactactaatcggtggatgtacacttgagcagggtcttagaggtcatcaaagtaaatctggtgatgacagcagagtcatcaatatatacatgtccttaaaagatgtgggcctgaatgagaataccaacaaagtgagcacagagaagatatctatggtccaggtcttagagtattccaacttttagaagtgggagaagaaaaggaagtagcaaaatacactatgaaaatgatgcccgagaattaggaagaaaacaagaataaggtgataacttggagtcacagaataagtgctttggggaagagggagtcagtaactgtgttaagtgttgcaggtaagttaaataaaatgagaactggaaacaagcattagatttagcaatgcagagggaagaaagtgactgcaacaaatggaaaaacacaaagctgttcagagtatatggaatctacctattttattttattttagacatggtctcactctgtcacccaggctggagtgcagtggcttgatatcggctcactgcaacttctgtctcctgggttcaagcgatcctcccacctcaaccccccaagtagctgggaccacaggtgcacaccaccacacctagctatttttttgtatttttagtagaaatggggttttgccatgttgcccaggctggtatacattttatttcacaatggttatgaagaaaacttttgggttttgagaaaactcattaaaggatgaggcttcaactgcactttcaggtagcgagcaagcctatccatcctttttcgtttggcaagccttaccactcctctacatccttttcagtcataatacatctgggtaaggagacacagttaacatgtgaacaaaatcaaatacacaatgcttttctatataagacagactataaaagccaaaaatatttgaggatgaccatggggggttaaagtgatacaaaaggcttctgaaggacatgtgaagagacaaacacacataaattttaaaaaagccaaaagcaatactcatcaaaaatatgtagtattggtgaaagttctgaggaaaatattttgatacatttctggaagaaatgtaccagagggaaatctagtaatataaagatttaagattttgaataatcctggatttctatcaattccatttcaaggaattcattctaaggaaataacggtagatatgaacaatcattcagcaattagtatgttcactgaagcacctttataacaacaagaaattaaaacaatttaaatgttcagcaacagtatattgttttttaaaaattatgttacatttatataatgaaatgccctaccaggagaaaaaatgatggaatagttgttaaggtaaaaacacatacaacgtaattttaaaaagtcaatttcaaaacatgatatatacaatatcaccttaagttttttaaactattttttaattttgtgtagcgatggggtctcactatgttgccaagactagccttgaactcctggcctcaagcaatgctcctacctcagcttcccaaagcaatgggattacaggcatgagccactgtgcccagtctatcgcctttactttaaaagtacgtattatggactgaatgtttgtgtctcccccaaatttatttgtagaaaccctaattcccagtgtggctgtatttggagaaagtaattaatgttaaatgaggttataagtgtgcagccctgatccaaataggattagtgtccctataagaagagaaacctctctgctctcattctccctccctctcctgacatgcatgcacagaggaaaagcatgtgaggacacagtgagaaggcagttatctgcaagccaggaaaaatgccctcaccaaaaactgaatcagccagaaccttgatcttgaacttctagcctccagaactatatgaacagtagtttgttgtttaagccacccaatctatggtattttgttatggcagcttgagcagatgaataaaatacagccttttctcagtatctgcaacagactgatttcaggacccccctcccaatcccataccaaaatctgtggatcctcaagctccttgtatacaaaatgacgtagtatttgcatatatcctacgtatatcctcccgtatatttcaaatcatttctaggttacttacaataccatatgcaatgtaaatgctatgtaaatagctattataccatattgtttgtattagtttttactcttgtattattatttttgtgtgtgaattttttaaatctgtggttggttgaacctatggctgtagaacctgtggatatggaaggccaactgtatgtaaaaagattgctaggctatattccaaaatattaacaatggctttctgattagtggggtcatggattatgtatattttcttattttagcttagttgatattttatataatacggataactttttaaataagagctaaaaatattttcaaaagacagtgaaaacattcttcagaaaacttcctgacagtacttatgtttccaatagaaactagacacttaagtttattttaaaccaagagaactaagatcataacttcttcaatgggtcccaataatccccgtcccttctgtaatcatgaccttttgtaattccctccacttgagtgtcttgagtgtgagttggacctactggctggcttctaatgaagagaatatggcaaaaagtgatagaatgtcacttccatgattaggttataaaaactgtcactgtcttgctggtaccctttctacctcttgcttgcttgctctcatgaaacaaggtgccatgttgtgtgctgccctacggagacgcccacatagcaaggaactgagggtggcctttgggtgaaaaccagtgaggaatagaagccctcagttcaacagcccatgaagatctgaatccttctaataactatgtgtataaacacaaaagaagatccttccctagttgagcttcaagatgactacagcctcagctgtcaccttgattgcaacctgtgagagccacagaaccctgctatgctgcatttggattcctgacacatagaaaatgagataacaaatgctgttttaagctattacattttatggtaatttgttatgcaacaatagataactaatacaaatacctactctgaagaacactcaataaacagaatttaaccaacacttcctgcaagtcttacaaatttaaatgtgataatttataaattctagataagaaaaaacaaaaagactaagaggattttaagtgacttagaggtaaaggatggcagtggaaacatcagatacagaattccagcttcttgcgtgtcaaaacccaagtgaagagtacctttctgtcccttctttgctcccacagaattcttcctgaacactgcgctgcaggaacatatgttctgcttaagaaacacatttttttccaagaaataaatgtgtaatagtatatacatgtgagaaatatgttgttagcaataactgatgttccaggcattgtgctaagtaaattataggtactagcttatttaactatcacaaacaccttatggagtgagtgatattactatcttcattttatagacaaggaaccagagtagattagagatattaaataaaagtcaccagctaataaagtagcacagccagaactgaactcaagcttctctgttcccaagcctgaactagacaccactatgaaaaactgaccccattaaaaataaacacgcatacacacaacacaacttagtatttatatatagactgcatgtaaagatgcccaataactacagtatacatgaaattttattctttttgtgaagcattcattgaaaaaaagatataactttacctacaatatccttagataaaaggcagtaaaaagtcaacataaaacattatgaggccaggtgtggtagtcactcctgtaatcccatcactttggaaggctgaggtgggaggattgctcgagccctggaggtggaggctgcagtgagcccagaccctgccaccgcactccagcctgggtggcacagtatgactctgtctcaaaaataaataaatatattttatatttttattttacatattttatgtatttatgtatgtttatatttttattttacatattttaatatgtcgtatctttacaaccttcctgtgatataggtaatattatcatccccattttacagagggaaattaggaaattaacaaatcatggttaagtaatttgcccaaagtcacacaagtagtaagtagcagaactggtatatgaacacaggcagtctggctctaaaccactggcattttactctaaaccagaacattttacttcttcaaaagctggaagttaaaatggttttacagttaatgaaaatattgcccctttggatatctaactaaattacagatctaaacaccacattcagaggccaagccttcagattttgtgatgtaaaacaccttagaaaagttatctaaaagttagtgtgatgagattattaaccttctaaatgctggggcacagaaaatcataccccaaaatatggtctcttgacatgctgaactaaagaagcaacctcaagggctttctggcctcccctcccacttcctgtctcaatcttctgcctctcccaaagcataggatgaggctgttctctgaagttcccttatctgcctagaaactggacccaccaaagaggaacacaattgtccccgatccccttcctaaaatttcattagctacagaagattaaaactcacatcacaaacaatgaaaaactaaagatcaggaaaacaactaaaaatgttcaaagtagggtgggcatggtggctcacgcctataatctcagcaaaagtgctgagggaggcccaggtgggagaatcacttgaggccaggagttcaaaaccagcctacacaaaattgtgagaccctgtctctacaaaaataaaaattaaacaggtgtggtggcatgagtctgtagtcccagctactcagggggctgaggcagaaggttgcttgagcccaggagttggtggttgcagtatgcctaggcaacatagggagatctcatctctatttaaagagagagagagaaaaaaaaaagaacttacatggataggaaagtttggggaagaaaagccatttatattcatattctagttcttatgcttatttccataaccagtaataaggcagtatctcatacttctaatacacaacttatttctgtttcatttgtctcctaatctctactttagacttcatatcctgataggccaatcccatagttctattatttcctttttcattctcctctcaagtctatccactatacaacttctagctttttgttcttgttgttctaataattaacaggtgctttttttttttccatttcaacctttacaatagcatttcttctttctttttatttggtgcaagggaggttaccaactgttttgagaacctgtgattggaaaaagtacatatgtacatgtagcaagtttttacttatcattttaaagggctaagactccccccaaagctcatcaattttactcaggttaaaaattctgtttcatacttattgtatttacaataaagcagaatacaaacacaatataacaaaagatatgaaacaggaggaaaaggctcttggtactcataggacaatgcaaaatcatacagaagattttatgtacaagcacatagtttgtagcaaaaccaaagaagcatggttaattatttaggataaagataacattttataatgttctcggaaattttttaaatggaagaaagaaaatgaaaaaaatatcatcctttgattttaatggaaatgaccatgactatacaggagttgggaaaagacagttcaaggaactactcactttaaataaaacactttgtttacaatggcttgtgcttatgctatagaatgtacaatacagataaaaaatccaaatgaaaaaaatttttacaggtgcagaatatacacaaatatgaatatgcactaactgtaatcaaactgttttctctttgagttttaaatatatgctaattttgctgtcaccttaaataacactgtcctttgaaagacactaccgttttttaagagatttaaaagaatccatataaaaagattaatctcaaattcctctgaatatatttggtgttgataaaagcctgcctatttcaagactggtgtgggctttggcccttaacctttcatgcacatatagtcaaaagtcctataaaactgtcaacttggcctaccattatctgtgtcaaaggtcacttctatacttgaaattttatattataatgtgaaacagaaacacttaaaaaactaaaataaaaacagagtatcaccatcatttagtgtcatcagattactgaaaattttcaacagaagttcattgtagaaattttagaaaatgcagaaaagtataatgatgatgatgatgatgagtaacagaaagggtgctaatgtcttgtttattttgcctgagctaagcatgtggcatatacattatatttcacttaatctctgtaacaatcctatgagatgataggttgttttgtttttgtttttgttttttttaaagataggtctatttttatcagtcacacagctagtaggtggaagagaaaaaaattaaacctagatctaactccagaacataagctcttaytcactaatacatgctgcccaagaaagaaaattaaaaccacctgtaatgccaccaaccagatataatctctgctaactaatattatctcacaacaatcctactctaactttccaataattcaaagtctcccctccttaggcaaccagtggtacggtttggtgtattcttccagaaattttttcctatgaatatatattcatgtatctatataaaagcataatttgttaaattatagaaataatgttgctgtgacaggagactgtggaatggaaaagttaagtgacatgttccagaccataagattcatcagagaaaaatcagaattgaaatgcaacaggacacacttaacaaaaaatgaccctaaacctttaagtattttttctgattaagaccttgtcttataccttaggatcatcactgcaaaaataataaaatcaactaacaattatgagcactgactatgagccaagcattcttctaagtgctttatatatattaaactgatttaaaattatcatctctatttttacagatgaagaaacaggtagaaaggttaagtgacttgccccaaatcacacacctaataagtaatactgtagatagaaaagtgatagagtgtaggatgaatctattttcttattttggaaattgctttattgaaatcactaacagttggttaccctttttcataaaaatagaatatgactatctcatacttaactgaattttctgcttttaaatctaaggacagtaaggaatgctcatggaatttacacagtgacaggattagagggcaatatatttttggactatattgtgtccacttcaagagctgaacaacaaatcctgcttgtgaccctagacaaatcacttgaattctctagatcttagtttccccactgtgagacaattaacacacacaattcccggaacatcccctttattctggtagtttacttaacaccatcgattatctccacagttgtagctgcagaaccaaaacatactgtttgcttgtatttttcccacattttttgcatacaacaaatgtaacttgaggaacagtaaacctttaattagatattatagaagataatgctatataatgaatcactcaatttaatattccagctcaacagctatactccagagtagctttccctacacttttggacttaaccatcagtgaattggtttggtttgatccacaatttccttttacatgcaggacaacacagaaaagttagacgtgggtacacagatgtcaggtacaaaaagacataccaagaaaaatatataagtctatttctcagacacaaaagctaccaaaaggtttaagtttagataacacagaaacaacactggcagttactccccagatatcaatagtggtagaaggaaccccaaagactttcagcattgttcactgaaccactgaacaatgactgtacagtgagtagcctgcagcagccctgtaacccaattggttctcaaagcatagaatctcaaacagcagcttcagtatgatctgagattttgttagaaatgcaaattcttgacccactccagacctactgagtaagaaattctgggggcccaccaatctgcatttggacaaatcttccaggtaattctgaagtaagttaaagtttgaaaaccactgctctaaccttcagtttgtgattgttgcctctgggagacaaagtattttcctaaattttcaggtgataatgaataaagcaggcagacaagaaggtatcagaacactagtagccttaactgtattactctgtatgaatgtacaataaaatatcatcagtggtgttagtatatcctatgtgaaagaaattcaaaaattaagtattatttcactttataatactaaaatttgcatgaaaaaatgcaaaatctttttggtttgtgagtatactcatcaattcatttggttattgttaatttttgatactatgtagagataatagcttcaaccctcaggttaccattcttatcttggtagaaactaattttcagagcatctaataacttgattagagatgagcaaatcactataaagtttctatgctttaaaattgtttcagataagaaaaggaaagacttttttagcagcactttgatattgtgttttagtttcttccttgctttctaaaaatcataaccgagctttagtttaattctaattcaacaaagaattcatgcctgtggaaaatatacataaataatcacctgagtaagactttagctttagattagattaaagatgtcagatgggcaatcaggaagtgaaagattaggcccccatgacagtcattctgacttgcaaatctggaaaaggcctctgatagggttttccttctaaaactcaagaaagggatagaaaattagcacacttattttactttataacactaaaatttgcatgaagaaatgcaaagtacaatattcgactgcccaagaagcgtgacaatacctcaaaacatgaaagattcttctaatcgtgtgctatagtaccatttaaagaactactttgttccttttgaaaacagaaaagctggttcctaatacaaaactgtgattgatttagaaaagaatggttatctataagagtggatgaagccgtttcaataccccgaaggaaagcaaaatccccaaggtctttcagtattcaaaattgactcataaaatgaaacgtctctcattttatgaggtttggcccaaattttctcctactgttttgttttttgttttactatgtcctatctggcttcgaaggtatattatactgacatttcagatcacagatactgatatcttccccagaactaggaatcattttactctgctgacccctcatgctgtaaatatgtagtagttgtattcactgtggtttaacatcaattttaatgagcaggaataaacaaaagacctaaaaccaagtcttccaaggtccttcctttactaatgctctaatctgtatactcagctagagctgtgaacatttctgacacagctctatagactgactgtagagagagtgtaaaggatgttgccaggcaactcatctaagtttgaaagaatctaagcattgataatgagtctttctcagtttggctcccacacaagaagggttttagtgaactctcacatgtgtttacaggccattcacaagaggtatttctaaaagtaagtatctgtatccaaaaggagtccatctcggaaacctatatttcttttctaattcaagtttaatgtttccagcatcacaagtattttctataatcaccagaaatccaacaggaattaggcataaaggttgtatgcaaaagtgttgcatagaacacttttgtgtctagtgttgaatgaatattcttattcacatcttcaacatttctgtttgcacatggccacagcaaaatttctttaagtatctcaaatcacaaaagtaaccctacttacctaaaactacttatctaccaaaattattttaattcttttgaaaattacctttgaaattattttcaatacttactctcattattgtatcaaagtcaaaacagggcattcagtaaaaactatgttctattaagaagaataggcaatcagttgcaaaagaggtaacatgtttttatgagtagtatacatgcaaaacactgctctgctggatgggcctgatccaatcctccctctttcaaagcagacactttgcatgcatgcttaccagggcagtatgcatccacgtccagtttctgagctgaagtgagggttggtgagccaagctcggattctggaattcgtgggctctcaacaaactttgccttcctcagaggggctaagaacaaaaagagagagagagcaagcaagagacagagagagcaagagagaaagaaagagaaaggaagggagagaaacagggaaagagaaggaaaaagggaaagagagaaacatagaggggtcatgagtaaggggaacagcaggcaacagatggaagcacttaaatgaacgacacactctgtcagactcagatcaggttaccctattttttgagccagaaaaaaaaaaaaaaaactaactgcattcttcatagaggagatgggtcttgttaaaagtcactgaaaactggaaaagctaaaatctaatattcaaaactattagtataaattgtgattgtctgttaccttatttctctctctttataaagcaaagagctttcttactttggcttcttttgccattaaatacagatgttaactaaggaaagcacaggactatgtttcaaggttttgtttataataactgtaatcaaaaggtttttgttatccagaaataactactctaatacttggtcatgataaacaccataagtaggattaaatataagccatcaggcctaatctacgtagcttaacaagaaaatcaattaccttacttctcagctattaatgtaagaagtcaaaactgctggtggactaaagcattaactaggccctgctagtttgacactagaagctaaagacatgtgatttagttaccaatttaatcatgatgcctatggaatattaatatctcatgccatggaatccattcattcttgtaaggaataaagtataactcatgaattgaaagttttacttattgaaagtatgtacacattttatttactaatttttaggaggaaaaattcaggaatgctattgatacacattcgaataatcagttattgtaaaagttaaaatatgaggattgcttaggtgctttcaaactgagttctattaaataaactataatagggtgacagtgcttagcacagtactggcacaaagtattagttgaatctgaaattgatttgtttgtattatatattagtgtcataatcataggtggccaagacatgtgtctaagatcacattacttttctcaaaagtttctgcatgttcttcaaagtcctcatccattactgacccacaagagattctacgttattcctaaaagaccctgtaaaaagtaatatacaactctgttatcacaatggtcagaaatctccttcattttctttgaaggataaaaatcaagtattaaaagtatatagaaactattttcaaaatgtgtcaatactcaaaaccaacagacaactaagtcacgctttataccttagggtatgtatattttcagtatatgttaaaaaataataaagcctgttactgtctccatggcaacaaaggcctaacattaagagtcctaacagtatggttctgtcaaaagcaagctttggaatagcagaactctcacctttgctatgagtgtgagacttgagcctgtttttaaaaatcattattacaaataaagatctcaagtgatttatatgtatatatgcaggctactaatagccaatattagaatctctttcattataatttcaccaacagatttaaaaataatgaaacagtttatttattcaatactgcttagtataggaaaaatgattatatagtaatttaatccttaaggctcttaagtcctttactagaattttattaaagcattgtcatggcatcagagtaactgttttacctgctgagttctgacaaagacagcacaggtccctgctcaagggactctatatatcttaaaatcttaaaaacattttttaaataatgaaatttagggctagtagacagaccagaaacttaaggtagaaatgtaagaaaaaaagtgaaggatggcaggagaacttaagggaggtatgaggcgtgtacaagaattatgagatgaagtcaagggaaaagatcagggttctagagatcatacagaaaaaaggaaatagctgaagactgtgaagagagtatggactatatggtgttaatcagaagttaaacagatctggcagaggaaaaaaaataaaacctcttactaaaatacacaattctccagcaaagagagttattttagatctatgaagctcgatgtataccaacttctttattttcccttctcaggaaattccaactgaggttatctttatagctcacaggagacatttaattctttcttctatctactcttcacctcttccctcatccatggggtactgtgcttgtctaataataaagttaaactgttttataaggtagatgataatggtgttctcatccaagtcacagaaaactagtgtcatttgtaagtcaaacacagcagggacaatcacagatatgataagttgaacaatagtcataatattgcttggtggagaacatagaagggcaagttggaagatggggcataatgttttacctggaagcctggaattttaatatgcttcattgtaaaaaatggtacataagatgattcatgtgagtaagagaattccacattaaaaggccttctctgatagttaaaagaagaaagaaagtggttgagatgagatgggtaggaacaatctaaagcccaaacttggcattttattgtgatgtaagagataacagaaactactgcacaaataagtgattggaactgacactgggaacatcgattcttatgccctcaatgacttgagttacagaatctggcagaggttgagcagatgaatgcatatcggcttagaggttaagtagagtgatctgaaaaatctaggtcttgattctagcatatattaatagtaagaaattaggcaagttatttagccttaccaagcctcagtttcctcataaagtcacagtattgttatgaggcttaactaattccaaacatgtataagtatttaagcacagtgcttggatacagtgatatagctcacttattaagtttattaatacatggactagtgagggctacggctacagaaaacaaagtaagaaagtagtttcagacatactatagagacagcataacatggcagcacattagtgaggaatttgagagtgcaggaattaagggtaagggctctgaaaccagaatgcttacattagagtcctatttcattcattttttttctagctgtaagaacctttctgtgtttgtttcctttcatcagttattttgggctaataatatcaaagacaatttgtgaggattatattaattcaaataaaatcctcaaaacagtacctagcccagaataaatgttctaaaaacatcagctgttattattgtttttgctgttgtcatcacagattcagcatgatttggaagtctgaaccgtgcatatatgttgaggcatgggggtagtaaaacaaagatgtctaaggggatgtgaacagtgatatcaccaattattttttaattgagaagggaatcatgttgaagaaaatacaatatgttatgccttagtagagtatccaaatcaaaatggtctaagttagacaacaataaatatgtggtacagaatggaagttaaacagtattctttagaccatgggttcacaaaatgtggtgcctggaccagcagtataatatcacctgggaatttgtcagaaatgcaaatgatcaggcctcaccccagataagctgggtcagacactctggaaggtgggggcccagcaatctgtattcagcaagccctgcaggtgatcgtatggcacactgaagtttgtgaacactggattagagaatccacgaacaccacatgcaaactgctcattaagaaaattttcttaagaaaaaagctgtaatgaaatacaaatcaaggcctcatctgtgagagtatcaacatgtgtggtaaagttagaatttcttttcttttttctttttttttgtgagacagggtctggctctgttgcccaggcgagagtgcagtggtgtgatctcaggtcactgcaacctgcaacctcctcctctcaggctcaagtgattctcccatctcagccttccgagtagtcgggaccacagtcatgtgccaccacgcttgggtaattttcgttatttcttttttttttggtagagacagagttttgccatgttgcccaggctggtctggaactccttggactcaaaagatttgcctgcctcaggctcccaaagtgctgggattacaggcatgagccacccacgcctggctattagaatttcttttcagtcattcttttaccgatttaactcttgtgttgttgttgttgttgttgttgttgctgttttttaaagagtcctaagttataaagtattaaccatatggggtctattttgaagaaataacaatactatctatactcactaattcttcccatgatcacctgggaggcaggtggttgagggaggataagagcaatcagattcatcacacaggaatgctaatggtgaaaagagaaaatctacctatcgaggttcctctgtatgctggaatgctgtagataatgttgaagtatatctagtcaaagaaatataagggcattaaaataataaataattactgaggtattgtctttagtaaatgtttcatagcagaagggattttttaggaggaaactggcagaagactcagataagaatatacagagagaacagtatggaggcagaccaaatgaaagcaaagatcaagaaaatgtaaaatgaaagataaatataaagataggcagaacaataaaagtaccaagaaagtattttcacaaagttggatttgagattataaagtatatttagtaaagttaacctgaagataacttaataaacattaattgtccagtgtggtaggaaaataaaaatgtttgtgcaggcaagaaaaagaaatacaaggcatccaaagtagaaagaagtaaaattatctgtttgcagaagacaacttatatgtagaaaaccctaaagactccagaaaaatacctgctggaactaataaattcggtaaagttgcaggatacataatcaactcacaagttagttgtatttctatacactaacaatgaacaatctgagaaaaaaaacctaaggagacagttcaatttaaaatagcaacaacaaaaaaataaaatatgtagacataaacttaatcaaggaaacaaaggacttgtgcaccaaaaactatcaaacattgctgaaagaaattaaagaaggtacaaataaatgaaaaggcatccattsttcatggactgggggacaatattaagatggtacaccacccaagtgatctatagattcaatgcaatccctatcaaaatcccaacgactttcaatgactttttttttccccagaaatagaaacatccatcttaaaattcatgtgaaatctcaagggaacctaaatagtcaaaacaatcttgaaaaaaataataaacttggatttctcacactttctgatttcaaaacttactacaaagctatagtagtctaaacagtatggtactggcataaagacagacatatagaccaatggaatagaaaaggctggccagaaataaaccgtatcatcaataatttttgacaagggtattaataccatttagtgggaaaaggacagtcttttcaacaaatggttttgaggaaactgaatatgcaaaagagtgaggttagatccttatcttacgtcatataaaaaattaactcaaaatggatcaaagacctaaaaataagagctaaaattgtaaaactctttgaagcaacatagaaagaaaagatttgaactatagaattgtaaagaagtagagagaaacattgagaaatttatctggaaagagaaaactatattttaaaaagttttaacaaagctttcatatgcagaatcttataacattttagttcctaaacatttactagaaaataaacctttgaatatcatgaattttctgtagtgggagtgggaaagaagggtagaaggagagatagtgtttgtgtcattctttgtttccttcttattaaccctggatctctgttaggtttaaaatctggaaataggtgggaagggcatcctcctaccctatctaatgtgctgattaactatttctcatgattgtgcttcaacggtgacataagcaacatcctgaagaaagcagaaatgcaaggagattttcccttttaattattcatttcctgcaaaatggtggggggatcaagaacaataaataaaaataaaataaagcacacacaaaaaaaaasagagagaaggaaaaaccagtagaatctgacattttggcacagggtagataaaagtgaaaaatggtgaagaggaaaaaaatgataattcatattccctgttaattctgagaaagtaactatctaaagaaaagaaaaaaacaaaaataaaaaagatacaatgcagaaaaagaaaatgaaaatttgatatgataatctttatcaaataaagcctagtctattgtagaaacaatttctgactcttcataatgcaaataaaactatacttctctgaaaccaattataaattaatacacagctgcaaagtatctttctagttatttcttctatgtaagtataaaaaaatgaagtacatgttttataaacctctcatctccctctatcttccccaatactacgtgttatgccttttagttccctactcgacatactccaaatttcatataaaaactgttgtgtgtagttttacatccaatttatgctgaagtgtcaaataattggaacacatttatttaaatgtgaatgtatattattgtagctagagatatagtatatgtatacatttctgaaaacagactattagatatctgatttctctgtgatttatacaaatatraaggaaatataacatgtatgcagtgtggcaaaataaagatgactttgtttaccaatacaaatatcaattagtatgtggccactagttatctactatggactctcatatgaacctttcctatccctatttatcatagtgaacaactgtagaaatgaaaaaacgattcatttcatctaagcaaaaaggcaacattacatagtttcaccatttttaagattaacacagcaattatatccatttaaaaaatattgaaatctacctagtcagcaacaactcgtagcatatggtctcaatataaacacaggccccactagaatatataccataaagaatacagagctaagtgtggagaaaatattctgactttgagtctattgaaaatttagcatttgaatattaaattctagaattttttcttttttttaaagacagggtctcactatgttgttcaggctggtttcaaactcctggactcaggcaatcctcctgcctcagcctcccaaagtgccaggattacaggtgagagcccctgtacccagcaaaatgtgaatattaaattcttttaaagaaagtacttatcacctaaagacttttatactaactcctaataatgaaaataaaacaaaaactctaaagtaaccagagccaaataactgaaatgtcatcatttaaaatctataaataattcaataagggatgaaataactatatactaatagtgacacagcaaattgttacaaagaaatagcaaaaataatggaatttgagaaggtatactagcatatttacctgcaggtaacaatttcaaaacatgtattataacaaatatattaataaagttttctactgattaaaataaagaggttgtgatatcagagctaaatgcttttctgtatttagtcatttcttgttcagaagttatagctgtgaaatataaattgataattttatacacaggcaaatattgctaaaagctctagaataattatgacattcctatttaatttttcatctttatctccttctttaaacatttcataaaaaatgtgacataacaaaggccccactctctactagaaatgttactatgtaataaataagaaaagaggcatcatgataactttttaaggattagcataatcatctgagagtattgggatacttcacaaacatgaaaactcagatgtgttaaaaatgcaaatttggtgctacatgaaattttcacatacaaataatgacagtttaaatgaaaattattttgttagaaacctgcaataactatttgtaaaccaattccataaaacatatgagctgttcccttcaattcaatgaatgcttctgtgttcctaccatgtgcacagagcagtaagaaatgcttcaggggattcaaacataattaagacagtgtccagcctaaaggaacttaatgagggggtaagacagaagaagaacagctatgatacaaacaggagaaagccaagtgccatgaaaatgggacaaaacataggctacacaatttaaagagaaaaatgtattgcagatgccccccaactcatcggagtttaatatatgttaattttctattaacaattggaattataaggtgattttaagaaactcgtttcagaagacccattaatttcactaatttatctttttttaaagtttcatgaaaattttatggttacaacaattgaaaaataactggagaaaaacatgctcacagcttatgtctttaaaaatttggaaagcacaaattaaaccccaaatcaggcagaaaaataaaaccataaagattaaagcagaactcaatgaaayagcaaataaacttatttgcttttcagaggaaaatgatgaaacgagaatttaattctttgaaaagataaacaaaatagaaaaaacttactctagactgacaaagagaaacagcaaaacatgaactatcaaattaggaataaaaatggggccatcactattgactctgcagaaacgtaaaggactataagggcatattaataacaactttaagccaacaaatttgataacttasatgaaatgggcaaattcacagaaagacacaaattatcaaaactcattcattaagacatggaaaaatctgaatagatttataacaagtaaataaactgaattagtaattaaacatcttaccacaaaaaagcccagtctcagttgtcaccactggtgaatcctaacaactgccttaagaagaaataatagcactcctttacaaactccaccagaaaattaagaaagaagttgggacaggagcaagtgacttagaaaatcaagttacttcagatatatgtggctagactttataccaacagtgtataagaaatctgtagcaatgtctggcttatgaatttagtttgttctaacttagttcaatcaattaaaataaatatcatcacactttgccttgttttaaaaattaatgataccattttaatgtttatcaagtaaaaaagtttaaaaactttttccaacattacatctatagacggtagttttcttatagagctttatacaaacttttaattttgctctgatcttatttggcactcaaataagaattaaatgtaacaattttttttaaaatgagtatttaaatggaagagaaaacatccctaaattttgttttagaaagactgatgaaatgggatcattctgttgggtcttatagatggcctatttcttttagttagtgatgcaaaacttcttgctagagcccagttctaatgtgaggtacacagctctaaaaacaattacctcactttcaaaaaaagctatgtaacgacaaataaaaatacttttttttttttcttgagacagagtctcgctctgtcacccaggctgaagtgcagtggcacaatctaggctcactgcaacctcaccttctgggttcatgcaattctcccacctcagcctctggagtagctgggattacagctgtgcaccaccatgccgggctaattttttttttttttttttttttttttttttttttttttagtagaaacggggttttagcatgttggccaggctggtcttgaactcctgacctcaagtgatccgcaaacactggcctcccaaagtgctgggattacaggcatgagccaccacacccagcctattttatacttttatttaaatttttacctaagctcattcgacctttgtaatttttctatgtaaaatacattaatcctgttttgcagatgggaaaacagaatcataagatctcttgtccaagattacagtaattaagtggtagatcacagattcatatcctgatattttgatttcaaatattataatatttcatttataatactcttcctgggcaggcatggtggcttgcgcctgtaatcccagcactttgggaggccaaggcaggtgaatcacttgaggtcaggagttcaagaccagcctggccaacatggcgaaaccccatctctactaaaactacaaaaattagccaggtgtagtggtggtgagggcctgtagtcccagctactcgggaggctgcagcagcagaattgctagaacctgggaagcagaggatgcaatgagccaagatggtgcctctacacacagcctgggcaacaaagcgacactctgtctcaaaaacaaaacaaaaaactgtttctcaaggtatgggactgattttaggatgtaaaagatgatttaaaatcatccataaaaacggcagtaaatagcactgaattacatagcgcagtgggcattactagtgcccaccaatatcctggtctccattcccttctaggcagaggggtgactacaattaccagctgttgtgcagtttagaagactagtttgagccaatgaaataaaagcagaagtgacatagtccctgcatgattctacagtgtatctcttcctctgacagaaaaatcatgatgaaagtctcacgttgagatagtgaaactacaagattgaagcagcaataaaggacagctgccctggagagttgccaacatttgttgggtgaattagaaaccaacatttgttgtatgaatctgctgccattttaaagatggtttgttatggcaatatagtttagcctattctgactaatgaaattgctacaaaagttactcttttcaattatctgtcaatccttctgaatctgtcaagaagaaaattttaatgtgcggctagtatcagctaatcctcctttttaacagagagagttgagcttcagaatcatttgaaggtttaagtagccagattaatgttctagttaatcttctagttatgttcatgatattgattttctagtttgactagtagtataaagtttctttaaaagtaaattatttaaacaaaagcatgaaattccaagaaaatattaggttaaacaaaaagtagttataatcaggtggggcaaaaatcatgaaaatcctataccaaatgaatgaaattaagaaacagtgcaggtaccaacatgtatttctttctttcttgagatagggtcttgctctgtcaccctggctgaagtgcagtagtgtgatcacagctcgctgcagccttgacctcctgggatcaagtgatcctcctacctctgcctcctgagtagctggcgttacaggcgcatgccaccacacccagctaatttataaaaatgttttgtacagacagggtctcactatgttgcccaggctgatctcaaactccttgcttcaagcaatactcctcagcctcccaaagtgctgggattataggcatgaaccaccacgcccagtggccaaactctatttcatcatacacagtctcgctcttgttgcccaggctagaatgcagtggtatgattttggctcactgtaacctccacctgtcaggatcaaacaagtagctgggactacaggcctgtgccaccaagcccgattaatttttttgtatttttagtagagatgaggttttgtcatgttggccaggatggtctggaattcctgagctcaagcaaccacccacttctgcctcccatagtgctgggaatacaggagtgagccactgcacccggccaaactctatttcaatagagcaacttgacttaattctccattttctgtctagtttgtgttgagttataagcaaaacatttaggcaagtgcatttaagttggtgttcagtatgaaggacacaagtggcattacagtcatgactggaatactggttaggtaataagagaattgggagataacaagtataaacagagaaagtaataagttaaaaaaagacttctcatatgaacagacataattatttgagcaatctagtcatttgatgagatagataatcagagcagtctcctcttaaaaaatttttgccatcttttcagaagggccaatccagttctctatacttttaatagccttcaattccacggatggcatagtcagaggtcaaaagtgaagaaagaggaagcacagactgaatctgtgtgtggtacacacgtgtaatctgtgaagaatctatgtccatggttacaatgcagcttcgtaacttagacaagtgtggtatgtcaatacagaaaagctgtagttactgtattaaagtgagagtaaatcatgaggtcattcttgaaagctttagagtgggttctcactcaaagtttctaaattgtgttaccacactttgaaatatgtgaaggattttatcatgaccaaacctggcacagaaagaaaaatcttttaaaaacatgtttctgatcattaagaaagagaaaggaaaagataggtaagatggtgaagagacgtatttcatttcagaggatagaagaagaatacagattgacaagaagggacaggatatgcaagtacacagcctaaagtagcccttccaacaaccgtccaagcagaacaagggctattagcactaatacaaaagaaagaaagcaatgttttcatcttaatgaactgtttgagaaagactgaagtttctcaagctcaatttcagcctatgtatttataaaaattatggtcctctcacaaagatgtatcactacagttacagtacaattatgttttctcctcgtattagggtaggccaagagctgaaacaaacaactttatctcagtagcccaatacaatagatttctcattcaatatgcgtattcagtaggaagcttctttctataatgtagttccaacagtatcttacagccccagagttctttgttggattctctgcatccagagacgcagggggtgggagggggaagggtcttttacaaattgcacatgtaaagtttctgaactttgcgaaacgtctggaactggaacacattgtttccaatcatacctccttcaagctcagtcatgtgacacacttaagtgcaaggaaagctggaatatgcagttacatgcagtttacccatatgcccaggaaaaatggagaacaggttttataaaaagatagtattctttgctatactctatataataccttggacactcataaaaatgagatgcagagctaataaagtagcagatcctgtattaaatttagccctctttctttcaaatgggctgaatatacatcatcaggacctaagatcaacctaaatttatttatttatttccagacttttttcatcaaatataatgctttatattacaatgcctagaatagtatctggcatatgatagctggttaatcattatttgttaattgaatagtatagagaatcaaagcaaagacagacattacaaataagagttttactatacaaagtgagtcttaaaaagcgctcatggataaaacaaatctttgtcacctgagaaacacagagaggctttcatgaaacaaacagattatataaactatcttcattataatgactacaaccatttaatttctagctttaatgactggattcttttctataaaagatatccaacaaaatacactgagaacaaagaagaattacaagggaaacacatttgaaaagaaaagacactttagctgtgtattggctctttcacattgagggatatttgaagtatacaacacaaaagaaatcaacatcttctttatgccttacttttaacagtcaggccaagtagctggttcctggccctccaaagcaggtaagtcaattgtggatcagtttgtccttctgaacttacttttaagctctatttaggcaggtatggagtaattttttactctgaggctagtttagccttactactaatgtgtgttcttacttggatctctactgaatgctccaggtttttaacaagatctttctggtcagaatgaaaaaaaataaaaaataaaaaataaaaatctcccattcctgttgggactctaggaattgttcagttctttctttagcctcgtggagtctcattgcacatctctgaaactcagtattaaagatgcaaaagaacccctctgcagagttctgcagttgtctcggattagctctgtcctcagtactctgtaacttctggttgcccttgccgcctcaatctctgatctcaattcagcaagactgtcattctctgctagagttctccacagtcagaataccttgtgtcagaaagccaggattcatctagttcttgtcaccctcaacccacgccctttctctcagggatcacattaccatgctgtcaattatccaatgtctgaaaacagttgtttctggtgggaaggcaagtccgttactggtaaattcatcatagtaggaagaagcctctcattgttattttaatttgcattttctatatgtttattattcagactgtggctgacaaaaggtagagcctttgtctgttttatatactgctatatccttagtactgcctataatagtgccaggcacagagcaagtactattacttgttgaatgaattaactagtttacatttgtgtagatatttatagaggtataagtgatctgttcatgtccttcatctatttagaacttaaggcctaagaaaactggggattccaagctgtatccaaggtaactcagaataagtatgttccttctacataagttctattttcatgcaattatgttgtgccacataaaaggatataccagacacattgatatacagatagaacatagaagcaataaatatggagacaacatactgatccaaagaaacagttactcaaaaaatgaccacaataacttaggatattcctacagacattacttcaatgggattttgaataacttaaagaaattctcatttcaagaagaaactgagatttaaatcttcatttatctgtaaatctttatcttataaggaaataggcaaattactatggcctgcaactgttgtaaatgacatctctttacagcagtgaatagcaaaactcagtgtatgagataaaataaggcagtgtaaatttcaattacctattttattatttttgcatatacaaatcaataatctgagctcagaaaagccttttaaacgtgctaagctgaaacacaatactcaactgccaataagtttaacgttattaggtttcatttccgtatatctaaagagtactaggtttttgacaatataaaaaggagttccaaatttcaaagtttggatatattggctaatacgtgattactgctttactgacacgagcaattctaactgtttgtcagaccaacttctgagttttaaagtagctatgataaataactccattaaaatttaaggtattatataaacatggttcatcataggaaaaataaaatatataagagaaaatggtgtaaataaaatttaccagaaatcctatctctgttaaaattttgtaatatatggccttcctatttttaaattttatataaagtattactgtcaacaaaaaaaaagctaaaagtgattgatgacttctctttcaaatgtatggcttttgaaaggaatattgagaacctaaaagtggaaggaaattcactgatcaacattttatgagttgcatcactattattaagatgaatattagcactgtctttctttgttgagtaactctcaccttctcaataaatatctcaaaatagattttacatatttaacttacatatttacaaattcaatctatgcaacagtacataacagatagtgatatgactgtaaggtatgaggcaagatgtacttgtttttgtggggttttttgctttttatttttagctagggtctcactctgtcgcccaggctggtgcagtggcacaagcatggctcactgcagtcttgacctcttgggttcaagtaatcctcccatctcagcctcccaagtagctgggaccacaggcgcatgctaccacacccagctaatgtttaaattttttgtagagatggatctcactatgttgcccaggctggtctcgaactcctggcctcaagcaatcctcctgcctcggcctcccaaactgctaggtgtgcgccacagtaacaggctagatgttcttgtgttgtcaaaattgttagtatgccccctaaattggaagaaaaaaatcttttccagcatctttcaagatagaaatattacatatgtattatcttctcttatttatgtggagtatgataaaagaaattataggataaagtaaaaaacacagtaactgaatggaggggcttttaagcaagacttgtgctacacagcctatcatgtagtcttcaaccaattatttaacttttccaagcttggattccttgtctttaaaatgtgagccataatctgagttgttctgataattaaatttatagggtaaaatatagataagactaaaaaataattagtatttatttttctttggtaatagacagctgaagtataatgcattactcaaggccacagaccaagttaccctggaacagaaactaaaatatggatcttggactcatgatttagtgatcatgtacacaacagatgctctgtatacatctttaagctaagtggcctatgtaattattataataatatgccactcacctctcaaggtaaaagatttaaatgaacatatttctgtaaaattagcatagtgccttgcatatataatgtgctcaatgctaggtgttattagtatataatgaccatggtagtgggggtggtgatatgacaggcaatagaggaacatggagacataccaacaaaattataagaagttggtcagaatgtttggcatctagagcggatgaaaaattacaagaagtaatttactcacgcttcttacctcagttatgtctgtccctttccccacctctccccacaagaaggataactgctatttaataggtgaaagttactcccttgcgtggaatacatattataacaggatactagtacaagtgctcttgtatgtttaacagggaaaagtacaatatgttggataagaggtgtttgtatgaatgctagaaaccagttcctttttgaatattttaccaactatgatttaaaatcatgctaagttggtttagcatgatttaaaatcatgctaatgttggatttatgattctggttttataaatttgcagtacaaattctacccattctatgtgtaggaatcatcaaactctactagattataaactgttttaaggcaggggctttaggaaaatcatctcagaatagtgttttgagaataatacacaatgcactcatgttgctgttttccattttgcattagctgtcaataatggctgaaaatatgctgactaggtaaaattacataaattccttgcaaacatagttttacatataataaagaactgaggaagaaacagacttggactggaagcaagtatataacagtgagccatcatttactgacaattccaaattgagttctccatggcagacccaaaagatcttgcattaacaaagaaaacaaaaagaattatggaaggttattccatttttttttttctttttcgaaacttcaggatagtaagctgaagaagatcctagtcaatcaacgtgggaagtaaaaaactactggccaggcgcggtggctcacgcctgtaatcccagcactgtgggaggcagaggcgggtggatcacaagatcaggagtttgagaccagcctggccaatatggtgaaacccagtctctactaaaaatacaaaaattagccaggcgtggtggcacacacctgtaatcccagcactgtgggaggcagaggcgggtggatcacaagatcatgagtttgagaccagcctggccaatatggtgaaacccagtctctactaaaaatacaaaaattagccaggcgtggtggcacacacctgtaatctcagctgcttgggagactgaggcaggagaatcgcttgaacccagaaggcggaggttgcagtgagccgagattgcgccactgccctccagcctgagagacagaacaagcatccatctcaaaaaacaaaaaacaaaaaaaacccctgctactatttgcatatatgtgaacattgtgccagtactgtaacacaattctgtaaggataaattaaaaacaaagtgagtctttgtctcatagactaaaatgactattgaggcattttcaaagattaagtgtgaaggccagtagctttccggcttgttgctggaatgtgcagttgctactaaatcacaacagagaatacttagtaattctaaccctgagtaaagaatcatatttctctgaccttagaatatttgtcagaaatttctattatttgtaagaggacaagttgcttttcaatctccctaaaaccctggtataatctggctagcagagaagagggaagataagaagatgattaattcctgagacaaacagggtatagaaagctctggtggaaagtaaaccatgaaaaaagagagctagctggagagacagaactagcattctgccagagaaggctttgatttaggggtagaagcaggaatttttattctggctttccttaaatacacaaaggcatgagatactgtttgccttactcttcttggttgtatggtagcaagagggtgttctataaatacttaaaaagtagatgctgatttggctcagaggtctttcttttgttgggttttcataaatctcttgccacctctggtttttaaactaaataaaatatattgctctattcatcacattattttgtttaagattcgaaaaaaaaaaatcctagtagtaggatagaggtagaagcagtgctgcaaaatattgtaaagaggaatggaagctaaacagcaaatctcaatagaaataaatcgatacatcttcttgtgatttctgtcattttactaatgtaacactgtatggtaaagagaaaaacagaattacctaaagcctggaacaacaaatgttaaggaggaaaacaataaaaccaaagtttttataagattgggcactaaagctagatttaagctgaatgtatgcactccaatgcataaatatttccatggctagaaacaaataactttagaaagtttcagtgtttatgaaagacaaaaatctcaaaatcctattgaggaggttctgctcctgcattcaatagctttcaaatcttgatggaaccctggagctcatgtaggctggcgagtcttacagtgtggcctatggaccagcatcacctggaaacttgttcaaagtgcaggttctcaggcaccacactaaaatgactgtgtcagaaactctgagggtggggcacagcaatctgtgttttaacaagtcctttaaatgataatatgaaatgatattactttcaaacttgaaagctggttatgtttacttaaatatccgttaatactggatatttggatcagtcttgtgatgaaagcaaatttacattccaacctaagcaactggtgtaatgtagaaaaaaaaaaaaaccaaagtaattgttttaaacagtaataacgatgtgatatttggtaagaaatacatgttttatcctcccctttttttctgggagtggaatgggattgttcagaaagaaaccaacatgatcaaccaacaagtgatcccaacctctttctttgcccagaccagcttttattttacatctgcagcagcagagcctcagaatttctacatgacaatttttaaagtctagattttattatgattaggttttagtttgcatactgatgtaacagtaattacattattcttgccattaaatattttactttatgaaactgtgctgtgaacttaaaaactgtggtggagaatcagtcttatatttctgttgttatactacaacacagtccacagtaatttgcttagagctattttcttttaggtaaactctatttagacacaattcttgaaaagcctttcctgtgtttccatgcagtgtttttggtcttgtgatctgcctcatgtttctcagtttcagctccctgaatcttcactgatgctggttgactcttataaactctgctaaactcactttcccacaactctgaaggaataaagttaatgtgctttgtttttggattcytgaaaaacaaaatgtttattatccagggattttagtggtgtctttgcatatcaaggtaagatgcagtaaggtatgtatattaccacaagcagctctaaatttagtgtttactaaacttactgaatcagagctttaaattctcaggggagcctcaaggcagaataaactactttgcccttaataaaggatatgtataattgtgtagtagtaataaccacaataaaactctttattatacagactcaattataataaagtttaggttagactatgccccttgaaatgtaaatatgcagtaaactaacagataaagtgattgtcaacactaactcctatcaggaaaggaattaacaaaacagcaaataaaagatagtaaattggtttttaaatcttttttttttttttgtgagatggagtctcactctgtcaccgaggctggagtgcagtggtacaatcttggctcactgcaatctctgtcttccaggttcaagcgattctcctgcctcagcctcccaagtagctgggactacaggtgtgcaccaccacgcccagctaatttttgtatttttagtagagctggggtttcaccatgttggccaggctggtcttggtcaactcctgacctcaggcaatccacccggcttggcctcataaggtgctgggattacaggtgtgagccactgagccggccaagtaaattgttttattgtgctacctaaataacaacaaaaatgattaagatgagagaaacaattaagttggatactggagaggaaatataaatagccttcccagctttatttcttattttataactctatacatctataagaagattactataaagaaaagataaggtggtgattataatttttttgatctaattggactcatcattaaaacaggtaaaatacygtatatatgaagccaactttcttgctcatagttgttcttacgtgttgttgtccataagtgtactttagtaaatctatcacatacttctataaaagttttcaaaattattacattattaataataaagatcacttaaaagttttgaatgtctatgagcatacacagatgatgtaatattcagtgctcatcatatgcacacaatttcttattttataactgtatagatatataagattactataaagaaaatataaggtggtgattataatttatttttctaatctaattggactcatcattacaacaggtaaaatactatagatatgaagccaactttcttgctcatagttgttctcatgtacagctacttatgttcagcctcccaagtagctgggactacaggtgtgcaccaccacacccagctaatttttgtatttttagtatttttagtagagatggggtttcatcatattggccaggctggtcttaaactcctgacctcaggagttaagcacattgctaagcacttgacatacactgttcatcttcataacattcttatgaggtagctactcttgttatgcacattttataagagaggaaattgaaacttggaaaatgtgaataacatgtaaaaaactcacacagctaataagtggtaacgctggaacctgaaccttgtatgtcttactacaaagtctaggtactgctgggcatggtgcctgtattcccagcactttgggaggccgaggcaggaggtctgcttgggcccaggagtttaccaccagacggggcagcacagtgagatctcatctctacaaaagttaaaattaaaaaaaaaatcagccggacacatggtgtagcatctgtagtcccagctattttggaggctgaggtgggaggatccctggagattgtggctgcagtgtgagccatccagcctgggtgacagagcgagaccctggctcaaaaaaacaaacaaaaaaccccacaaagtctggctacttaactacttctataaaccgtccgtaagtatgcaactgaaccaagaagaacataagattctttacacatagctctctagtttgagagggcatttagtaggctcaacagataggaatgacacgttactaaacacaaatttccactcacaattaaattttgacctaagtcatatacagacaagaccataattcacaggtctattccacaaattctcctgagaataatttgtggtttttctcaggattctcccaaacttggtcagggctaccgaaaaatatgaaggtaatatatacagaagtcctcttatcctacaccgacagggactagtagcggattggtttttctaaaatgttgcaaatgagcaaagaaaaagttggtacatgtattaaacactttcccttaaaatataaatgtacatttattaaacaaactcttgctgtaaggccaaggccttttgtttgaatatgaattccaacttttcttttttgtgtaaactgcactaaaatgtataatctagtcaattttttcaaaataaaccaaatcttagacaacctaagtaaagacagatttttaaaataccttcacccaaattcactgaaaatttatttttaatttttgggggtacgcagtaggcatatacatttgtggggcgtatgagttattttgatacaggcatataatgtgtaataatcacatcaggataaatggggtatctatcacctcaagcatttatcctatgtgttagaaacaacccaattatgttcttttagttattttaaaatgtacaattattattgagtagtcatccagttacagcatttttttagcaccttacttttattgatattgagtttttccaaagcttttaacataattttcctagaaactcttttataggtgctttctttctgtatttgtatctaacatatacataatttaattatattatcataataagaagtacaatgggcattaacttaactgcctctcattaagtaagcacaggccaccacaggaataacagaagtacccaggtgcattagaaggtagcctactggcctctaatatacatcttgtcctgacaacagtcagtaggtgtcacaaagggaatgaaaactttaatcctgcaagtgattaggggaaggtcagttaagaaatcttctcttctaactggtagagttagctcacagtgtgcagggcatggtaatatgcagaacgcaaataaaatgagaaaggtctgagaagtctaacaacattttcatatgccaccatgcttgtaaggcactaattgtcaatatttagatttggaaataaagcagagtataaaatcctgccagtttcttatggtgactaatgagagccagtgcccataactgaaaggaccatgatggagtaagaaattaaagcatgaatagattttcataaagaaatcatttctactttgtcacatttcagtctctaatctatacaatttttgtgacattttactagctattttctcaataataaatgatttgggaagtaaagtgtcaaaagcataagagaaacataaaactattttggacagatgaaccttgataagaaatgtcttttcaaaatccaaggcataatctggaaaaattatataattagaattaaagtcaaattaaaattaagttagaagtagaagaggtagctcatagttcaatgtcacattgtataaacaaatgaaatatcatttaaaataagtataaactagactagacattaatatatctacaaaaatggttcattaaagcaatgatttatccccagaatggagaagggtagaaaatattagacatttagtaccataagaagaattccttattgaacacaacagagaatacccagcggtaataacaagaaaaaacagcaaattttaatcgcagtgttgacaagctaaatctgtccattttttggtacttaaaaatgagaaacttagtcataactgcagtatgtccccagcctcaggcttaggtaagcagtacctyatatatcagcagtaccttttacattataacctttcagtaataagctttaaaaacaggtcaaaatcagcatgaagagagctattyctttcttttctaggcactataatactgttagagtcctaagaatcagtggggggtggggaggtaaaaggaacgtgactcatgtgtcatacttacttctagcctcagttgtaaagtgtttaccatcacaagtctgatcaataaataaaacagtgagtcacaaattttcaagatctcactttaataaaaccttagtgagtcgggcatggtggctcatgcttgtaatcccaacactttgggaggccgaggcaggctgatcacctgaggctaggaattcaagaccagcctggccaacacagtgaaactccatctctattaaaaaataaaaaaatcagccagtgtggtggcatgcacctgtagtcccagctacttgggaggctgaggcaggagaatcgcttgaacccaggaggtggaggttgcaagtgagccgagactgcaccactacactccagcctgggcgacagaagaagactccgtcaaaaaacaacagcagcaacaactaaaccccccactaaaaaaaccttagtgagtaaaggctcttaacatcataatagtgttatctgctttggcctgcttagccgaaggcattcaagctaagaatattattgaagctctaggtaagtgcaggatgttttattgatttattcagtaaatatttattgaacatctactatatgccaggcattgtgctaaagactgaggatataataataaaaaggacaaatactctctctcccttttagggagacaagacgtaaaccacacaaatactaaataataacagcaataattgagcacttattgtgatcaaaactgttcaaagtcattcactcatgtaatcctcataataaccctaggaagtagtaggtactattactacctgctttttgcagatgcggaaactgagggagaggttaagttacttgcccaaggacacagaagtaaggcatatcagtcagaattcaaatccaggcagtctggctccagagtacacaaactatgtaagataagcttacgctacattatattgctaactaatttaaaacttaaatttgtaataaatgctaagatgaaaaggcctgctgtgtactgaatgtataattttaccacaattatatcaaagcttctcattatatcataacaatgtgacaatatatttatcatacttttttggtaaagggttcttttaaataaaacaaggaaggagaaactacatacttatcaagtgttttggactgaatatgaaaccagttcccacaggaagtaatataaactcacaatgaaatactctgaacattaatggttacaatattactgttatcaggagaggacaccaccagtatccatttgacagcaagatgttttctaaatccaggcatgtttatattgtcatataaatttaagccttctgattcaagttgtaactactctctgctcacttaaaaaactcagcctacctagtaaaggtaaaaaacggcttcccttctcaacaaagaaaaaaaggaaaagtacacaggactttaaagaaaggtatagagagatacataggatcatgcagttgctattaagtgacagcatcatcatcaactatcattattggacagttactatgtactagaggctgttgtaagcatttttcctgyaaaaattcctttaattcttacaaatcctaagggagttgttatactcatttcacagatgaggaaactgaagcacagagaagttatacaacttgcccaacgtcacactgctagtaagcgcaggatctgaactattacatcatattgcaggagttaaggtaaaacagttaactgctttagggatcctttcagctatcttaacgagaaatttactggagtaaggatgttgaatggagaaagagaaacatttcatttttaaaagtcttaaagagtcctatgtatcagtggtccccaatcttttgggcaccagagacccattttgcggaagacaatttttgttgggggtggggatggttttgagatgtaactgttccacctcagatcatcaggcgttagagtctcataaggggcaagcaacctagatccctcagatgtgcatttcataatagggttcatgctcctgtgagaatctagtgcctctgctgatctgacaggaggcggagctcaagcagtaatgcttgctcgcctgcaggctcacatcctgctgtgccgcccagttcctaataggccacggactggtactagtctgcagcctgagcgttggggatccctgctacatgtgactatatatcacagacaccaaaaagcaattagaactctaagaagtgtatttgactgtaagtttctcattaaatgcttccttctcccaccgattttatgtagcctctctctttctttctcctctttaatgaaacagaatacaaatatttgccaaatgtagaccactgcagctaagagtttggactacagttcaggagagcaaaaggcagaatcatatgtcaagaaaatcatgatcctagtcactcaaacggttccaagcctcagtttccagcaaaagttacaccatcttggttccttcaatatctttcatactgctccttattcatctcatttgttttttaaagtgggtttttctcttttggtcccttaggttgtatttcttaagatttacttcttgatccccgagaacagatactgaagttagagagaggtctaagttggagctctgatctcttatgcctaaattcttcatggttagcctgattaggtcttgttttcttcataaataagattagggccataataattcaaagtgccaacgaaaagacaaaatgagtaaacatgaaaattcctcgtaaattcttatgaaatatttactttctaccttttctatttgttcaattcgcatcctaaagagaccttatggccgggcgctgtggctcatgcctgtgatcccagcactttgggaggccaaggcgggtggatcacaaggtcagacattcaagaccagcctggccaagatggtgaaaccccatctctactaaaaataaaaaaaatcagctgggcgtggtggcaggtacctgtaatcccagctactcgggaggctgaggcagagaattgcttgaactcaggaggcagaggttgcagtgagcagaggttgcagtgagccaagatagtgtcactggactctagcctgggtgacagcgaggctccatctcaaaaaaaaaaaaaaaaaaaaaaagattttacctactctacagttttaactatactctctacgggtataacttccaaatttacagcttaaaaccttacttattttcaaagtgctgaaaacacatttcccctttttctttttttttttttgagacagaatctcaccttgtcgcccaggctggagtgcagtggcgcaatctcggctcactgcaagctccgcctcccgggttcaagcaactctcctgcctcagcctccccagcagctgggaccacaggcgccagccatcacatctggctaattttttttgtatttttagtagagacaggattccactgcgccagccagtatggtcttgatctcctgaccttgtgatccgcccgcctcagcctcccaaagtgctgggattacaggcgtgagccaccgcgcctggcccacatttcccctcttatatcgtcctaccaccctgaactcaatgtctatcaatctcttaaaatcagctatctgtctaagcttttcctattagcaaagccatcatttttcttcttaaaattgtataatcatctttggcagatctttcatattcctgtactctatagctggccagtcaccaatctgcttattcctccaaaatctttttctctttatacattttccatggctaccatgttaggttatcactgccctaatggcttcgtcattttggtcccagttgtctcttccagagcatccttcatgaaacctctgttccagacaaactgatttatttaccacttgaatgcattttgtacacttttgcttctgagattttacttaagtcactttaccattttactttctagtctacataataaacaatattttctccaatttaaaaaacacactcatctttaaaatattaaagcaaagtataatttatctggggaatctgagtaaattatgtttccataatcttctgtttttgttttgtttcttttttgagatacagtctcactctgtcgcccaggctggagtacagtggtgtgatctcggctcactataacctctacctcccaggtttcaagtgattcttgtgccacccaagtagctgggattacaggcatgcaccaccatgcctggctaagttttgtatttttagtagagacggggtttcaccatgttgaccaggctggtctcaaactcctgacctcaagtaatccacctgccttggcttcccaaagtgctgggattacaggcatgagccactagacccagccatgtttccatatcttctggagtgctaagatgatttctttcatacttcattttgtgcagttaaccactcttctttccttctaaatgacataactttctttggtcagttatttcctaaagcatgctccttggaacacttacttgttccacatggttttgcaggggcatgtaagaaataaagtgtctgctgtcaagttttagagatgctagattaaacaattaaaaagttccctttattgtaggacttctcaggctttaaaatgctaaaccgtttctctatcatcattcttctctagttccgacatgaaatattcctttctcatcccactacagcttaactcaacttcaaaccactattcacttttttgaactgagtaagccttccagattcaaccagattgagtttttcatccttgcctcttgattctcaatctctttctccagggaaatatgcaccctcccctccccctcttcccccctccccccgcaagagatgaagtctcactctgtggcccaggctacagtgcagtggtacaatcacagctcactgcatcctagaactcctgggctcaagcgatcctcccacctcagcctcccaagtagctgggactacaggcatatgtatgccaccacacccagctaattagaatttctatttttaaaatgatacccagacccgatgatctaagtagcatgtcttcaactggggaatacatataggtgaggagtattatgttggggtatgcaaatttataggagaaaatgtagtatattttcctgaagagtgagttttacttaaagatttttttgggaaacatttttattataaaataaaaatacatgtagaatgtacacagttttaaagaaatatgagatttgcaagaaatttccaggtttccttttgggtaccacttcaggctacatcccagatccctttggtaagtattcaaatgcctttgccttaaaggagctcccaaagaaaagtccaaaaatcactgatgtaggccaatggagaggaatggggggaaagtaagtatcaaagactaagagaatgcttcccctgtgtcaagtactatactagatgctttatctatatatttttcttaatgcctacaatgacactacaaaaatgcactacttcattcatcttatagaagagaaacctcacagaagttaacctgtcctaagctgcaaagtttacagtggtaaaaatgttttcttacataatgttggagtgataaaaaacacacatttatcaccgaaatattatgattaattcccatgagaaaaaatagctaggatgactagaaatgacccttttaaaataatttatcaccaataggagtccttcatgtcttaatgtagactctaacagaaatgaggtatttattttctaataaaagcttattactaacaaattcccagatattcagaagtgttattaggacaacatgtttaagtttcagttagtgaaaaccaggggaaaaaacctaagagtttacatttgaaattgttatattctattcactagcacattccctccccccaaaaaagtaacgcctactattaactaagattttacccagttgtatgttatatgaacaatattgaatagttttttttttttttttttttttttttttgagacagrgtctcatactgtcacccaggctggaatgcaatgaagtaatcacggctcactacaactttaccttcccagcctcaggcgattctcctacctaaacctcccaagcagctgggaccagaggtgtgcaccaccatgcctggataattttttgtattttttgtaaagacagggtttcaccatttgcccaggctggtctccaactcctgagctcaagcaatccacccacatcagcctcccaaagtggtgggattacaagcatgagtcaccacctggccttgaaaagactttttaaagaatttcagaaagtaagatggaagttgtcaaactagtttgaaattgaggggctaaatgatcatccaaagtattaagtcttatttttttcatagaactctgccagttaaatctgcaacttgaatttttacatgctgaaataaactggatggcctttaagaaaacctaacatacatacagattcaccaaatcagcataatagggattattataaaaggacttactgcagcatctcttaaaatagggaggtctatagtggattttacattagccagtttacaaacaaacaaataggttaatatacaatctttaaggaatatataataagatcccaaacataaaaaaaaaataccaaaggatatggtcaagaaagattacttgaaaatgaataaatctgctaataaaaatactaacctcattaaaaagtacctaaaccagtctttgttattaattttttttttttttatgagacagagtcttgctctgttgcccagggtctcactatgtcacttggtctggagtgcagtggagtgatagtggagtgatcatgggtcactgcagcctcaacctcccaggcttaggtgattctcctgcctcagcctcccaagtagctgggaccagaggcatgtgcaatcatgcctggctaattttttaaaaaaattatttgtagagatggggtctccttgtgctgcccaggctagtcttgaactcctggcctcaagggatcttcccatctcagcctcacaaagtgctggaattacaggtgtgagccatggcacccggcctctttgctactgttaataaaaattatagtttcagagataatggatatataaaatcctttgtttctatacatacatgtgtgaggatagtcataaagaagcattaacttataatgtacacaattattaaatatacataaaatttaaaattcctattttatttacttgcagagcaatagttaaaatgtgaatatttatttgatccgttatagatgacggaagcaaaatcttgttattaatgacatatataactgttaatacaaatgattaaccctttcattatcccttaacatattaattctccctatttaaaggctttctaaacattgggcaaaggcacttgtataaacagataggcaaagtctcaaaaatggaagaaggaatagaaattgaatggtataatgacaaaataacaaaaatcttcttttgctaattgtgtaaattaaaataacctagtcatatcactgacgtatatattttccaaataaagtgcatttcagaagagcaactcagactgggagccacagctcatacctgtaatcccagcacttggggaggccaaggtgggaggactgcttgagcccaagtttgagatcagcctaggcaacatgagacttcatctctataaaaatgttttaaaaaaattagttggagggccgggtgtggtggctcactcctgtaatcccagcactttgggaggctggggtgggcggatcacggggtcaggagatcgagaccatccctggctaacatggtgaaaccccatctctactaaaaatacaaaaattagccgggcgtggtggtgggcgcctgtagtcctagctactcaggaggctgaggcaggagtatggtgtgaacccgggaggcagagcttgcagcagtgagctgagttcgcaccactacactccagcctgggcgacagagcgagactctgtctcaaaaaaaaaaaaaaaaaaaaattagttggatatggtggcacatgcctgtagtccaagctactcaatagggtgagggaggaggatggcttgagcctgggaggtcgaggctgcagcaagccatcattgcaccactgcactccaacctgggcaaccctgtctcaatcaatcaataaatcaataagagcaacttaggaagacaagtaattgaaagaataagactaaatgaaaatatctttttcttttttgaagtggctgaagatcactacaaatatcctaattttgaaaaaccaagttcctactttcaagacatttctaagttaccatggttagctgaggaactaaaaagagaaaataattaaaagccagaaaacaaagagtcttttaagaaaagtcagtatataaaatcaatatatcttgttgataattaccaaatgatctaaaaatacaagtaaacaaaggtaaatttctaatttagtctaaactcaactgagaaaataagacaataaatatcataacttgcaaattgtgttgttaaaaaaaattcttaaactaagaaagtccatttgtaaacactccagttaatgaaataacaagaatgattttatgtattaagaaagcttgtttacaaaattctagatttccatattgttattttttaaaaaaggtattttatttataaggatactgcaacaggaagtagagctctattctggaattgcaatctaacaggagagacaatctaaccttcacatttacattgaaaaattgagtttttaacaggcttctctgcaatgcatattcttttttaaaatataaaaccatttcaaaaggttcatatatgcatataaatatataaagcaaaagaacacacaattaaaaattaaataaatgtgccaaaatacagcttcttaatggcttccttgaaaactagatgtcaaattatcttaggctgtgtttatttttctataaagaacaaagtagactttacagctcagaaatccacgtaacaaatactctactcatcatactcacaggttttagtttttcttcctcactagtcaatactacagagtcttttcccctagaaaagctgaaaggcttcttattcactggtcatgttgttatcagacctgacacatcaggaatgacccacactttaatctccagccagctctttacgctgcccagaacttactgtgcgttacaggtgatacttcttatagcagatgttgattatggtcccaaagcacaagagatgctcccaaaggggtttagaacccctaacaacatcacctgcttctttttgtatccagagaagcactgtggtattctgttttgaacaactaatgatttcaagagattacacagacgagttcttttcattagattggttgacataagcttgtcctttcagaatactgcagcaaatataggttgtatgattccattaggataaaagaaatatttttacacaatttttctctgtggcgcagtttagttcaccctctgttagagcaaattactggaagaactggttcttaggtttctaatggcgcagcgttaacagagtgaatgattcacggatgttcttcttaacattcaggagtaacaaggaaggctagcagtgcagcccaggtccagagctgatgaatggtgcagtgctgctgttgtcatagcaaccaagaggaaaaaagcagcaccatataaggatctgtgacatggattctgggaacaatttatattaaaaagctgtaagctcctcatgccttaaagctgtaaactcctctcttactgtttccttctcatgttttgctcttctgattttctgaatcagagctgtgtgaatatacgctgtaaaacagttacttagtaggcaccaacaaaaaatgcaattgaggtaatttaaaatattaatactttagcaagctaatataggtctgcagtatctccataatttattaagtgttaaaattatacagtgattttgttgcaatgtaaggaactgtctagagtttgagatagcagaaaattcatttttaaatacttagagatattaaaaccctaattaaatgcctttcattcagatggtatgcatcagatatgccaaaactgcagcactatcaactgattgactaataaagtagcaatgacaccaatttcaaagagaggcatactatcacctgtattccttctagataaagaaagtttcaaaagacacttacttcactaaaaatgctcatagccttcattcatgaacaagaaaacttctccgtcaatcacttgtaagacagggttactggtccactccatgcttctaaaggcctctccctaactgggcctggacaatcgttttcttgtcatagttttccctcacctcccaggaattaggaagagctcccccttccaggggatagtaggatagcttccaaacggtatcacaggagaagagggagccagtgaaagcaccaatgcatagaattgtcgtaatggtactctctctatagtcttctggatgttgctctgagatgactggtgcagaaaaatatctttcattagatttattaagcatgggtcactgatgctatgatatttcatctatttatatagggtagttctatatgaaattgttctatatcatatctctgtgttacttttccatcaccatttatttaatgcaatattcagatacaatacaaagcaaaatattaggtaaatttacctattataccattctcttacatgggcaacactgccattataataccaattctggaaaagttacgtatttgttggtcatagatttatgatgcatttatctccataaatgaagaacctcagtaaaatgtgactaaaaagaattgcaatgtagtgggatggacatgcatttgactagtcttgactgtagttggactaacagctttgctacttctaaatataaccctgagtaaggcacctaactactctgacccactgattcatctcagtaaagcattttctaccttattcctaaagctactgtgggaatagaaaaaaataaatacaaagcaaaggcttaaaattctaaacatctatattatcttttttaatagtatctaagcaaaacagcaaagaaaaatgaaaagtggaatttcaatagaactccataaacacagaaaattgcctgaaagggtaaatatttttccaggctaggttttatgtttgactggatattgtgtcccatcacactgcatatacttttcacaagtagctagtagctatttctttttagaattatagtagatacagatactgcggactagcgttcaaggattatttaatataataatgtacaagtaattctactgcctcaacatgacttataaatgtcttcagaaaatagtaacttggtaataaagaagtataagtggtttctatggaatggttaatatcaaagaacatgcaaagtgattgagttgtttaaaataacctattactttttatcctacctaactagaaaactgtagggcaaactcaaaaatgagctattatgtttgacttggaaattccatggacagcctatctcattctgtttcctggataatctaatctcttctacctagtaagttttttaactcaaatattgtcttgtgccagtagttatttttgagggaaattctcttcagttgtgactttttagaatactaattattcaatatcttaggtaaaaagagcaactttctctcccacctccccatcatcaagtcatgttgagcagatctttgcattagagagataccagaaaagttctgcaaaaaatgtaaacttggacaacaaataattttttctaacgttgcttatgctgtgtaggagctaactgggatgaggacatgattaaaatacttcaaaagacaaagtacacaggttttgttttgcttgaaaaattggatttaacttaagggtggagagagatttaaggagttaagctcttccccttggttactaatttttaactcctttatgattaatttaggtaagtcatgctaaaacttatacagttttacattcttttttatttttattcttttttcagtcttgctatattaaaagctttctctaaggagtaatcatccgtgctaaactctattgtgcttaaaggtagggtaatatttatgaagagatgtacatacgaaatctctattctcacaggagttaagaaagtaaccattctactagctatagcaattcaagctttggccaactttctacgcggggttgtgtctttcctagcaatggctactgcttcagatcaggacttcaatctgcagcagtagggtaatgagtgacagagaagaaaaagaaatatattcttaaaaatcatatatgtgatccctatacatcagccaactacttcatctggtggtcaaagaaaaagagagtaaagagtaaaatagttacaactctaaaggataaactggcagggttggatatactgagaagcagtatttctgtttaatgaatgtcgtgaatgatatgtaatggatttctgaggataattttctttatactcagtttttattttatatgttgactttactatctaaaccctgaataaaattatcccaaatgtgtgatgctacctctaaatgataattgtaacatttgaaaaaggtcatgagttggcaggtggttctttcagaatgtttttattgataagcagggcataaaagggcatactgagccataagatacacatatcaaatctcctttctctcactttacttacttcattaatctaaagttataaaatttactgaatgatatagatgtatacataattttttctaaaaatcgttttcagaaatcagaaacatgaacattaaccagaaatggggaaaacagagatgttcaaccaactctggtataactcaaaacactgctcattgtgctatctaaacaaagtcatcaaaacagataataccacatagacaattctaaaatgaccatatttcttggctgggcacagtggttcacacctgtaatctcagtgctttgggagaccgaggtgagagggttgcttgagcccaggactttagaccagcctgggcaacatagcaagaccccatctctacaaaataatgaaaaaattagccaggtatggtggtgcacgcctgtagtcccagctactcaggaggctgaggtgggaagatctcttgaccccaggaggttgaggctgcaatgagcagtgattgtgccaccacactccagtctgggtgacaaagcaggactctgtgtcttaagaaaaaaataagtaaaatgaaataaccacatttcttaacttttgaaattctgcccacgacatgaatgactgacggacaaggtaaggatgcgcatttacaattaagaaaggccagctgaactgaaaatgtcctctggaacactctgccctctggtgtttaaaatcctcctctaagagagggagttactctgccatgccacgtgtttattactcttatgggctgaatgtcaatttgggtgcataattttctataatgagaataaatatatagtttagcattataaaaatttctgttgttataatgtgaacatatattctgttctaagctttatattatcccatactataatttatttcctgtttagagagttactaaggctttcttttgaatcgtggatatttatttgacttttgtgatgctttgtgactgaaaagtattcctcatggccaaaattgtttagcccttaaattccacatttgccactttctaaactgctcacattccatagcaggtgggaagttaagcaagtaaagaaggacaaggtcaattaagtaaaaaaattagacttcctagggaccatggcataaatcatggtgagttttctggggaaggtcacagaagaaggatggacaatgaaggatttttttctgtaatcttcatggtattttccatgtttaaaactgatacccaattcttggaaacacaacacaggagctaaaaaggatattaatcaagtgattgacaactttttcacatgttaggattctttttattatttccccttgtttgtcacaagaagtgcttggcacaaaaagaaactctacacacatttctgtattcctctcagccttaaggtgttattatcttcactgtacatatgaagaaacagaagatcaaaaagaactaatctgcccagagtttacaaatgactatgtagaactctaaacgggttcttcgttcagctgggttcttgaccagtgtgaccctatcagttctttgggtcctagagttctgagccttaaccctgccacattacagacattccataaagatctgttgaaaaacaacattaccttacacagtgacctcaatgttagacatttttcttggtgctgactacttgtcctccctggaactttgcctactgcctccccctagattcccttggattaacaggttccacttacttcctgtgacacctaacaattaccctactgctgatccaccctaatctttagggtctgcttatgcatctacttcatgagtgctaccacactgttatcttactaacttgccttctccatctcaggtcctaggtgtccttggtttgacccttcattggtcacagcactaaaaggaatgctggaccgtcaattcaacacttcagatttaggcaaacatttctttaaaaatgtagagaaaagaagctatgagcccatggtcaataattttaaaagagaatatggtttgagggtatagattaaaaataaaaagcaatggccgggcgcggtggctcacgcctgtaaccccagcactttggaaggccgaggcgggcggatcacaaggtcaggagatcgagaccatcctggccaacatggtgaaaccccgtctctactaaaaatacaaaaattagctgggcatggtggtgcacgcctgtaatcccagctactcaggaggctgaggcaggagaatcacttgaacctgggaggcggaggttgcagtgagctgagattgtgccactgcactccagcctggtgacagagtgagatacagtctcaaaaaaataaataaataaaataaaaagcaatttatacaatcataaacatatggaagcatctaaaaaaatattgccatatcagaaattttttgataaagacagattgtgcctgaaaaagaaatatacaaagagagggggaaataatcaaagatgaagagtagaaaa

SEQ ID NO: 96682 - DNA, 63885 bp, Homo sapiens
ttttcagacttttgagttctggcaacctacagactccacctggacctgagactcatgactcagctgatcccgtggctccacgcagaggcggactcaggggacaaaaatcgttgacaccccatggtccgtctgcagccgatcagcagcaggcattccctagcccctgcctgccaaattgcctgtagaaactgtagcctctgagttctctgggagattgagttgaataataactccagcctttctgcttggctagctctgtgttaaactctttctctactgcaataccacaattgcagtgaattggttttgtctgtgcagtgggcaggaagaacccataggtggattacactgaggagaaacagatctggaaggtggtggaggctccaacttctgtacttctggcagctcagaaagaagctgattcagcaggtctgtgttagctcaacatagtctgctctactccagagataaaagctgagaaggcttctctgggagcttctgtgttttcacagcgtgttctctccctccttcaactgtggcatggggcatgcagtccctacccagcctgggtgctcctcacaccctgcttacaggttcttcccccagtagcccttacggtacccacggacacacatggatgcagggttgtgatcttgacccctttgcaaggcccatgttccatgagccaggttatatgatttcagcatccccgcttacagtcaggacgtcattgtaatcttcattttctttacactgatggaagatatactccactcctaggaaaatgtctcccaaattgtagtcatctggaaaatcaggctggggaaattcacctgctttcagatgctaaaaaatgaggaaatgtagacttagagaacaggaaacgtaacccaaccacaggttgacaggtttcatcctggttaatcccaaggcaaataagcacttatctctgaccaaatcactttttttttttttttttttgagacggagtttcactcttgttgcccaggctgcagtggaatggcgcgatctcggctcactgcaacctctgcctcccgggttcaagtgattctcctgtctcagcctcctgagtagctgggattacaggtgcatgccaccgtgcccagctaatttttgtatttcttttttttttttttttcctgagacagagtttccctcttgttgcccaggctggagtgtccgcctcctgggttcaagcaattctcctgcctcagcctcccgagtagctgtgactacaggcatgtgccaccatgcctggctaattttgtatttttagtagagactgggtttctccgtgttggtcaggctggtctcaaactcccaacctcaggtgatccacccgccttggcctccgaaagtgctgggattacaggcgtgagccaccgcgtctggcctaatttttgtattttttagtagagatggggtttcatcatatgggtcaggctggtctcgaactcctgacctcaggtgatctgcctgcctcagcctcccagagtgctgggattacaggcgtgagccactgtgccagccacccaaatcactcttaagatgcatgtctcaggccagagtggcagctgggcctgtggcgggtgggttgcccagccaaccgtacacaagtgccctaaattgtttccattgtgaaaattgtcagaatagccaggcgtggtggctcacagctgtaatcccagcactttgggaggccgaggcgggcagatcaagaggtcaggggtttgacaccagcctgaccaacatggtgaaaccccatctctactaaaaatacaaaaattagccaggtgtgatggcacatgcctgtaaccccagctactcgggaggctgaggcaggagaatcgcttgaacctgggaggcggaggttgcagtgagcccctagactgcgccattgcacttcagcctggctgacagagcaagactccgtctcaaaaaaaaaaaggaatttgtcagaataaaaatggagccattagggttatacaaacaaaccaaaaaacctgacaaatagagctggggaaagctatgaagagaggattctcatacttccatgcctgataacaaaaactgtcactaaagatggcaaaaactgcaacaaaggctatgacaaccttacacacatacaaaactgcaaccttgcacaaaggctatgacaaccttacacacacacacgaaactgcaaccttgcacaaaggctatgacaaccttacacacacacaaaactgcaaccttgcacaaaggctatgacaaccttacacgcacacagaaacttctgcaaggataatctgcccagcaactgcctgtctaaccttggacggacattaatcttgttattgatctttgcaaccaaggatcattatctcaaaacaattatgtttttttcctttaaaaacctttgccaggcggggctcagtggctcacgcctgtaatcccagcactttggaaggcagaggcgggtagatcacctgaggtcaggagttctagaccagcttggccaacatggtgaaaccccaactttactaaaaatacaaaaaaaaaaaaattagccagatgtggtggtgggcgcctgtaatcccagctactcgggaggctgaagcaggagaatcgcttggacctgagaggtggaggttgcagtgagccgagattgtgccattgcactccagcctgggtgacagagcaagcctccgtctcaaaaaaaaaaaaaaaaacaaaacccttgccttcctttacctccctgaatatgcgaatatccacacagtctactatggcatgtggcatgtattttcactgcaatgctctatcccaaataaacatccttttctttaaaagcctgtttgtttaggttgctatcaccttgtcaaatggcttttcatttctttcatccctcccaatgcagaatcacgcagatccacaacttctacagagttaaatcatcacatggacacgactgtatattcctgttctttccacttggtattttgtcctaaagagtctttcacattttccacataaagactataaagaccagtccacttagttaaggactgttcacactaagccagtcacctatggctggatatttaggatgctcctcttattttcctattacagaaaatggtaactttttttttgaaaaagggtgttactctgtggcccagggtggagtgcagaggtgcagtcttggctcactgcagcctcagtttcttgagctcaggcgatcctctcaccttagcctcctgagtagctgggacgacagctctgcacaccaccatgcccggctaattgttgtttttattttttgtagaaacaaggtttgaccatgttgcccagactggtcttgaactcctgggctcaagtgatcctcccaccttagcttcccaaagtgctgggattataggcccagccaataaattaacatttcaatacatttttacgtgattcagcattttcttttcttctttttttttttttctttttgagacggagtctcgctctgtcgccaggctggagtgcagtggtgcaatctcagctcactgcaacctccgacttcctggttcaagagattttcctgcctcagcctcccgagtagctgggattacaggcaaatgccaccacacccagctaactttttttgtatttttagtagagacggggtttcaccatgttggccaggatggtcttgaattcctgacatcgtgatccacccacctcggcctcccaaagtgctgggattacaggcgtgagccactgcacccggcctcttctgccttttggtttattgtcttgggtgtgtcaccacaggactaaaggatacatgtgtttgaaatgccaagttgctttcccaaaggattgctccaattcctgctgctacaatgtgggaagccttgaatgaagtcatctacagaatgtagataataacctgactgctattacatcgagtttgttggaaatatttaccccagtctgtttattttcagtgttgttttaatttttccaatgtgcacatattcattaacgaatcccacttaaaactgcaaaaatattgcagaagcagtttgcttctctcttctaattcactgagagcattaggaggggaaggggggtggacgctagtcacctttttcttttcttttttttttcctgagacagagtttcgctcttcttgcccaggctggagtgcaatggtgtgatctcagctcactgcaacctccatctctggggttcaagcgattctcctgcctcagcctcccaggtagctaggattataggtgcccccctccacctcccgcccggcacaaccacacccagctaattctttgtgtttttagtagaggcagggtttcaccatgttggccaggctgatctcgaactcctgacctcaggtgaaccacccgcctcgggctcccaaagtgctgggattatgggtatgagccatcgcgctcggctgtcacctttctttttcctgctgggttaccagtgtaattgtagactctgggtgatgggcctcgatcagtggaggctgaatatactgctctctctacttttgtgtatatttgaaaattttcaaaattaaaattaaaaatcatgtctgtaacatatatacttataggcaccatggagcctagcctataatataattaatacatgaaatttaggccgggtgctctggctcacgcctgtaatcccaacactctgggaagcccgaggcaggcagatcacctgagatcagttcaggagcagcctggccaacatggtaaaacccccgtctctactaaaaatactgacaaaaaaaaattagccaggcgtggtggccagcatctgtggtcccacctactggggaggctgaggcaaaagaatcacttgaaccaggaagggaggttgcagtgagccgagatcgcaccactgcactccagcctgggtgacagagcaagactccgtctcaattaaaaaacaaaacaaaacaaaacaaaacgacaggaaatttactctgggaagatgggctagacaagaagaggaacatttttttttttttttacctcatgaaatggaaaagaaagcacatcggttgggacatttctatctctgtagattctattaatgtgctgaatattcttgttgtcaacacagatgatccccaggtcaaatttctgcactcctaaaatcctccttacaatctcgatcttactgcgaagtggcgctctcctgatggggatgactcgctgcagatttctaatcaccaaactcatttcaggaagaataaccagccctttaaaaatgtttgcaacggaacctggggttaaagtgtaagagaagaccaatcagtacaagtgataatacggtctgtaaaaatacagatgcacgcgcaatcagatcactttatttggtggaactgattgaaaatcttaagggaatttacatttaccacaaggaggaagcaacaacgagggtctatggaaggatgccgcggaatccggccagaaggactccaggcgggcggagcggaaggagcggttcccagagaaaagggggcgggttgggggtgcgcgcggagagaggcgcgcggacgcggcggggtgcggggaggggcaacggctggggagagaaggggctggaatgggggagggacaggagaggggacaggtaagcgttgggggccgggtcctctggggtctggggcgcccgcagacccacgcgggtgaatgcgacgctctcgcttgggagactaaaaacccgcccggacgtaccggtgtctggacccagcaaaggacgcgagagcgggcggaccctcccgaccggaagccccgccacagagcgggttgtggggagcggaaccggatcgcagcgggcggggcggaatccggtagtgctgagcgaaccggaagtcggtccgcggcgttttctgcccgcggtgcgcagcgctgagtgtcgcggcagcagcctgtgcttgcgcctcaagtctttccgaggggccagtgggcagcgcgggcctcggggtcctggggcgagacggtgagcgtgggggctgggccggcgccaggggcgccgtttccttcccccacgcagctccgcgcgcccgggcctccacatcgtcgctaacggagcgttgcggcgccggcgacccctggcgagcccggggcgggacagtggccaggccggcctgggcccagcgcgtggcctccgccgtttcgggctgtgctgggtggaagattaggctccccgggcacgccgtccccgccgagaggcctcagcttcgtggcagcgccctcgtccttccagcccgctcgagggtggccgccagggcgcgatgaaggaatgtgagaaagtgcttagcgctccagccgctccgagggaagccaggtgggaggagatcccgaaacgctaaggttttgacagcgttacaktgaattctccggctgtagagattggaggaagtcgggagaaattcgtctctaagttgtaaggtggaacagcattcattttcttactgccaatggaggtttttcatgaatttactaactcagtaaaaagattcggcttttttttttttaatcttaaaggatcacgctttaaacctctgtaacaaagtaattatttgtaccactctctaccccaccctccaacaaaataacctatcggctctcagaaaataataaccctttgcctgcctttgaaatagttatccttttagtatgacagtgttcaaaaattcttttcttagacttgtagcagaacatagctatgatgatctgaatttttctctttcagcttgttctaaagacgaaggggaactccctagtgctacaggctgtttcaggaagccaattaattttgtacacrtaatacttaattaccttctaataattggagcagaagatgaacccaactaatcctttcagtgggcagcagcctagtgctttttcggcgtcttctagtaatgtaggaacacttccatctaagccgccatttcgatttggtcaaccttctctttttggacaaaacagtaccttatctgggaagagctcgggattttcacaggtatccagctttccagcgtcttctggagtaagtcattcctcttcagtgcaaacattagggttcacccaaacctcaagtgttggacccttttctggacttgagcacacttccacctttgtggctacctctgggccttcaagttyatctgtgctgggaaacacaggatttagttttaaatcacccaccastgttggggctttcccaagcacttctgcttttggacaagaagctggagaaatagtgaactctggttttgggaaaacagaattcagctttaaacctctggaaaatgcagtgttcaaaccaatactgggggctgaatctgagccagagaaaacccagagccaaattgcttctgggttttttacattttcccacccaattagtagtgcacctggaggcctggcccctttctcttttcctcaagtaacaagtagttcagctaccacttcaaattttaccttttcaaaacctgttagtagtaataattcattatctgcctttacccctgctttgtcaaaccaaaatgtagaggaagagaagagaggacctaagtcaatatttggaagttctaataatagcttcagtagcttccctgtatcatctgcggttttgggcgaacctttccaggctagcaaagcaggtgtcaggcaggggtgtgaagaagctgtttcccaggtggaaccacttcccagcctaatgaaaggactgaaaaggaaggaggaccaggatcgctccccaaggagacatggccacgagccagcagaagattcggatcctctgtcccggggcgatcatcctccagacaaacgacctgtccgcctgaatcgaccccggggaggtactttatttggtcggacgatacaggatgttttcaaaagcaataaggaagtaggtcgtctgggcaacaaggaggccaaaaaggaaactggctttgttgagtctgcagaaagtgaccacatggctatcccaggagggaatcagtctgtcctggcaccttcccggattccaggtgtgaataaagaggaagaaactgaaagtagagagaagaaagaaggtgagctctgaaaatgtagcacatagagtraatcctgcaggcaggttttcaatacgtttctctgggtgttagcttgatttttcagataaatctcccataaacattagggattctaacatgtcatcggagcaggtcttacatctgaaaatttcctctgcttcgacacagttggtgcctcctgttgttggaaacatctgatggtttaagtgtccattctctgaacccctagattctctaagaggaactccggcgcgtcagagtaacagaagcgagagcacagacagtcttgggggcttgtctccctctgaagtcacagccatccagtgcaagaayatccctgactacctcaacgacaggaccattctggagaaccattttggcaaaattgctaaagtgcagcgcatctttaccaggcgcagcaaaaagcttgcagtggtacatttctttgatcatgtgagtactcccatcttgccatttgttaccctagatttgaaccttgtcactttaaaacctgttttttttttttggtccctcagttgtttgcttactataatatagagaaagtactcaaatatcttattagcataggctgggatagcactatttatttcataacttggcatattctaggtccctacagaatatagtactctagaaatgctgggagagttgttctcatgaagtgaaattcttctgaaaggctttagaaattcagaaattcttctgaaaggctctaaccacatagtacttttggaagttgagttttttggttttgtttttgttttatttggtcatagaagatgatcgctgtaaacgttcaaacaatacagaaaaagtgaaattggccgggcgtggtggcttacgcttgtagtcccagcacctggggaggccaaggtgggcggatcatgaggtcaggagatccagaccatcctggctaacacggtgaaaccccatctctactaaaaatacaaaaaattagctgggtgtggtggctcgcgcctgtcatctcagctactcgggaggctgaggcaggagaattgcttgaatccgggaggcggcggttgcagtgagccgagttcgtgccactgcactccagtctgggagacagagccagactccgtctcaaaaaaaagaaaaagaaaaaaagtgaaattccccttgtcagtctgtcctctagagataactgctttgaagcactgggtttgtatcctgactttaaatgtatgcataatactttctttttatttatttatttatttttttgagatggagtcttgctctgtcacccaggctggagtgccgtggcatgatctcggctcactgcaagctccacttcccgggttcacgccattctcctgcctcagcctccggagtagctggaactacaggcgcccgccaccacacccggctaatttttttgtatttttagtagatacgggctttcactgtgtcagccaggatggtctcgatctcctgacctcacgatctgcctgcctcggcctcccaaagtgctgggattacaggcgtgagccactgcgcccagcctaaatgtatgcataatactttctagggtgcagtgaacgtggactgcttatgttatatagctttatatcgtcactattttttctgagtattctcatagacaaaattacgttctataggaatttataaagtataaatttataaagtgaatgatactacattgagtggatggactacgttttgttgattcgtctgttggcagacgcgggttgtttctactttttggctattgtgaataatgttcattggcatatgacttatttgagtccctgctttcagttttttggggtatattcttaggattggaattgctgggtcatatggtaatcctaatttgtttttagttttaatttttttaattaaaaaaagtttgtatttttacatttgtatagatggggtcttactgtgttgctcaggcaggtctcgaactccggtcctcaagctgtcctcctgccttagcctcccaaaatgttgggattacagacctgagtcattgtaccggctctcatttttgttgttgttgtttttgagacggggccttgctctgtctcccagcctgtattgtagtggcgcaatcttggctcacttcaacctttacctttccrgttcaagcgattctcctccctcagcctcccaagtagctgggattgtgtgtgcaccaccatgcctggctaatttttgtagttttagtggagagggggtttcaccacgttggccaggctggtctcgaactcctgacctcagtgwtccacgcaccttggcctcccaaagtgctgggattacaggygtgagccaccatgcctggccttgtttttattatttattactactatttattttattgttattttattatttatttatttttttgagatgaagtttcactatgtggcccaggctggtcctaaattcctgggcacaagtgatcctcccacctccacctcccaaagtgctaggataacgggcatgagccaccatgcccaacccccttttgtttttacagttattttttgcctgttgcaatgtgcttattttcccagctgaaccttaaatattttatgacataactaatatgtaaatagactgcctttataaacaattcattgatacagacaaaactgaatatcctcatctctcctgttactcaggagcagtccagttaactagtgtgatgtgtatttttttagacatttttatgagtgtatctacacggagactaacgtggttggttttgtgtgtgttttctgtggtaagtggcatcccatgtgtgttattctgcagctcccttttgtgcttaattgtgacttcgcaaactttctgtctctgtatgtgtgatcagctggtgagaatcatctcaccaaatgccaacaaggccaagtttgtgagttctatgaagcaaagttgttaattaaaaaaaaggggccgggcgcggtggctcacgcctgtaatcccagcactttgggaggccaaggtgggcggatcacctgaggtcaggagatcaagaccatcctggctaacacggtgaaaccccgtctctactacaaatacaaaaaattagccggatgtggtggcgggcgcctgtagtcccagctactcaggaggctgaggcaggagaatgcatgaaccctgaaggtggagattgcagtaagctgagatctcaccaccgcactccagcctggstgacagagcgagactctgtctcaaaaaaaaaaagggggaaagagcaaatacatgcttgtgagacaggtaagggagatgaatactgctgctgccgcagccagagaccatgcagttagcagacgtgtgggtggagaaatcactgtygtgcaaaggacaggagctcctggtgcctttgaatggtctgttgtgcttactgcatttgagttttcaatcccatttcctttggtttcctgatatactcacacatggcggttgtggactrttttccaggcatctgcagccctggctagaaagaaggggaaaagtttgcataaagacatggctatcttttggcacaggaagaaaataagtgagttttcaattattcttttcactttttaaaaaaattatttttatttattttatagagatgagatctcgctatgttgcccagtctgatcttgggattacaggcatgagccattgtgcatggccctcttttcagtttctcatgctcttggtccaaaccctttgagcgtgagccctttccccagccagtggaggaggctggctctcagtggatttgcatctcacagttatttccttgggctcttctctaaccwcctgtgacaatgaaaataatattactttcttagaaacagagtgaaaaaatccagttccaggtgatctgtgattgcataaactcttttctgcctcctatgtccacaggccccaataagaaacccttttccctgaaggagaagaaaccaggtgacggtgaagtcagcccgagcacagaggatgcaccctttcagcactctcctcttggcaaggccgcagggaggactggtgctagcagcctcctgaataaaaggtgggatcggtccctcctaatgaccttattccggaaggaccaggaaatagygccctatagcgacacctgagtcagggtgcaagactgtggggagtggtgaggagacaaaagccagttgctagggatggttgggggtggaggggcaggggctctgcccctcctgccagcatgggccgttaggaggtgggtctgtgtggggctggtggtcccagccagaagagagaattttctgacactggtaactgccagctgcagagatggtggagagcagtgattctgtcctgtcttgttctcatataccctagggccaaggttgctgagaaagccttcctttggggctggcctttttttcttgtttccatcttggcattttctatgggagaatctcatcacacagttgttatagctggtacagacctttcagctgcagctacaggagatccaggggaggctgctcacttaggacagcmgaacttctgtccttgcacagagtgcctgctctgtgggacacacgcaggctggcgccctgtggcgggtcgctgcctgcctcacaggattgtagtaggaaatctccttgctcatctaactcgtcctgaatcccactgcagttaagtgcagttccacttgacatataaatgtataagcaataactttttacctcaagacatttaactggctgtaataaaccatgcattccttttttttttgagacacagtctggctgttgcccaggttggagttcagtggcacgatcttggctcactgcaacctctgcctcctgggttcaagaaattctcctgccttagcctccctagtagctgagattacaggtgcgctccaccacgcccagctaatatttttgtatttttagtagagatggggtttcaccatgttggccaggctggtctcgaactcctgactagagatgcatgcccggccaaaccatgcatttctaataatcactttcagcagtttccagcattacttttttttttttttttttcctgaagagctgtctcctggccgggcgcagtgctcacgcctgtaatcccagcactttgggaggccaaggcgggcggatcacaaggtcaggagattgagaccatcctggctgatatggtgaaaccccatctctactaaaaatacaaaaaattagccgggcatggtggcaggtgcctgtagtcccagctacttgtgaggctgaggcaggagaactgcgtgaacccgggaggcggagcttgcagtgagccgagattgcgccactgcactccagactgggcaacagagcgagaccccatctcaaaaaaaaaaaggctgtctcctaaaggaagggcagcatgactttttgcaggtgcagcttatcacagtgaagcagacacggtcggccatgttagttgtgttaaccggcatgtgatgtgaagtgccctggctaccttgtctgtctggggaactctgttctcaaaggcttttgcttttcacaccaggcctactttgacagatctccggctgaatccatcttttcatcttttggccaatgtattttcctcactttccgttttgtgaygagcagtttagttgctggtttgacataatctttgacattcaagttcagaaaatgatgaaagctagaaaatggggaagctgagagagaatgcctgattccttttagtatgtccttctaccaaaataatttctgttttaaaacatgtaggcttaatatttccttatgatattaaagacttttttcatgctgagtttatttctttgaaatagaaatcagtaagtgttcattttagctgtttaaatgagcctatctttttttttttttcggggggtggtaagttagagtctcactctgtcacccaggctggagagcagcagtgtaataatctcagctcactgcaacctctgcctgccaggctcaagcaatcctctcaccccagcctctcgagtagctgggactagaggcacatgccaccatgcccggctaatttttaaattttttgtagagatggggtctccctatgttgcccaggctattttgtttttcaaaagtatgaaatatttcaaaattatattaaagtcagtgagtaatgtgaataacgcttttgtgctcattaccatccttatcaaaactcatctcatttcagtgcttgtagtttctcagctttagaggaccagaaaatcttgaaagatgaggggacgtgttcagaaatgaaaatgctctgaaggccttcctgggacgagggccctcagygtggtgtttactttatagctctccagtgaagaagccaagtcttctaaaggcccaccaattcgagggagactcttttgactcagcctccgagggctccgagggcctcgggccatgtgtgctctccctcagtaccctgwtaggcactgtggctgagacatccaaggagaagtaccgcctgcttgaccagagagacaggatcatgcggcaaggtatggcacttggtggcagaggttctaggggcctggtgaggtcgtcatcttgggtgccatcagggcaggagcaactcctttccattgggctctattgctgttgagtctcagagcctgtgatatgctgtgtctgatcttcatagtctgcctgtcttcttggagtgagtgttgcgtgtatgtgtacataaatgtgcaaatatgtttgctaatgtatgtataaaatagtagtgggaggatgcaaaagaatgggctcctgtctgtagagggagcgggattccgaggggcagaggttatggtggagtgctccgtcttggacagggcattcttacactgttacaatgttgaactgtgtgaatgtattacctactaaaaagtaagtattccattaacactaaaaatatatgcagggaccaaaaataaaaggaaaaaacacaggtacttctcttagccaatttttttctcttaaatttcagccgggctgggcatggtggctcacacctgtaatcccagcactttgggaggctgaggcatgagggaccacctgaggtcaggagttaaagactagcctggccaacatggcaaaacccccatctctacaataaataaataaataataaataagcaggctgggtgcggtggtrtgcatctgtagtcccagctacctgggaggctgaggcaggagaatcacttgaactggcgaggtggaggttacagtgagccgagattgtgccactgcactccagcctggacaacagggtgagaytctgtctcaaaaaaaaaaaaaaatgctgggcgtggtggctcacgcctgtaatcccagcactttaggaggtcgaggctggtggatcacctgaggtcaggagttcgagaccagcctgaccaacatggaaaaaccccatctctactaaaaagacaaaattagccgggcgtggtggcacatgcctgtaatcccagctacttgggaggctgaggcaggagaatggcttgaacccgggaggctgaggttgcggtgagccgagattgtgccattgtactccagcctgggcagcaagagcgaaactccatctcaaaaagaaaaaaaaaatcagctataggagtttcctctttttaaaagctgtggataatttgaataatcaccatgtttccttaatataataacatatagtaataaaagctgccatcaaacatcatatcattgatacrgtgatttttatattctawaaattattattaggtattagaatttttctttttttttttttcctcgagatggagtcttgctctgttacccatggtggagtaccatgacagagtgagcgcaacgtcagctcactgcaacgtccgcctcccgggttcaagtgattgtcttgcctcagcctcctgagtagctgggactacagccatgcgccaccacgcccggctaatttttgtattcttagtagagatggggtttctccatgttggtcaggctggtctcgaactcccgacctcaggtgatctgccagtcttggcctcccaaagtgctgggattacaggcgtgagccaccaggccgggcccaggtattagaatttttcaacatgaaaacaataagtatatattttgagtgtgaagttgttgcatttccttttccttgcaagctacattgtaacttaagtgtaayagcagtttactcattcaggtaagaacccagttaacgtccattatatgattcttatattaaagtcatggtgaatactgagacagttttagaatagtgatatattttgaatatttgcagttgttacaagtcaatccttttagtaaacatcctgcaccatgattttttgtcattgaggtcattacaggagttagaaaactccggctgaaagtgaggacactcccctgcttttatctgcagtgagggtctgtgactgttggagaggtgactcgggggtctttctcttagtctgcagtgagggtctgtgactgttagagagaggtggactcgggtctttgggagctttgatgtcccactgcctggcakaatagaccataagtcctctttstctgaggctctgagttttacaaatgtttttcttttcttttgtaatgtgtgtgtgtgttttaagttttaatttctttttatcattatgagaatacacttctgtaggttcgtgctaaccatgtggtacattcttaccttttacttgacgtcatttagctcgggtgaagagaaccgayctggacaaagcgaggacttttgttggcacctgcctggatatgtgtcctgagaaggagaggtacatgcgggagacccgtagccagctgagcgtgttcgaagtggtcccagggactgaccaggtagagccctgcatctcccygtggagtgtgggcaggggacggggctgcttttgtcatttctgtacatacttgatttgggtgtttgttttagacagtgttgggtatttgtgctattaacaatcatattaagctgttttgcattgtgagatgttcactctgtaattggtacctatacatgataaggtatagatgcaagttattttaaataaagttgtttttcaaattctttttttttttttttttttttgagacagggtctcactctgtcacctaggctgaagtgcagtggtccaatcatggctcactacagcctcaacttcccaggctcaggtgatcctctcctctcactcagcttacagagtagctgggattacaggcatgctccacyacgcctagttactgttttattttttgcagcgatggggtcttgccgtgttgcccaggctggtcccgaactcctaagctcaagtcatctgcccacctccgcctcccaaagtgctgggattacaggcgtgagccaccacatccagctaacttttttctttttacgatcttattcctgtctgtttctatgcttatgttttacacattcgagattatgctctagatacaattttatgtgtatcttttccacttaaaattatgtcatgaacattttcctttgttagggtaaactatgagcatttaaaaatgacagcatattattttattagtagctctgtcaaaactctgcatttttaccrttagtagataggctgcttctaaatttttagttctattagtaatattgtttggcatcttgtatgtaatgcttctctggtatttagattattttcttcagatcctaagaattaaattactgcatcagagggtatgacctttcctgaacattatccatgtatcttcccaaattgttgccccagaaagctgcaccaatatagatccttttggactttgtgaattttgcttatgggcttctcctcttcctggctggtggctttatacacccttcgcctggtgcggggtccccagcccagcaactcgtgtcactgtagggcccctgccccaggagaggcacatgcccagggccttgtcctgtgtacatctctgcctcttcccttggccacgtcttcagcctccttttgaggtgggagatgcaattccaggccccaggtgggcagccagcccctgatgctgtgtcctcagcagtcctcaccgcctgtctctgtttcacttctgctctgtgtagacttaatctggtgtgtgagcgggcctgagaccttttaagtgcttgaggcccttccctgtcccgtctctctgctttggaggctagcagatgtgccttcacttaacattcctcctgtttgtcatgacgcactcatatcttaactccttgtcatatttgccaaaatcaaatttctctatttgtctttgaattttgattgtcaccttttaacagaaattttatgttgaaaaaatatattctcaaatactgatcttgtgtgggtgtgtatgtgattttccccctcattttcaggcataactatgcctggcccaaggtatgccacatgggcatcctgtctcggcttcatgtctctaggtggaccacgcagcagctgtgaaagagtacagtcggtcctcggcggatcaggaggagcccctgccccacgagctgcggcccttgccagtgctcagcaggaccatggactacctggtgacccagatcatggaccagaaggagggcagcctgcgggattggtatgacttcgtgtggaaccgcacgcgtggcatacggaaggtattggctgcctccaacctggatgctaaaaaatccacgcaaattccaaagtcaaactgatatttttattactctgttatatattttatctgtaacaaaaatgtacttttgtgggccaggtgcagtggctcaggcctgtaatcccagcactctgggaggccgaggtgggtggatcacctgaggtcaggagtttgagaccagcctggccaacatggttaaaccccatctctactgaaaatacaaaaattagcttggcgtggtggcacacgcctgtagtcccagctactcgagcggctgaagcagaattgcttgaacctgggaggcggaggttgtggtgagccaagatgacaccactgcactccagcctggcttctgtctcaaaaaaaaaaacaaaccccaggacttttatttaagtcactacaaagtcctattaaaatgtgcatcatgggctttgtttcaaattgaaaagtgagaaattgaggtcgtagcatgatccttctcacrgttgcctctttgcatgggaatgtgtgtgtgatcctccccctcgcctgtggccaggatatcacgcagcagcacctctgtgaccccctgacggtgtccctgattgagaagtgcacccggtttcacatccactgtgcccacttcatgtgtgaggagcccatgtcctcctttgatgccaagatcaataatgagaacatgaccaagtgcctgcagagcctgaaggagatgtaccaggacctgagaaacaakggtgtcttctgtgccagcgaagcggagttccagggctacaatgttctgctcagtctcaacaagggagacatcctaaggtgaattttcacatccaaaagttgtcctaaggtggctgaaaaggcaggctttaaacaggrgaagagctttcaggagtggcagtagccaatagtgcagcattctgtctggtagcagatgttgggatgatagtagaggaccttggtctggctttgcagtcggctgagctgagctgggggaagagcgatgggggtgtgccctgggaccagcacatctgacgtaggccccacatgttcatttctgaaaatagtttctcctcaccagtgagaaaatgaggaaggaatcctcctcatgagacaggtgagtgaaccaggagagggagttccaggtgccctgcaaggttgttagcagttccctgttcccagatagttttgtcaaagatctcagaataagagaggaaaaaattatgtaaaacaaaaatgcgaagaatggggtagtgagaatgaatgaatgtaaaaccctggtctgatccataattagtcacttacatgcgaagtctggcgagctctctggccctctgcttgtggtggaccctctgcttgtggttaagctggacttatggtggacagtgtcccctttagttctaagaatcccctatcaatggtgaacctcttttttttttctttgtattttcctcaagaactgtgtgacagaatatctagatgtgtggttgattttaattttttatttcattttatttttgagaccgagtcctgctctgttgcccaggccggagtacagtagtgckatcttggctcactgcaacctccacctcctgggttcaagcgattctcttgcctcagtctcctgagtagctgggattacaggcacataccaccatgcccgcctcatttttttgtatttttagtagagacagggtttcaccatgttggccaggcttgtccggaactcctgacctcaggtgatccacctgcctcggcctcccaaagtgctgggattacagttagagtctccatgcccggctgattttaaattttaaaattaagccttgtatagcctgggcaacatggtgagacccttccacaaaaatgaataaataaataaaattaaccaggtgtggtgatgtgtgcctgtagttccagcgactggggaggctgaggtgggaggatcccttgagcccaggaggtcaaggctgcagtaagctgtgatcatgccactgtcctccagtctgggtgacaaagcaagaccctatctcttaaaaaaaaaaaaaaaaaacccaggtgtggtggcccatggcctgttatcacagcactttgggaggccgagatgagagggttgcttgaggccaggaggttgaagctgcaatgaactgtgattgtgccagtgcactccagcctgggtgatagagcaagtactctgtctcaaaaaaaaaaaaaattaaactggttatgaaagattgctgtattgtctttttctacgtgacaagcatttgttctccatcacgaataattcagtcaaaatcaattcatttctaaacaaaaagagttaagttttctgttttttagaytttaccatccagcacagctgacagtccattggcattactttaaagtaactttttgataactgattcctaaattgctttttgaatttgtttattctattcattattgttttgaaggaaacctttgtcaaaccaatccaagcgtggtagttagtaaactatgaatttaacggcacatttcaccagtaagaccctccttctcagtatggttgaaatccagtatcattattacttgagacagggtcttgctctgtcacccaggctggagtrcagtgatgcgatcacagctcactgcagcctcaacctcctgggctcaaacgatcctcccaccttggcctccccacgttttgggattacaggtgtgagccactgcatctggccagtgaaatctattatttatcagatctatcttcatgaaaattttgtcttatttaaaataacattccaaccccttttctctcctttaattaacagagaagtacaacagttccatcctgctgttagaaactcatctgaggtgaaatttgctgttcaggcttttgctgcattgaacagtaataattttgtgagatttttcaaactggtccagtcagcttcttacctgaacgcttgtcttttacactgttacttcagtcaggtgagtaaatgagctgtgcttgcagagttggaagaaagcaggtggttcttgtgctgtttgggtgctttcttattccaagcttttcaaaggaggtctcaggctgatgctgtgtcacccttgcagcagccccacgaaggggttaccggtgttgccctgttttataggggttatcactgttggtcaccatccggaaaggctgtgcaatggaaaatactgttccatggttcaaataagaaaaatctctttrggaaaacataggttgaattcagcactatcatcatccatgaaagctaactaaaaagcaaaaatctcatatcatatgcacaaaatctctgactttgaaatgcttcatgttttaaatcgaagtttctggagtgaggctgatggcgctaagttcctttcagtgggtgcctcagtgtctgtgctttgccgtgtgctagggttgcagaggcaatgggaaggccagtccctcccctggggtttgcgcagagtaaactgtgtcttggggtttccagtcggttattttgttccacttccacggaacttggggatgaggacagagcagcccctgtagcacctgytgttctaggccctgcatgattccgttcagtgcaatgtgaccaggaccgcggcccaccgcacagagcgccacctcacctcgcacacactctgctgcccattctggcagcggctccaaggaggctgccaggattccttgccacaagcccgtagtggccacagcgtggggaggatgctgcctgggagatcctgggacctgccttggttgatctgtggctccaggtcatttctttggtcacacatcagggcctcctgtaaacagtgactaaacccacagtcatgtcacagtcagaaggtcttttgcaggtttgctccttgtcagatctgcaggttgccaaacagaactgatattctggagtaaatgaaaaggttttccacaacttgccacttgtagttaatattggctgggtgctttggctcacacctgttatcctggcaccttggcaaacttgggaggtgggaaaattgcttgagctcaggagttcaaggccagcctgggcaacatagggaggccctgtctctactaaaaataaaaaaaaagccaggcaggtgtggtgggatgctcctgtagtcccagctactcaggaggctgaggtgggaggatcgcttgagcccaggaagttgaggctgcagtgagccaagatctgcactctccagcctgggcaacagaggccctctcaaaaaaaataaacaaaaataaaacatagttaatgttgtatacaygatgattgagcgttagtagaatgttgaccatttttaataactttatttatttatttatttagagatggagtctcgctctgttgcccaggctggagtgcagtggcatgatctctgctcaccgcaacttctgcctcctgggttcaagtgattctcctgcctgagcctccctccccagtagctgggactacaggagcccgccaccacgcccagctaacttagtagagatgggatttcgccatgctggccaggctgatctcgaactcctagcctcaggtgatccacccacctcggcctcccaaagtgctgggattacaggcatgaaccaccttgcctggccgtttttaataactttaaacaaaagagatattcgggtatttttctttagaaaagctcttcaccggcagtggcgcacagaggcagcctcctgtccccgcagccctgtgcactcctgctcagaggctttgtgcttgctgtttccactgctgttccacactcgcagagccgcacggcgctgtctccacctccctgaggccaggcgaggcttggctgccgccctcagcagggcccccaccagcgctccctgctctccctgcccatctgccgcactaaatcaccattctgtgtgtttgatgtgtttgttttctgtggcattggtctctcccctggcatgtcagctatgtggggacagggattgtgtttttgttcactgttgtactctcagcattaaaaacggtgccaggcacagagcaaatgcttgatcagtgttggttgaattaaagaacatcggaagaggactaacagcttakgtaccaaagtcccagcactcaagcagaatttttgttcggattttcatgtttttcctttgtctatttttacttttatttttatttatttatttttttgagatggagtctcactttgtcacccaggctggagtgcagtggcatgatctcggctcactgaaacctccacctcccgggttgaagtgattctcctgcctcagcctccctagtagctggtattacaggtgcgtgccaccacacccagctaatttttgtatttttagtagagatggggtttcaccatgttggccaggctggtctcaaactcctggcttcaagtgacccgcctgccttggcctcccaaagtgctgggattacaggcgtgagccaccacacccagccccattgtcttttttttaagacactggttctcactctgtcacctaggctggagtgcagtggtgtgatcaaggcttactgcagcctcaacctcttgggctcaagcagtcctcccactttagcctcccatgttgctgggaccacaggtgcatgccaccaagccccactaattaaaacaaatttttttttatagagaataggatgtagctatgttgcccaggctggtcttgaattcctgggctcaagtgatcctcccaccttggcctcccaaagtgctgggattacaggtatgagctactgcacctggtctctgtcttctttttttttttttaaggctcttgttagaatgccgtgaacagttgtctccaactattatatgtcattccacgggattggtttcctgctggcattccatggtctccggggtcctctgcagcaccttcctggccttttgtcatgtggatgctgcacagctgacttcacctggtcttgttgatggacagtttgtttcatgatttctcttatgaataaaaccttcacaagccatccttctctatgagagtgtttgcttggcacgcattcctgagcactgcccctgagcagaccgcctatgatctctaagcttgggttccgtgttgccaaagcgccttctggtggactcagcccaggaggagcccatgtgccccaygctggccatggctgtggtcatgggctgactgcatgtgtctgactgggccttcgtctgagactgcagtgatttcgctcctcctctcagatccgcaaggatgctctccgggcgctcaactttgcgtacacggtgagcacacagcgatctaccatctttcccctggatggtgtggtgcgcatgctgctgttcagagactgtgaagaggccaccgacttcctcacctgccacggcctcaccgtttccgacgggtaagagctgagaatggaactgtggggcccctgtctccttttttcttgttaattctgatgargggctgtgaagggctggctgcttgcctgacttgaagaaggtgcattccctctgccatgcaggtgaacacacgagactcagaatggctgggggtgttcccaaggtcacatcctggctgtcagcacattgagggctcagaccaagttctttgtgactccaaaatcagtccttttcatgacttgctgacaaacctaaagataaaagttagggccttctttattctttcccttgactgcctttgccagccaatgacggacaacctctgacggctgggatggaggcacccgcaggccagccggagtcttctccggtacttaccagtcagagtggtgagactcacagacgctctctcagaaactggcagcttacactcaacacccggtgcctagttccccaccctgtctcctctaactcctcacctgcctcctgcctgtctcctccttccagttctgtctccttctagttctgtctcctccttccagttctgtcctcagaaaattagacggttttgggtgagccagcaaggaggcaggagtgagtcagcgtgcgtctgttaacacgctgggcttagtggttctagggacctacagaggctccagggtgggcggcagtgggacctggcgcctgtgctttctgttatttacacatggctgtggtgacrcccaaggggcttgcagtactcrgcagggcactgagggcgaagctgtcttctcccctggtgacacccctcgggggtcttttgtggtctgggtagctgtgtggagctgaaccggtctgcattcctggaaccagagggattatccaagaccaggaagtcggtgtttattactaggaagctgacggtgtcagtcggggaaattgtgaacggagggccattgccccccgtccctcgtcayacccctgtgtgcagcttcaactcccagaacaagtacatcggggagagcctggccgcggagctgcccgtcagcacccagagacccggctccgacacagtgggtgagtgaagctgcagtcgtagtgaggggactagctgcattttcccaccagracgcctcccaggagcctgggcatctgcattttctcgccaggacgcctcccaggagcctgagcacctgtcttgtcttggggcccaggggtgtggctcttcctcatgctcagatggttctcactgggagtggactgagggctttgaagccctcctcctggctccctgacatcctggggcttgtttttcatgcaaagcgtatgttgtcccacgtagctggtctcctggagggcaggccagtcctcagggtcactgtgggtggcctggggctgtccctgcacagacctcggtccccgtggtgccaggcaccctgtgtctgcagctatgttttgtcctgtatgtttccttccaggcggagggagaggagaggagtgtggtgtagagccggatgcacccctgtccagtctcccacagtctctaccagcccctgcgccctcaccagtgcctctgcctcctgtcctggcactgaccccgtctgtggcgcccagcctcttccagctgtctgtgcagcctgaaccaccgcctccagagcccgtgcccatgtactctgacgaggtagggactctttttttctaggtctggactctgggaagcccattgtgcgcaaacgtccttagtcatcaccccatgaggtggggctgtggcgcctggtctctcaggagagtccagagaggggtcctgcctagagtcactcagcctcaggtagggcccacctattcaggctcattctggagtccgtcttcatctcaggagcttcctgtcacagcaccggcctgagcccgtgtgtctgaactcaacacccgtctattcctgacgggatcattggcagcattgtgcgccccctgatgggtgtgacctggggtggcgtgtccgcctggtgggtgtggcctgggtgggtgtgtccccttgggtgtggcctggagtgggcatgtccccctgatgggaccccaatatgcatggactgagtgtgggtgtgtcccctgaagggcatgtcctggggttgggtgtccccactgatgggtgtgacctgggatgggcgtgtcccctggcgggtgtgccccctgatgggcatggcttggggtggctgtgccccctgataggcgtggcctcggggtggtcgtgtcccctctggtgtgtgtggtctctggctgtgcaccctgatgggcatggcctgggggtgggtgagccccttgaccagcctggcctgggggtggatgtgccccttgatggttgtggcctcagggtgggcatggtcccgacaggtgccttgatattgagtagagcctgtcgactccatggttgtgagactggattgtgccactctggctgcttcggggcaggcactgggcaccagcccatctggggatcagggagtgcttagggggagcatagagtggtcacagaaacagaggctgcttgacgtagactggagatggctaggccagggcgctgtgtggccatccgcagggcgccttcctctccagatggcasctttccattcgctaggggacacctttcctgcaacagcctagccgaccccgtgtcaggggttgtgcttctgtcacgagacgcctgcagactgtccggtgacawcatgttacccagcatttctgccctgggtgggacgttccattacascccatgctggtctctccacaggacctggcgcaggtggtggacgagctcatccaggaggccctgcagagggactgtgaggaagttggctctgcgggtgctgcctacgcagctgccgccctggggtgagtggcatctcgtgctcccctcctgctacgtgctgcggggagctgcacccagtcctccagaagtttcctctcataaagttgcctgcgtttttggagtcataatccaataagttattgccagatacagtgtcaggaagattttcccctacattcttctttttcaagatggttttgctatttggggtctcctgagataccatgcgaattttaggatgagtttttctgtttctgcagaaagtgctgttgggattttgatagggattgcgttgaatctgtagattgttctgggtggtactgtcatctttttttttttttttttttttttttttttttgagatggagtcttgctctgttgctcaggctggagtgcagtggctccatctcagcctcactgtaacctccacctcctgggttcaagcaattcttctgcctcagcttcccgagtagctgagattacaggtgggcaccagcctggctaatttttttattttttgtggagatgcttttcgccatgttgtccagggatggtctcgaactcctggcctcaagtgatccacctgcctcagcctcctaaagtactgggattacaggcatgagccactgcacctggccagtattgtcatcttaacaatattaaatcttctaatctgagaatgtgggatgtctttccatttatttaggtcattcttaatttctttcgacaatgctttgtagttttcaacgtataaagtttttgcctcctaggttaaattgtttttttgtttgtttgttttgttttgtttttgagacggagtctcgctctgtcgcccaggctggagtgcagtggcacaatcttggctcactgcaacccccacctcccggattcaagcgattcccctgcctcagcctcccgagtagctgggattacaggcacctgtcaccaagcctggctaattttttgtatttttagtagagacagggtttcaccattattagccaggatggtctcgatctcctgacctcgtgatccgcccgccttggcctcctaaactgctgggattacaggtgtgagccaccgcacctggccttgttgaggatttttatatccatattcatgagggatattggtctgtagttttccatttctttttttttttttttttttttttgagacggagtctccctgtcgcccaggctggagtgcagtggcgtgatctcggctcactgcaggctccgccccccggggttcacgccattctcctgcctcagcctcccgagtagctgggactacaggtgcccgctacctcgcccggctaattttttgtatttttagtagagacagggtttcactgtgttagccaggatggtctcratctcctgacctcctgatccaccygcctcggcctcccaaagtgctgggattacaggcgtgagccaccgcgcccggcctcctttttatttctttattccttttttttttcttttttgagacagggtcttactttgtcacctagacccgagtgcagaagcacaatcacagctaaccacagccttgatcttctaggctcaagccatcctctcacctcagcctcccaagtagctaggaccacaggcgcatgcyaccatacccggctaattttttaattttttgtagagatggggtctctctatgttgcccaggttagtcttgaactcctgggctcaagcagtgctcccacctcagcctcctgaaatgctgggatgacaggcatgagccactgtgcctgctcagtctgtagttttcctatagtgtctttggtctgtctttggtattagagcaatgctagcctcataaaatgagttagtaaatattccctcctcttcagttttttgaaaggatttgaaaaagattggtggttagtttttcgttagtgtttaatagaatttaccagtgaaaccttctggtctcatacctttctttgtttggargtctccttactagttataggtctactcacatttttctgtttcttcatgagtcagttttggtagatggtgtgtttctaacagtgggcttaatttttctgctggcagccaaacaagtacaggttgcatatcccttcttcaaaacgcttggaaccacaagggttttagatgacagatatttttggattttggaatatttgtattatatgtaccagttgagtatctcttacctaaaaatctgaaaatctgaattctaaaatgctccaatgagcatttcctttgaaaagcatgacatgttgtgctcaaaaagtttgagattttggagcattttggatttcagatttttggattagggacactcaacctgtgtgttttttttcccttgtcaatgacttggcttttttctgatatttttctttctttttttttttttttttgagacagagtctcgctgtgtcgcccaggctggagtacagtgaygcaatcttggctcactgcagtctcccrctcccaggtccgagcaattcttctgcctcagcctcctgagtagctggggctacaggcgtgtgctgccgcgcctggctaatttttgtatttttagtagagatggggtttcactgtgttggccagaatggtcttgatcttctgaccttgtgatccgcccacctcagcctcccaaagtgctgggattacaggcgtgagccaccgyacccggcctkgactctgattttgaatgctatcccytttgctccgtttagtgtttctaatgctgctatggaggatttgttaacagctgcaaccacgggcattttgaggcacattgcagctgaagaagtgtctaaggaaagagagcgaagggagcaggagaggcagcgggctgaagaggaaaggtaagtgtgtcttgtccatgcagccgaataaggagctcagtgtggacacaggcaagaactgaccctrgccacgatgctcctgctattgtccactgtgctaccattccacccctgctgacccactcatgccctcctatgcttcagcccaggggrtggatggagctcctcaggccacacctacccgtgagcagtggcccttcccagccaggaaaggcaggggaagggaggtggtgtcaggggagctggagtaggggtggcctaccgactcaggcagcacacctcaatccctgtctgcgtggccagggagtaaaacaaacagcacttatttttattcttaaacattacccttgtgtattttttctcttccctrtaggttgaaacaagagagagagctggtgttaagtgagctgagccagggcctggccgtggagctgatggaacgcgtgatgatggagtttgtgagggaaacctgctcccaggagttgaagtaagtgaaacgctggtgtcttgctgtgccaggagagtgagctttggctctgccctaggctgtgtcttgcaccactgaggatgggctattggaaatggatcttgcctgtctaagctactttgattttgtgaccaaatgtatttgatgcagtcctctgtgctcccttggctaatagaattttattataaaaaattctcttttatatgagggctgccaccacatgatcatagtcagccatccttattagccactggcatttatcatatatttgagacacttccaattgattgcacaagtcagatgttgctgatgagaagattttgtggttgtctgcatggtaatttacaaattctaygccaggcacctgtagtcccagcaactcaagagactgaggtgcaaagatcacttaagctcagaagttccaggtagtgtgctatgactgcacctgtggtggccactgtactccagcctgggcaacatagtgagaccctgtctctaaaataattaaaaattctgactattttattaagataaaggtttatttcttaactgttacgagggcccctatggacctataatttggcaccctgttccacttaattctttttaccctgtctttctaggtgtctgtagtttaagtattaaagcttcttttacaatgaagatagaattacattttaatactgaggatgcagactcttgcactttttttttttaaagacggagtcttgctctgtcgcccacactggagtgcagtggcgtgatctgggttcactgcaacctctgcctcctgggttcaagcgattctcctagctcagcctcccaagtagctggaattacaggcatgcaccgccatgcccagctaattttttttttttttttttttttgaaatggagttttactctgttacccaagctggagtgcagtggtgccatctcggctcactgcaagctccgcctcccgggttcacgccattctcagcctcctgagtagctgggactacaggagcctgccaatatgcctggctaatttttcatatttttagtagagacggggtttcaccgtgttagccaggatagtctcgatctcctgacctcgtgatccgcctgccctggcctcccaaagtgctgggattacaggcatgagccaccgtgcctggccgccagctaattttttgtatttttagtagagacggggttctaccatgatggccaagctggtttcgaactcctgacctgaagtgatttgcctgctttggcctcgcaaagagctaggattacaggtgtaagccactgtgcctggccgactcttgcacttttcttttttttttttttttgagacggagtctcgctctgtcgtccaggctggagtgcagtggcgcgatctctgctcactgcaagctctgcctcccggcttcacgtcattctcctgcttcagcctcccgagtagctgggactacaggcgcccgccaccacaccaggctaatttttttgtatttttagtagagacagggtttcaccatgttagccaggatggtctggatctcttgacctcatgatccacccgcttcggccttccaaagtgctgggattacaggygtgagccaccgcgcctgactgactcttgcacttttcaagcaagccctcagtgtctgtgggccccaagtgcagtgtcttccatgctgattgccctgtttctaggaatgcagtagagacagaccagagggtccgtgtggcccgttgctgtgaggatgtctgtgcccacttagtggacttgtttctcgtggaggaaatcttccagactgcaaaggagaccctccaggagcttcagtgcttctgcaagtatctacagcggtgagtcctgtgttcctacaggcaaaatccacacacacggggaagagtcttttaacaaattcaaaatatatgagctatyagtttctgtattcagtggtaaaaggatgagggaaaatgttatagcaatgaatacctaaaatagactaattggattatactgcatttcagaaatacttgattacacacacacacacacacacatacaatataaggggaaaagtcaggagttagattgggacgtggtggctactctgtatgtcaactgatatttatagggtgcctgccatttgcccactgcactaggtgctgggagacagctatgaacaagccagattatggctgcatgcaccaataagggtgaattctcaaaatataagtagtggagaaaaagcaattaatagggaatatacaaatagtgtatattcaaactaaataggttgtttcagatttatatatagtggtataaccctaaagaaaagaaggaaaataatgatcataatctcagcatagtggttacttttgggaatgggaggtggtgcctctcatggccacaacttctcaactgggtgtaagtgcacaggtgcttgatgatttattaatcttataactgggcatatatgtgttaygtatgttgtatgattcatttcataataaaatttaaaatcagtaatagtgtcctyggtagttggaacagtrtaaaagggagtatggggagaagtgagtcttccttctacaacagacccctgtccattgtgcgagcagcagctgcttgcgaaaccatccagagactttctgtcctttcttgtggctcttggcacagatgggctcatgatccctgctttgctctgagccttcctttgctccatctgatatgaggtggaggcttggctgtagcagcatgctgagctgtccccgttgccagtggtcttgaggtcagtgcgataatgtaccataaatgaccttcctggtcttctgttgatggactttcatgtggctctttttttttttttttttgagatggagtctcactctgtcgcccaggctggagtgcagtggcgcaatcacrgctcactgcaacctccacctcccaggttcaagtgattcttctgcctcagcctcctgagtagctgggactacaggcgtgcgccaccatgctcggctaattttgttttttttatttttagtagagatggggtttcaccatattggccaggctgctctcgaactcctgacctcgtgatccgcccgcctcggcctcccaaagtgctgggattacaggcgtgagccaccgagcctggacgtagctctttttagctctggtaaagactgttgcagtgactgttgttgtacagacagacatctcacccgtttgcacacaggcacgtgtgtggagataaattcctatcagtggtggctgtgggtcaagggatatatgkatcyttttttttttttttttttttttttgagacrgagccttgctgkkwcacmcaggctggagtgcagtggtgtgatctcggctcactgcaacctccacctcctgggttcaagggattctcctgcctcagcctcccaagtagctgggaccacagtcgcccaccaccatgcccggctaattttttgtattttagtagagattgggtttcactgtgttgcgcaggctggtcttgaactcttgagctcaggcagtccgcccgccttggcctcccaaagtgctgggattacaggcgtgagccactgcacccagctgggtatatgtatcttaaatctgtatccatattgccaagtcagcctccaaagctcattcagtattaactgttaacgttcggtagtttcattgctcaccacactcatwtgatgtccttccttccccatgcctgagttctgactgcaatgtgtttctcagtktgaagaccctgaaracactctgtgatgatacattttcatgtccccaggtggagggaagctgtcacagcccgcaagaaactgaggcgccaaatgcgggctttccctgcygcrccctgctgcgtggacgtgagcgaccggctgagggcgctggcgcccagcgcagagtgccccattgctgaagagaacctggccaggggcctcctggacctgggccatgcagggagattgggcatctcytgcaccaggtcagcatcagctgtcgcctgcctcgtcagggctcccctgcccccacttggttttaccaggagcggaattaatgtgtgtgtttggagggtgaagataggtgaagcctggaggcgaagataggtgaagcctggaggcgaggacaggcacagggttgcattttgaaggttgtctcccacagttgtggacatgtgacttgttccactggcaaagcagagctctgagttcaccttgaaagactcagcgtcctggtgcctgagtctgactctgcatcacgtgttcttttcctgctcgtcccagtttaagtacctgccacttccatccttgttggaggagccggaggtccacgctggcctgtgtcttccgatcccatccccgccccatccctctgttcctcccgccgtctccttcacacactgccccctttctgtggcagcatcttccagrctccacctccaccctccattatttccctcttgaggccccttggtgtggccctggtcctccctgccactcctcctggtyaccccgagcagaaccggctcctcagggccatgccaggacccccctcagcctgcattcctggccatgctgggcttggcctttatttagaacccatgtaggtgccacctcttgcctggcctcagggctccctggcctcccagtgggtggggactggggaggcagcctggagggcctagcaggcacaccgctggggcctcatgtcatgtcttgtcctcctcctggtcatcactggatgttccctctgaaaactgtcttgtgggtttcatttagccccatcaggttctgcgccggcagtggggtggcagtcccagcctgttggaggcatgctgtgaggccagggctgggcctggctcctctgacccatggctgccttcacatagtgacctggccttctcctggagtcatggcttcttgtgtcccccctccgtagctgcccttgtcagcctcagtctccttgtctgagccctccaccctgccccctcagcccagacctctgccctctgcccttctgcgcaccccctggtgatagccctgtcacccctgtctgtcactgacagcccccatcatgcatctccaactgaggcctcttccctgagttccagacttggtttccagttggcagttcaacctctaaacctgatttttccccaccctgccccttcctgctcataggatgccgtcctgtcctcctgcgcttagggcacaaacctgggcttgcatctctctcagacccagcaccgagggcatggcagttctctccacctcactggaatgttgctgcagcacctgtctgccagcttccaccctgggccccaatcgtgtcctcagcaccacaacagagggatcctccaacagctcagccaggtggcgttgcctctcggcggcgtccctagcgctccccgagtctctgcattgtggacccaacccctccctcgctgccctcactgctctccccaaacacaccaggtccagctatggcctggcatagccatgccctctgctgtttccagaagttgtcacgctggctccccctgtttccttcaggtctttgctcacatatcacctgaccaccctgagtgagactgcaacacgcaccctgcctggctccagccccacctggcagcatttgcccacagtgccgacacctcacacatgccaggccagccacttagagatgctgttctctccccattagagcctatgttctcaaagggcaggattttgtctgtttattgctgaatctcccatagccagcacacagtggatacttaacatgatatttgtggaatgaaggaatcctctaacccgtttcattggcagaaaatgtgtttttcagtctcctgagtattccccaggggacactagccagtacttctcactaagctcctgyggggacactgtcattctgctttcctttgcaggttaaggcggctcagaaacaagacagctcaccagatgaaggttcagcacttctaccagcagctgctgaggtctgtcatgctgcacccttctgcgcaccccctggtgatccccgttccccaatctgtcacactggcagcccccttcatgcatctccaactgaggtctcttcgatgagctccagacttggtttctagtttgcagttcaatctctgaacctgattttcctccaacctgccccttcctgctcataggatgtgtgtgctgctcctgcaagggtctcacacactggctaatccayggtggtctgttcctcccagtgatgtggcatgggcgtctctggacctgccatccctcgtggctgagcacctccctgggaggcaggagcatgtgttttggaagctggtgctggtgttgccggatgtagaggagcagtccccagagagttgtggcaggtcaggaagggttttcccctgtggggtttcyaagaggtggagtgggcagggcagggttgtgggccagggccgggtattcctcttatgtgtgatgggaactcggaagtgtaggtttatgttttaatgcttggatttacagtctgttttgctcatgattttaagttgaaactttagatttgattatttcaatttttattccataaacttggtgtattagtccgttctcacactgctttaaagaaatatctgagactgggtactttataaagaggtttaattggctcggctgtacaggaagcatggctggggaggcctcaggaaacccacaatcatggtggaaggctaaggggagggaggcatgtcttacatggccaaagcaggaggaagagagagagaagggggagatgccacatgcttaaccagatctcgtgagagctcactatcatgagaacagcaaagtgggaggtgccacacacttctaaacaaccagatctcgtgacagctcactgtaatgagaacagcaagggggaggtgctgcacacttaaccaggtctcgcgaggctcactttcatgagaacagcaagggggagtttccacacacttaaccagatctcctgagagctcactatcatgagaacagygagggtgagttgccacacacttaaccagatcttgttgagagctcactatcatgagaacagtgagggggagttgtcacacaaccacatctcgtgagagctcactatcatgacaacagcgaaggggagttgtcacacacttaaccagatctcgtgagagctcactatcatgagaacagtgagggggagttgtcacacacttaaccagatctcgtgagagctcactatcatgagaacagccagggggattccacccccatgatacaatcacttcccaccaggcccctcctccaacattggggattacagttcaacatgagatttgggtagggacacaaatccaaaccatattacttggcaacagtcttagaccaaaagcatttaagagttgattgttatttcaagctgtgttaaggtacaytgatagacctgcttcattttagactcttcagtaagatagtttatagtctgtttactatagttccatttttttccccttaaagaaacttttggcattttaaaaaagaaaaaattgacatgatcttattttctgtaaccacatagcatacagaagtcatatttttaaagcaactacagtctctttgtgtttttttgagacagggtcttgctttgttgtcacccaggctagagggcagtggtgtgataacagctcaccgcagccttgacctcctgggctcaactgatcttctcacctcagcctcctgagtagctggaactacaggcgtgtgccaccatgcctggttaatgttttttttttaaagatggggtttcactatgttgcccaagctggtcttgaactcctgggctcaagcaatctgcatgcttcagtctaccaaagttttgggattacaggcgtgagccaccacacccggcttacagtttatttttaaaatagctttattgaaatgttattcacataccataaacttcacccatttaaagtgtacatttcagtgatttttagatatattcacagggttttgcaaccatcactgttaataattccagaacaccttttcacttagaaagcctgtattcttttttttttttttagatggagtctcactctgtcgcccaggctggcgtgtggtacactttgttcactgcaacctccacctctcaggttcaagcaattttcctgcctcagcctcccaagtagctgggattacaggcgcacaccaccacgcccagcttagttttgtatatattttgtagagacagggttttgtgatgttgcccaggctggtctcaaactgggctcaagcgatccacctgccttggcctcccaaggtgctgggattacaggcgtgagccactacgcccagctggtgagtcatttcttaaaatagctgtcttctcatttgctaagttcgtatgtcacttaagaattcttaaggtctcaggtatgagaaatttgatctgtaaaaaacatgtatttcaaactctagggatgttttctattgctgaaaatcttaatgcttcagaattttaagtcacattagaatgagccagttccattctaatggaatggagtgccccctcctcctgcccaattaagaacaagtagaagccgggagcagtggctcatgcctgtaatcccagcaactggggaggctgtggagggaggattgcttgagcccaggagtttgaggccagcatgagcaacatagtgagaccctttgagtgasactctacaaaaaaaatggaaagattagctgggcatggtggcccgtgcctgtagtctcagctactgaggcaggtttgcttgctgcggtgagccaagtttgtgccattgcactctagcttgggcgacagagcgagaccctggctcaaaaaaaaaaaaaaaaaaaaaagaacgagtacagatcgttgctccattttaaaacaacagcctgttttgtgcagatcagcttcatagtaagatgtggtatttgtggacytaggtctgtgtgatatttytctttcttcttttcctgaaagtctttataattcaaatatagaattagattcttcaagtgttttttttgttttttgttttttttaaatctgtaraattctagcaaattggttaaaagtcaagttcatgggagatgaaggctcagtggatgacacatccagcgatgctggtgggattcagacgctttcgcttttcaactcacttagcagcaaaggggatcagatgatttctgttaacgtgtgtataaaggtgaactataattactttgtgtttacttctgtgttttcattactttcacttactcccagatatcactggaaccrtgcaaatactgcttattccctaatgtggttttgaaagactgggaggctcagaagcaagtattaygtctgtccgtacatgtcgtttaaaaaawttttttaagccagtcaaattgagtagtgggcaccaagcccagcctgcttctttactttttctgttttaatactatatattggatttcctaaatgtaatatgtacacaaaacttttaaaaaatgaggaaatgtaaaagaagtataaagatgatgataagagccatccatgctcttgccattctgaggtaacagtaacttcttggtgcaaattcttcccttttcctgggattacaaagtcacatttcatctactggaaattagtttactgctgctgttaccttcattttcatttaagaaagtaacacttccgtgtacttaaaaagaagtcaaataatgccacccacgtgatttaaaatgagacatagtagctcctccttcctctcttaactcctttcttcagggctgcatttttctcctgtttccagatcacacacttacacagccatttctcagtttatccatttaaatgttctctgctgacttcccattaatataaatgtattagttaccttattcctaaataactaattactcctaacatagcagcttaaaataatgtctgttatcatggtatctgtgggtcaggaatccaggtgtagcttagcttgggtcttctggctcaaggtttctcatgggtggaaatsaaaatgttggctaggattgtggcctcatctgaaagcttgactgaagggtatctacttcccagctcactctagtgagcttgtgtcaggattcacttccttgcaggctgtggccaaagacttcctcagttcctgccacatgggcctctccccagctgacagcatggcagctggctttcatcagagtgagcaagaggtgagcctagatggaagtctgagtgtgtttataacctaaacttagaagtgacatcctgttgcttttgttggcttctgtctgtcagaagtgagtggctaggcccagctcacggggcaggagatcacacgtgggcatgaacactaggtggaatcaggggggtcctcttggccactgcataccatactaggtacagcgtggcctcttgtgccatggtccttgctcggccttccacgtcttcccgggatagctacactagcactttgtattacttcagtgagtggggtcatattttgatggctctgtgactgctattcacctcagaaccagtagtgttctataaccacaattatttttttcctgcaagaaatagagttgccttattgtctcacttaatgtagttctctttatctctttaattttactggggggccgtatatatctcggtagagttttccaaatgttctgtcacttcacttgatccatccatgttccctctgtcctggaactctcatctgtgggctggtctccatccaggcaacatgtgccttagtgccatcattgtgagcatatgtgtccctgctcctccacttggaagctctgtgaccttgggcaagttccctagcgtctctgccacctgtgtatgggtactgttacttattatccctattttactcagagacggtaaaataaactgcccaagcctctgcaggtgctgtctggtggagatgctcatctggctcttgaggataaaatgagtgcaaacacagactgcacaggacagtgcctggcacwggccaggtgcttgctcagtgttgccattagcagcagctgcagtattttttcttggttcagccccttgttggatgttatatgtcatgcgaggggaattttctgagtcttttccattatgaaaatgattttattaacaaaataccttaagctgggggaaagaaaaagaaaatgcatttatttcattctgacatttgcttcatagtttagctacgtttgtaaaattataggtagaaaattattttcctggccgcgcatagtggcttatgcctgtaatcccagcactttgggaggccgaagtgagcggattgttttgagtgcaggagttcgagaccagcctgggcaacgcgktgaaaccctgtctctataaaaaatacaaaaattagctgggcatggtggtgtgtgcctgtagttctagtagcttgggaagctgaggtgggaagattgcttgaacctgggagttcgaggctgcagtgagccgtgatcgcaccactgcactccggtgttgacagaggaagaccccgtctcaaaagaaagaaaattatttkccttccagttttgctccactgtcacctagcatccattgttgctgtaccattcctgttcctttctgtgtggcctggttttctctgtggaagccttttctctctgttcatggcgtcctaaaaattcactttgttacactggcactggactagcttcactcactgtgcagggcttagcaggtcctttcaggctagagactcctatttcacttctgggacattttcatgtctttatgacactctgtcttttttctgttctctcttgaacttctattagatagatgttaggcctcatcaattgatcctctgagtttcttatcctattttctatcctattttcaatctcatctcttcctactgtgttctgaaagagttccttgactttattttccaattgtcctactgaattttttattccatatatattacttatttcctctttctttttatcatgactttttcatagcatcttattttttggatgcatcatcttatctttccaaggaaattagggtttttggggtctaagttttctttggttcacgtattatctggttcctcttttttttttttttyctctctgttactccagtttatctcttttatgtwggaggccctcctcagatgccttacccaaggctatctgtctatatctgagtgaggccctaaaaggctagccaagaagttctgtgtttggggtggggtggatggtagctaaatggcaagccaggctttttggagggactcccaaatgtctggatctggatggctgttccctagactgttcagtttttctggaaaggacttgtgccatctgctttctggggagctgctggtattctcagggtagggttgggagtggtttggcgctgagtcccttccactgtgcctgaccatggccctgcatctggatcctctcaggactcctgttcaggggcccagggggactggttttgcatagaggttgcctgcagtggtgggtgccgccaatagggtcaggctctgaacttcacctttggctcctggtgtctgcagcgcctgggtatacagggcttttgcaggctcagtcaacctgactccttacacacccacatctgcagcctttaggtatggcatcctctgcttccctaacccagggattggtcacacctatttgctgctttctagaaatgtatcagaatccctcatctgctgctggcttgccttccctctttctattattatgggcttatatttttgtttatttttgtagagatggggtcttgctatgttgcccaggctggtcttgaattcctggctcctggcctcaaacagttctcctgccttggcctccccaagtgctgggattacagtcatgagccactgtgcctagctttaacttttttatacctgtttaaggttaattaaagttatagtaatatggtcaaacacaattctagctggaggctaaattacctgttgacctggctgtttcttgcactaattctgttgcatttattctcatttttgtttctataaatttaaaatatgaacatgggtgggcgcggtggctcacacctgtaatcccagcactttgggaggccgaggcaggctgatcacttgaggtcaggagttcgagaccagcctggccaacatggtgaaaccctgtctccattaaaaatacaaaaattagctgggtgtggtggtgggcacctgtaatcccagctactagggagggtgaggcaggagaattgcttgaatccaggaggcagaaattgcagggagctgagatcgtgccactgcaatccagcctgggygacagagtgagactccatctcaaaaaataaataaataaaaataaaataaaatatgaacatgccttatatctgaagggcagatatagaaattatttttctagggtgattgtcctctgaatatatgaagaaacaatgttatttgacgttttctttaaaaaggaagtctgaagctaggcatggtggctcctcgaacctgtaatctcagctactcaggaggctgaaccaggaggactgctcgagcccagcaattcaagaccagcctgggcaacataataagacccccttctcaaaaaaaaaaaaaggttgaggggagtctttgctaacaattggatttagggaaagaggggccaggaattaaaataactacaggaagtaagataactacagggtatgcccagctgtgcccttggaggcctgtctggagtacagtcagtatttagtgcacggagagctttggctgcacttgctctggggcagatcagtcactgctgatgcgtcccatggtgcatctctcctgatgatcttgatgctgttgcaggtggcccatggcgccctcagtgatggtgccattgatgctgtggagacacagaaggamctcctgggagccagtgggctcatgctgctgcttccccccaaaatgaagagtgaggacatggcagaggaggacgtgtactggctgtcggccttgctgcagctcaagcagctcctgcaggctaagcccttccagcctgcgcttcctctggtggttcttgtgcctagcccaggaggggacgccgttgagaaggaagtagaagatggtttgtgaaggaagtctcgtttatgaagcagcattgtttaataaatgggtggaggccctgggtctgaggatggtccagtagtgttggggtcaggaatcactgagacagcaacccctgtggtgactgtccactgcaggactgggtggggtcagcacagtgagatatgttagcaggtgtgctgacagcagaatgcaagtgaccttcatctaygtctgtcttaaaggtctgatgctacaggacttggtttcagctaagctgatttcagattacactgttaccgagatccctgataccattaatgatctacaaggttcaactaaggtaaggtttcatcatttttaatggtctgtcaagatattttgttttttccccttttgctgtatcttgaattgagtgtatattagcgtttgcattgtctttttcttaagagacagggttttattgtcacccagtatagtggcatgatgatagctccctgcaacctcaaactacagggctcatgcaatcttcccacttcagtctcccaagtatatgggactactgtggtgtgccactgcgcctggcagcagttgtatgttttatacagataactttytaaaaacataagcagaaatcaaaataaaagataaaatttgcccacagtcctgctatctgcaaattaaattgttcatgtaaaattttttagtgtttttgtttctatgaatttaaaatatgaacatgtcttatatctgaaggtcagatacagaagttatttttctagggtaattgtcctctgaatatatgaagaaataatgttatttgatgtttcctttaaaaaggaagtctgaagctgggcgtggtggctcctcrcacctgtagtctctgctactcggaggctgaagcaggaggactgcttgagctcaggagtttgagaccagcctggccaacatagcaagacccccttctcaaaaacaaaaaaaatagggcagggggagtctttgctaacaatttagagaaagaggtgccaggaattaaaataactataggaagtaagataaccatagggtgtgaaggcaccttggcacatagtgaagctgttagtccttccaaaaaggagaagactccatttctgtgcatggtgaaggggatgttcagggctggtttcctgagggcctgggcctttccatggggcaaccatgcaggtcacactcctcctcaggccaggtgggatctgggggctctctttagtgcccctactggacatgtctccagagccctagaaggctaaactcaactgcataggacacttctgttccccttcctaccacagttgagagcccagtactctggtattacctgctgtgggcaaccttgggggatcaagccctttcagaaagctgtttttgaaaaacagtgtgaattgttcaaccaagtctcttctttcttctcaggttttgcaagcagtgcagtggctggtttcccactgcccccattcccttgacctctgctgccagactctcattcagtacgtcgaagacgggattggccatgagtttagtggccgctttttccatgacagaagagagaggcgtctgggcggtcttgcttctcaggagcctggcgccatcattgagctgtttaacagtgtgctgcagttcctggcttctgtggtgtcctctgaacagctgtgtgacctgtcctggcctgtcactgagtttgctgaggcagggggcagccggctgcttcctcacctgcactggaatgccccagagcacctggcctggctgaagcaggctgtgctcgggttccagcttccgcagatggaccttccacccctggggggtacgtgcttgacctggggaggtctggtgggtggctgcagccaagtctcaggcttccttctcactgtagtaaccgtctggcaggtgttgggcaccagtgtgagggctgcacgtccacctccgtgtgtctccatgctgtgctcgcctgcaccttcctttggtcctttgggttcatgagccagaacaagctgggttttgtggagtgggggctgttagcctttcctgaccagcaaggcagtccatgggagttcactcagcttcaggagaaaagtgacaagtggtactgggaggaacaccaaccctgatcctgtcctgcctgcccacagggtccctgttttcagaacagacaaggggcaaagagcatggggaccatgtagccctgtccccaagccgcagccatggcactcagtgctgatttaacattctttctttgtcaaagaggccttsttctatggctctggctgtgcccctgttcctggctgaggtctttgggctgttttgacacagatccgacaggccatctggctggctcaagcccagtatggcatggggctgctccttcctatgcactcagaagggaatgagctgcttatctggcagaagttgtggcattagcacagacactcccctttgggcctcaggcgcccttctaaattgtggtgtgtggtctgtagtaggtctaactcatgctcattattgaaggaacccaaagggaagcaaaccactcagcacaagccctcggtgctctggttaggttggggttccccaaaataagctaagactgcttataccagactcatctgggtgcttgttaaaatacagatttcctaggcacaaccacaggcctgtacagtcagaacttctgggtagaacttggctagcaacactgttaagggggactgtctgcatccctcacctagaccctgggagcaagctgctcttccccctcaacaactgtggttctgctgtgtttagaaagcagacttctcaacttcacagttgccttctcctgagaaaatgttttcatgtacattttcacctgtattttggccaaacctgtaactaatgaggcactttctccccagccccctggctccccgtgtgctccatggttgtccagtacgcctcccagatccccagctcacgccagacacagcctgtcctccagtcccaggtggagaacctgctccacagaacctactgtaggtggaagagcaagagtccctccccagtccatggggcaggcccctcggtcatggagatcccatgggatgatcttatcgccttgtgtatcaaccacaagctgagagactggacgcccccccrgcttcctgttacatcaggtaattagagcttgatgcaatgggatcagctcctcacgagactttcctggtccagtttctgcaaaggaagatgtttagttgatgttgctgcttttcttttgggtctctatccttcctttccttaggacttccctcttcaagtgagtgacttaaaaacattgagacaggctaggaagtttctggtagagcctgaactcacctccctgaaacaggccccctaggatggctcttagagaggattttgtggcttttgagtagtcattactggccctgccagtctcgatgtaagcttgtctggactttgagtgatgcatggaccctgggagcctatttaacccaagtgtggaagtcacataattgtgtgactttaatcaaaggtcttgcacttaaatcagtgaatttaagcacatgccacctgtygctgtttaaatattatttgtacctgtttttgtttttttgtgtgtgttttttttttttttgagacagggttggccaggctggcctctttatctgtttttgtattgttttctcagaggcgctgagtgaagatggtcagatatgtgtgtatttttttaaaaaygatttgaaaaaatatgatgttcctttgtcgtgggaacaagccaggttgcagacgcagaaggagctacagctgagagagggacggtgaggttcatgttcagtatgtttctgttgcttgctaaactgtatttttcttgcaaagtaaatagaaattaacatcctacatgccaaatccagtccactgtgggcagactgtgacaaatcctcaaggaacagatcattcccatgcagtagaaactattctagaacaaagttaaagcatctcacttcatttatcaggcatacctgaccctgaaatcatacctaaccaggagagtacagctgacatttcatctcacttccaaatttggttcsaaagcacagtacctaaaaaagttcacaagtatgctttctcccaggataaacaataacagtgaaaatctattaatgtaatttgttgccataatagaaaaataagtggtaattttagcaggcgttgaaatacgtttcttaaaatttatacctgttcctgataaaatttctttattttgggtactttctttagcttgggttaaaaaaaaaaaaagtcctaacttgataaggctacctaacataaaactaccaaaatagaaaaaaaacatgcttcttggtagaatgttaggaacagtggaatcagaaccagcctgttgtcccgactattattcactattgtcctggaaatcctgaccagtacagggatgtgggatagacaggcacaaatactgaaaggaaggagaaactgtcatttccagacagtacagttgtcagtccaagaaaagtcaagtccatagaaccattctcagttcaataaggtgatcagatagatagatccacaacatgttaaaaaaaaaaaaattctcattcacaacaataaacctgaacagaaagggcacaggatggtggaactttgctgttccttcttgttccccatagagatccttgaagtaccttctccaactccatgatactctaaaaactgttcatcttcataataggagtggagcctaatccttggtctcctcacctcctggtttcccggaatgtctttctcattaacatatgagttctcagggcctgtatgtgcaaaggaaacctgaaccattgaggttcagactaggttgttgacaggatacaatgctgtgaagatgtcagtactggtaagttctraaattcatcaggataaacaaatatgcaycaattgctgagaaagttttaaataagactaacatggtttgcttggcctgataccaagacatacagtaaagctccagtacttaaaaccatgtggggatgccagagtagataaatggatcagaataaagagtcagaatatgtgacaaaagtgttaggccaaattattgaaattagtggggaaaagacaaacattggcatgtgtttagaaaaaaatgtcagatgccttctctctcaccatttgtaaacattacttccaaatgtatccaagagctatctataaaaaaccttgccaatactagggaagaacagaatctggaaccctagggtgggaagcaagacatgaagcagagaarctccaaaaacctagctgcctcttgagagcagaagcttccaagaggaacaggcagtctcaatgcctctgtgcataagggtccctacagtgcaggggctgccttccctctttgctccactccctgacttgatggaagcttggaagcaggcatggggccagcatgagctgttccaggagggcacatgtgtctgaggcacatgttcttacatgttaatgcacatgtgcaaatgtatctacatgctttacatgatgctgtagaaatattttctcttgaccataaacatttcaaatcatgtacttacagtttggcaataaagccttttcatccttctgcaaacaattttcccataccattgcttcacatgcacygtaactggaagaggagcacagagtgtgctcaagaggggaggattcccagcacagaggatctgatgcgaggagcttctgctgaggagctcttggcgcagtgtttgtcgagcagtctgctgctgkagaaagaagagaacaagaggtgaagcccacttccttctaattcatgtgtgtttagtctgctttatgctgtgaggggagactggttattgcttgattaatataagacagccaggatggagaagggcaggtggattattagcaacagttttagtgatgtaactatttaaaagctctttgaagacagaagcagtgccctagatagtatgtttctaactgtttatattgaagtgaatttcatttattatttattattgaaagtcagtgttaagtttttctgggaaattcatgtggttaagtctgctcagaagatggtgagtgctgaacactatggctggccacaggcaccctgcccttgggagcctgaggcattggtggatcatcccatgctgtgaatggacaggagctggggctgcccctcctctacattgcccacttccctccctcccatgcatacctttcctttgctttcatttgatggccatgtttaccattttactgagtagaatcaggaataagggaccttccacaggttgtcctctgccttccctgccctcccagccacatccagcatcctccctatatccccttcctgacgcctcttgttgctggaaacgaaccatgcagctcgtagtcagtcagcccttccctgggctgggatctcatctcccacctacccaaggacattcattcaatgagtawctctctcgtgctaccacccctccccatattaggtggtgcccatcagcagcacacagacatgaaacatgcctccctgtcttggtcccacttccctctttagccaccacttcatgtttctgccctcttaatggtaaaactcctcaaaaacgcttgtgatactcacttcttcagccttctttcccatggggatgaaggcccagggttgaacatgaccgtgaatcccagtccttggtagcatcccatacttgatcctcccctccttgctcctaggatgtccgtggtccccctcctgccctgctggttcctcctcatcccccagctgccccctggattcattctctcaacctctcctctgcatcgtctgtacctactcctcagaaatttcatccagtttcatggatttttaagtaacatcactattctgacagctccaaatttgtatctcaaacctctgaactccacacttgaacatgctactgcttccttgaaatcttcattagacacctattggatgtctggtagccactgcaaagttaacatatcccaaatccagttcccggctttcttccaaccaaccccttcctttggtggtcatctctgttgatggcggctccatccttccagctgcctagatcaggtgccttggaatcatcccctcacatcagcccattcacatatcctattggctctattgaaaatacattcagaattggaccacttgttatgacttccatggccaccacgtggctcaagccactatcatcttccttctggattattacagtaggctgcagtttagtcttggtagacctggtgggtgcctttcaagtgagttaagatggaggtcgtgtcacttgcttgcttacagcctctcagtggtttccctctttcacctgcaatcaaaggcaaactttgcaggggtggccagggccctgagtgatctgccccccatttcctctctgacctccgctccttccttgagcatggtaggcagttcacagttgggcctctgagtttgctgttccttttgcctaggactgtccagcccctccattctccccagcatccccatggctgatcttgtactcacttcagatctctactcaaatgtctgcttctgttaggccctgcttgcccatctccgaccttcttgtttccatggctctgctttgtctttctcatcttcaaaccatgtttctcttgttatgtgttccttgtctgtctctcctcactaaagtataaattgcttagggcagggcctctgttttgtttcagtgcaatattccttgtacctagaatgatgcctagcatctggaggaggcttaatgaatatgttttggaagggtgaatgaatgtgtccgattactaaaatcagtctctataatttaagtggtttgggatgagatttttttttcctttttattagatagagtctcgctctgttgcccaggctagagtgcagtggcacaatctcgactcactgcaacctccacctcccaggttcaagcagttctcctgccccagcctcccaagtagctgggactacaggtacccatcaccatgcctggctgatttttgtatttttagtagagacgcagtttcaccatgttggccaggctggtcttgaactcctgacctcaggtgatccacctgccttggcctcccaaagtgctgggattacaggcatgagccactgcacctggccaagattgtttttcttgaaaagaccggtatatggaagtagacagctctagagtatgttaggtggcagtgggatattattttgagttaattttaagctataagcagcaatccactcatttggaaaatgtcagaagaattaattatagatgcataaaaccaaagtaaattaaataagataagccaaacaagacaattacaagtaatgttaagtaacacatcgaagcagttgtttttggattaataccacctttttcattaaatataaattggaattggatttataaattaaagggaagtggtttctctaatttttttttttttttttttgagatggagttttgctcttgttgccctggctggagtgcaatggcgtgatctggctcactgcaacctccgcctcccgggttcaggcagttctcctgcctcagcctcccaagtagctgggattacaggcacgtgtcaccatgcctggctaatttttgtatttttagtagagacggggtttcaccatgttgatcaggctgatcttgaactcctgacctcaggtgatctgcccgcctcggcctcccaaagtgttgggattacaggcatgagccaccgagcccagcctagtttttttttttaaattaagctttatcataggaagttgttaaatttttaataagtacatttctgcttctcagttgatgtcataacttagttatattcttagtaaaaagcaaaggcttaaggctgggtgtggtgactcatgcctataatcccagcactttgggaggctgaggtgtgcacatcacttgagttcaggagttgtagactagcctgacaatacagcaaaatcccgtttctacaaaaaaatacaaaaattagctgggtggcatgcgcctctagtcccaggtatttgggaggctgaggtgagatcatttgagcttgggaggtcaaggttgcagtgagccaagattgtaacactgcactccggcctggccaacagagcgagamcttgtcaaaaaaaaataataataaaattggccaagcacagtggctcactcctgtaatcccagcactttgggaggccgaggtgggtggatcacctgaggtcaggagttcaagaccagcttgggcaatatggtgaaaccccatctctactaaaagtacaaaaaattagctgggcacagtggcacttgcctataatcccagctactcaggaggctgacgcaggagaatcacttgaacctgggaggcagaggttgcactgacccgagattatgccactgcactccagcctgggcaacagagtgagactctgtctcaaaaaaaaaaaaaaaaaaaattatataaaattttaaaaaagcaaaggcttaaaaagtttttaagtatatatagaagattaatgaacaatagttaacttcctaatgctcaaatatttttgaatttattacatattgtttcaggtttgaagatcagcttcagcaatggttgtctgaagactcaggagcatttacggatttaacttcccttcccctctatcttcctcagactctagtgtctctttctcacactattgaacctgtgatgaaaacatctgtaactactagcccacaggtgagaagaamgtatacatttggcatttacrtaagaattaaagattgagagaatggctggggaaaaaagtaatatcacratttatcctatgatgttttgatgaccgacaaattattagctcaaattagaccttttcttaaactttatccatatcattgttaaagagacccaactgattttgagtttctgcctacgaaataaatgaagaatagaattgaaatattcttaagaactgaataagacctgtaactgtgtgctgatgtgtaattaagggcattaagrtgatgacagcagcttctgttggagcacatattgtctgagctttggcattacccagacctctcttctgggattaatttttcctgaggaaaactaatgaatgaggaaggtaagctcccagaagtcaagagcctcacccaagagtgttcaagtagtgagtggtcaggttgcttttcaaagccagatccaactggctccaaagcctaaggtctttttaccttaccattcttccttcagtggttaaagatgcaaaaacagagtttcaatcacagatatgtgccactgaacaggtaaaaactgtgctcctggactggctttaggaagtccttcaatagaggagaaaagcaaattaaaatgatgtactgtttccattcatcagtttggcaaatactttaaaaatattcataccctttgaattaccaattctaacctaaagaattctgacctaccagatattccccaaaaattaatgtataaaaatgtttactgtagcattattgtatgaaagtcgaaacagaataaatatccgaagatgggagtctgattaaacaattataacacattcatgtgatagaataattcacagcccttgacgatgatattttctaaaaatgactggctgggcgtggtggctcatgcctgtaatcccagcactttgggaggctgatgagggaggatcgcttaagtccaggagcttgagtccagcctgggcaacataaagagatctcatctctacagtacataattagccaggcatggtgctacatgcctgttgtcccagctactcaggaggctgagctggtaggatcacttgagcccaggagtttgaggctgcagtaagctccgatcataccactgcgttccagcctgggtgaaaaatgactgacactggaaattgttcatgatagaatacaaaggcaaasagtctatatacagataccagctgaatgtacgagctaaatgaggctggaaggatatacaaaggataatttttttccctctgtaaaaataaatgactactcagatgaggtttctaacatgatccagatctagtaccttcccagasataggtcgtggtttattgacatcccaaaactgttcagtttcttttttattcaaatagagtgacatgatgagggagcaactkcagctgtyagaggcgacaggaacgtgtctaggcgaacgactaaagcacctggaaaggctgatccggagttcaagggaagaggaagttgcctctgagctccatctctctgcgctgctagacatggtggacatttgagcagcctgacctgtggggagggggtctctcccgaagagtttctgtttttactcaaaataatgttattctcagatgcttgatgcactgttggaaatgtgattaatttaatcatgcagataaaccatttaaatgtcagtctcccagtttttcataakgaaaagttgtttcccctgtgtgacctcttcaatattctcctatattcatgacctcctcagattgtcacccaccagcatatgctctgaggcagtttagagcttacatttccatgtataaaaggcgattcattctctcagcaaacttgcagtccttgatgtgccagacatcagtgatgcagagataaagtaagacacagggcctctgcctgctaagcccacccagcttacatccaggagagtcaggtacttatgtacataattctcagagaatgtgcatgaggcgtgggcctgaattggtagcaaggaaaaaacagaggatggaacagggtctggttgggtagaggagaarcagaattcccggagaggagtgcaggggtgtagctggagacagtgtacttgagaggacatgatgaaagcgtggaggtaccagcttggttgtgtggccaggtgaggggaacaggccagcagggtgaggtcagagattcttgtcaccttcttctgagagctgtgagaacccgttgttgaagattaggcagagaagtgatctggtcacattttcttttaagaatggcatgtagggcaggaatcttgagaggtgggtgctgcagccatccaggtgaaattcaaagggaataagcstgagtttgttagcaattggtgtgaagagaggggataaaatttgagccatatacagaaagaggtattaatagacttggtgatgttgcgtatgaccaccaatcttaaactggcactcagcatctcctgactgtaatcctacatccccagactctatttcatgtcttctcattctcttcaaacctccaacattcttagatcatgtcctccttatttcactgagaaaacaacagcactaagaagagaacctcttcctccaccaaatcaatccctgcttctccaaacacacactactcaactcagggatctttagtgattagcttcatgtaaagacttaaataatgctatttcttaatcttgacttgacattgttgacttcctacaatggaagaggagttagcttctcttacactgtctttcccacaacatattatcacccccaccctcgacacccacatttcctctcctattagtctccctaagcagtttgatattggctgaaacctgcattcacagtttagtataactgtatgtttaccatttcctgttgagccctttattggtttatgattacatttcctttaggtacaacttttgatttttcctggagttaattacattgtttttctcatttgcttggttttctatgctcttgtcactactttacccaaaagtcgctgccctaaatgtaaagctcttcccaacaaagtcatgtgcatcaggtaatatgctccactttctcttcgagatgttcctgagaaccccctgtcttcttgccataacttggacatttcctggattctgaatcatattttcctcttgcttggttttctcttcttgatggagcctgtcctttagtagcctcctgagcttgaatatctaaaatgtctttatttctactgtaatattatcaaatatatatctggtctttgtctctgccttctgatatacaactcctaaaatccttgagatctctaaagtgatgtctttttgtatgctagtaagatgactgatggcggacagctcctatgtagcttcaggatagggactggacatctgaaagaccagggcatgattagaggggttgaaactttcagcccaccccccaaactcccagaggttgggggagagggactgaaagtgacgttgatcgccagtggccaatgatttaatcaatcatgcctatgtaatgagggctcctaaaaacccaaaaggacagggttcagagagcttgtggatagccaaatgtgtgggggcttccaggaaggtggacaagaacacgtccacatgctgagagaatggcacttcgcaactccttgcagacagaagctcctgctcttgggactcttctaggcttcatcctgtgtatcttttcatctggctatttgtagcctttaaaatagccttgtaataaacatgtgtttccctgagttctgtgaactgctcttgtaaattaaagccaaggaaggggtcttgggaacccagaaggacaggtaaaacaacctggggcttgtgattgacactggacatggggctcagtcttgcggcacagagtcctcaacttgtgtgatctgctgctatctccaggtagacggtgcaggattgaagcggatacccagctggtgtctgctgtacagctgaatgcttgcttgtcggtggggagaaattctctacatctggtgccaaaaggatgttgtgagagtaaagaaatggtttttttttgttttttggacttatctatccttacgtttgattcatcatttgaatgagaatagaattttagattggaaatcgttcctttgtgtttttgctttttttgttgctggaaatttttgagatcatctctattcctggtgttctcaaatttctcaatgacattacttcatatgttgcctccccattccctccccaacccctgcccaatttattgtgctgggcactttgtagtccttttttctagtttttttgttgctattgaacaaattaccccaaatatagtagcttaaatttgaggaggattcagctgggcagctttctgttgggatctctcatgcagctgcagtcaggtattggctgaggttatagtcatctgaaggcttgactgggtcagtggtccaagatggatcacttgcatggctggaggtaatgttgcactgttttccccaaatgtctggctcatgctgatgatggtgcttgttggaaactgtcaatgggtacagtctgccagctaataggtttgtttttctactaggtcatagttgccagtgtttgcaggactcttgtgggccagctgctccagagggatcctcccactatctcatgctatctggctaagtgggagaagtgagcctggacccacatgtgtagactttaactcaatctgtctgctttcagtggtcctcagctatgcctcatgcctgaggtaacacctactctgattcaactactggagacttcctccacccaagtaggagaggggatctatggtcatactgttcctcacaaaaattttccaccagttattccaatttctgcaccttcctggtatttgctggcaggaatggtctcttgttggcttcacccacaaacgtaagtctcaactttctctagctaactcagttatcacttctccatccattcccagtctctataattttgttgacttctcttgcttactagtgtctcctctcccattctttgtggggtttttttggtcttttattactttatgtgagtagggtttgggcaggaaatggaggttaatgtttatgctcagtctgccatgtttaactgaaaatttctttcaaaattctgccattaggcttttccccccatgtctctttagatagctcttgtcagtcaccaatacattgttttgttgcatccaataataaattctgtcttcattttgcaatcccttcaaagcctcagcaaagatcaccatgtcttcacttatattatgacttcatattcctctggttttcctcctctctctggccattcctctatactggaaaaggtcggtgccccagggctcattctagaacttctcttttttatgtgcatttcctaattcatcttgtccaatctcatgatttcaaatactacctgaaagcaaatgactcccaaattcctatctctagcattatgttctctcctgaatgccagcctactcaatatttcacttgaatgtctaataagcatctctagtataacttgtccccactttaatctgaattttccaatcaaactttccctattttaggccaggtgtggtggctcatgcctataatcccaacactttgggaggctgaagtgggaggattccttgtggccaggagtttgagaccatcctgggcaacatagcgagaccccgtgtctctaccaaactttaaaaaaatcagccaggtgtggtggcacacgcctgtagtcccagctattcaggaggctgagcccggaagatcacttagccctggaatttgaggctgcagtgagctaatgattgtgccactgcattcccacctgggtgacagactgagatcctgtcactaaataaataaaagacacctctattttagtaaatgaccaccaccatatacccagttgttgaggccaaaatcctcagagccttctgtatctggcttaatgaataagctggatgcagtagtatgtaagcagataggaacagtgttttttctcatgactgcccctagaagcttaactgtgtcaattctcagacgtagtttacagctttttcttttctttcagacattaaaaagagcggattattttactcataaaaagtccagtccattaagatatcaaaactcaaactcttatccagttgaaacctcttccctcacctagctttgccaggttcagtgtgagattccatccaggctgaagccccttatccctattcttcatgtttctacatggaggaacttacctggagaaaaacttccagcctctttctgcttccagagaagtagagtgactcatttgattgaatttcagagaacagatagggtggagtgtgctcaggctcctctgggtactctttctggggtctgtgggttgactggaggggtgtcttctggtgggcactcaattgcatagtgcttggtgaggcagtttcatggcctagaggctgggggatatgtttgtctgacttacgggtgatttagtagcttgccctcttgcttgcagatttaagccttgtccttcaagctaggtttttaatttgtggcaaagctgatattttgatacccacccatcttattgctgtgtctttttcatccgtttctgaactgggataggaagaggtgattatccttgattgtctaaaaccccgctattccactgtggggaaggtgcctgtgggtattcttttgtccactctctcttccaactttctcctccggcttgctgtggctcaccgccccttcgaagttaggctgggggtaggaattgaggagtgggtgccgaaatgctcactaggctggggcagttgtaactggatgtcagggcttctgtgggccaggtgaagacatgctggggtcttctgtgggtccttgacctgacttacggaccactggctgcagcctccagacgtcagccatgtttccaacagtcagacgccccctgccctgttgcgcccggctgtcccttccaagttcggtcactcgctctgcctccatcttcctcttccctctgctgctaaggcttttcacctttaatttctcctggggccacccccaactccagcgaccccgtgagcagctgaggctctaccgcgctcggtcctggccagcgacgcagcccttccctggcggggctccagggcttctggcccctgtggtccgccaggtgtgggggcccacggcctcaccgcgcctaccccactccccccggcgaagctacgcggcgctcagcttcccagggacgccggcggcgccctcggctcctccgctccgccccgccctccccctggtctcgcactggagccgacggcccgcgcccacctcacctcagggcggcctcccgcccccacccccggccccggcgtccgggcaaatcctgcagcgcgagagcaattccctgccacccgaccttcgcactcgctgtcgctcgctcgagcctcgctccccacgtccttccttccgacccgcggctggaccctcctcacaaatttctcagagaggctcacctcaaagcgcggcgcacgaggccgggctcccgggacgcaagcctctagagggcgcgcgagaggccccgcccccgcccttcggccccacccaccagccccgcccccacccgcacccaccaggccccgcccccacctccccacccaccagccccgcccccacctccccacccaccagccccgcccctcatgccccgccaataaggccccacccgcctcccccgtcccgtcgccttcacccaccatccccgctccctcaggccccgccccacgccgcatggggcaccaagcgctccaccactgtggtcgcctggcacaccccggggtcacgctcgcggcgctctgattggttgcgtgggcgtcggcccacctaagcctgagcgcctgccgaggcctgcgcctgcgtagtgcgcgcgggaggggcgggaggggcgggaggggcgggaggggcggggctgggcggcaggtcccgggtgcggacatctggcagctggcagtgggcggcgtagagcactgcagcagcaatgacggagggcacgtgagtcccctcgccccgggctcctgacgaatgcggggtggtcctaggtgctgaggagagcgcgactggggcagtgggccggcggccggcgttggggcggggcctgggtcgctgatggccggtggtcctcaggtgtctgcggcgccgagggggcccctacaagaccgagcccgccaccgacctcggccgctggcgactcaactgcgagaggggccggcagacgtggacctacctgcaggacgagcgcgccggccgcgagcagaccggcctggaagcctacgccctggggctggacaccgtaagttgcttccgcggagcgtcagcgagctcgggaccctgaggggtgagccgtgaggagcacgttttctctcagaaaggcgggtgggaggacccggccagcg

SEQ ID NO: 96683 - DNA, 12636 bp, Homo sapiens
tttttttttttttctatttttagtagaaatgtggtttcaccatgttggccaggctgatctcgactcctgactcaggagatccacctgcctcagcctcccaaaatgctgcgactacaggcatgagccaccgcgcccagcctacatccactcttgaatgccccattcaaaagatgcccactgtttactgtgtgaactttggctagtttctttcttttttttttgagacggagtcttgttctgtcacccaggctggagtgcagtggagcgatctcggctcactgcaagctccgcctcctgggttcacaccattcttctgcctcagcctcctgagtagctgggactacaggtgcccgccaccacacccggctaagttttttgtatttttagtagagacggggtttcactgtgttcgccaggatggtctcgatctcctgaccttgtgatctgcctgcctcggcctcctaaagtgctgggattacaggtgtgagccaccatgcctggccactttggctagtttcttaacctctctatgtcctgggttcctcatacgtgaaacagggcaaaatcatacaactgacctcataggtctgatgggagaagtaaataaagtaatagccctaaaatatctgcaactgatgttaattctctgggctcatgcaagtaaatgcactgatactgtgtccccaaaccagtgctctaggcaaagtatcaggaagaccctcaccccaggtgcacacctggctgatggtcttgcaaaccactaataactttttttaaagacagagtatcactttgttgcccaggttggagtgcagtggtgtgatcctgtctcactgcaacctctgcctcccaggttcaagtgatcctcgtgcctcagcctcccaagtagccgggactacaagcatgtgccatgtccagctaatttttgtatttttagtagagacagggtttcaccatgttggccaggctggtctcgaactcctgacctcaggtgatctgccaaccttggcctctcaaagtgctagaattaaaggtgtgagccgccacacccagccgacactaataccctttgactcagacatgttaactatgatctgagttggaacgatatttggaggtttccaagtgaagagctacttgcaatatcaaatacatgaaatataaagtagatgccatgagacagtgctcactcactgtgttggctggatgtaaggctgagggtggggagggagtctaaaatgaagatacacctctccaggctttggttgttaacagagtccatgcaaggggtggctaggaacataatgttaatgataaaaatatacgtaccatttactgagcactttgtatgtgccagggctatacaagatattttcatgcaacacttaatacaagatactttcatagaacaaggatataagatcagtactgttattaatcccattttagagaagagaaaacagaggctcaaagaggctaggtgatttagccatggtcacacagaattaggtaccagagcccattataccctctgctgtagggatcatcataagcaagaaagccctttgccaccaggggatctccatgctccccactcacctgttgaattctgggagcttctccaggtccagcagggctgagtgacaggtgacctgtgtcaggttgaactgtgtgatcagctccggcagggtcctgcccatttggttctctgcaaagaagagaggcccagccactcagcttcctctctcccttcctccttccactttatctcttttttttaagagacaggatcttgctctgctgcccaggttggagtgcaatggtacaatcctagctcactgtaacctcaaactcccaggctcaagcaatcctccagcctgtcttccaagtagctgggactacaggcacatactaccacacctggctaatttttaaatttttctgtagagccaggcatggtggcttacacctgtaataccagcattttgggaggcagaggtcggcagatcatgaggtcaggagttcgagactggcctggcaaacatggtgaaacccatctctactaaaaatacaaaaattagccaggtgtggtggcgcatgcctgtaatcccagctactcaggaagctgaggcaggaaaatcacttgaacctgagaggcggagattgtagtgagctaagattgtgccgttgcactccagcctgggcaacagagcgagactctatcaaataaatacatcatacacacatacatacatacatttttctgtagacatggagtttcactatattgcccaggttggtctcaaactcccaggcttaaatgatcctcctgcactggcctcccaaagtgctgggattacagacatgagccactgtgcccgccctccttctactttcaaacataagggaggctgagtgagcaagccctgggccccccattccactttgcccaaagggatttaacttctagctatttatatatcaagagcctgaatgagctttcattttcagaaagggttccatcattaaagaaaaaaaggtctgaaaacaatcaggctaaacccatctccattactctcaagacacgagctgcagaacagtacgcccattgcctggctgtaccagagactctgagtcaactgggtttggttggggtctgagcatattttagaagcttcctagctgattccaaagcacgatcaagagttaagaaccaggccaggcacggtggctcacgcctgtaatcccagtactttgggaggccaaggcgggtggatcacctgaggtcaggagttcgagaacagcctggacaacatggtgaaaccccatctctactaaaaatacaaaaattagccaagcgtggtggcgggtgcctgtaatcccaggtactcgggaggctgaggcaggacaatcgcttgaacccaggagacggaggttgcggtgagccgagatcgcgccattgcactccagaatgggggacaagaagttctgtctcaaaaaaaaaaaaaaaagttaagaaccgtagtgctgggagctgcttcttgtgagcagcagctcagtcccatacggtcagcaggcatcgtgatcaggcataggcctaaagcgctatatccctcactaggtgtgtgactttggcaagttactcagcttctctgagcttcacaatcctcttacaaacagtggagatatgtatctaccccttaatagtatgttgtgttaaatgaaatgagaccagcaggcaggctattctggacacattttcagaaatccttcaggtcatcctatttgatgcttgcttcttcaaggtttgggtctaagtcttggaccatgggtaagtgctcagcttgaaataaactagattcatctggcagtaaaatgaagaaggaaaaaaagaaactaaatccatattaattctagtcatactgttagcatacatgcttgtaataattgtcacaatcatagggtctgtcattttttgtgcttacagtgtgacaggtgctgggctgggtaccttacactcctgagctcagtgaatcctaacccaatgaggtagacacttatccccattttccagatatgcaactgaggctcagagactataagtcccttgagggcagggatcatgtctatctcacccactactgtagccccagcacttaatgtggtgtctggcaaaataaacatttattgaataaaagaataaacttgtccaaggtcacctggctggtaggtggcaaagctgggaccaaagagcaggactgtctgagccaaagccctgctcctcctggccatgctctctgctgccaggactattcaggtgggcacgtacctgcaaaacctgagccacagttggtgatgatgtccaacaaggaatcgggcaggaagccatcagcagcaaagtgctccaggaaaacgtccccttgcctcttggagagcttgctgccatccctgttgaggagcaggggcaggtgggcgaagtggggtggctgccagcccagggcctggtagaggagcaggtgcttggcagtggagacgagccactcagagcctcgcagcacgtggctgatgcccatgtggtggtcgtccaccacgcaggccaggtggtatgtggggaagccgtcgctcttcatgatgactgggtctccctccacgctggccacttcatgcctattccagccatagaccaggtcctggaaggctggcaccacctgctccaggcggaagcggatcgcaggcttggggtccttggccagcttctgggccacctgctcctggctcatgttcctgcaccgattgtcatacctgatggggagcagagcagcatgagtactgttgatggaaaggttgatggacaggagtcctacctctgtcatagctgtgtgaccttaagcaagtcagttactgctgcaagctgcttcctcagtctataacagggatgatggtacagttgtgtggaaaactgagataacatggtgtagcagacactaatgtctgcctatctaccagccattccacgcttcttccttgctaacaagaaaatagcaaaatgcttagtccgaggggttgaatcctgattggtatagccaatcttgcaatcctattgctccatgccagtgaccagtccaggcaggaatgtaaccccatcctagtcactgggatgcaaagaaaagcatgcctggggagtaagaaaggtttaaggttccgggaaaggtttttctctccaaaggacaagaagagaaagccacaggaggaaaatcccttcttaaaatttcccactgccccacttctgtcctctttggatgttgtcctgtaaggggagcatgcttggacctgcggcagctacttgcaactgcaggagggaaggcaatgaagtcagagagaagccaaaatagagccctggtgtctctacactgctagtctcatcctggagtcacccacctccagccttgtgcagaatcaaaagacaaatgtctatgattgatgccctggctactgaaagtgtggtctgtgggcccctagcatcagcctcttgggagtctgccagaaatgcagactcttaggctccaccccagacctactgagtcagaatctgaacattaactaggtccccaggtgatccatctgtgagttaaagtatcgtttgtcccttctaacagggtattccactaactgcacccaaaagcgttctgagacacagatggaatgcttgtaaggttagtctttgccacagctaagtgttcaatcaatcaataaatggtgcacagggctggacacagttgctcacgtctgtaatcccagtgttttgggaggtcaaggtagaaggacagcctgacctcaagggttcaagaccagcgtgggtaacatagcaaaatcctgtctcttatttaaaaatttaaaataccagcctgggcaacatagtgagactctgtctctacaaaacaaaacaaaacaaaatcagccaggtgtggtggtgcattcctgtagtcccagctctgtgggaggccaaggtggaagaatcactggagcccaggaggttgaggctgcagtaaactatgatggcaccactgcactctagcctgggtgacacagcgagaccctgtctcaaaaaaaaaactttttttttcttttttttttttttttttgagatagagtctcgctgtgtcacccaggctggagtgcagtgtcgtgaccttgactcactgcaacctccacctccagggttcaagcaattctcctgcctcagcctcctgagtagctaggattacaggtgcctgccaccacaaccggctaatttttatatttttagtagaaatggggtttcaccacgttggtcaggctggtctcgaactcctgatctcgtgatctacccgcctcggcctcccatagtgctgggattacaggtgtgagccaccgtgcccggccaaaaaagaaatttttacaaatgagtcagttgcacatgagtgaacaggagggtgttcagctgcagaagcagggcagcattatgtctgaatcaaaggaacttgtttcttcaagctcttctggcaggaattctgacagtgagtttgacaaaaagttaaagaagaaaaagtaagttgctccagaaaaacttgtaaaggaacaaaagactggcaaaactttgggagctctgtcatcttccaaacagagcagcggcagtaaacataataacatgtttattttcttttttaaatttcatatagagatggggtttcaccatgttgcccaggctggtctcgaactcctagtctcaagtgatccaccctcctcagcctcccaaagtgctgtgattagattacaggccactgtactcagctgataacatgtttcagattgggaaaatgaggtaccttagtgtttgggatgttaaaggggaagtgctaattgatggtattagagattattgratggatctcaaaggttaaataaaaccaggaagaaaaggtatttctttaaatccacagcaatggggccagctgaagaaacattcattcattcattcatttactgagacaggggacaaggtctcactctcgttgatcaggctggaatgcagtggtgcaatcatggctcactgcagtcttgacttcctgggctcatgtgattctctcatctcagcctcccgagcagctaggactacaggtatgcacgactatacccagctaattttttgtatttttagtagagacagggtttctttcttttcttttctttttctttctttttttttttttttgagtcagggtctcactctgtcacccaggctggagtacagtagagtgatcacagctcactgcagcctagacattcccaagggtaaagtgattctcccacctcagcctcccaagtagctgggactacaggcgtgcaccaccatgcctggctaatttttgtattttttttagtagaaatgggggctcaccatgttgcgaaggctgggctctagcaatctgcccaccttggcctcccaaagtgctgggattacaggcatgagccaccgcacctagctggaacagatattctatcgatacattgatgatgcagtaagaaaactgtaaagtctgagccatacaaaacctacactatcctagttgggtttttttgttttttgttttgagatggagtctcgctctgtcacccaggctggagtgcagcggcgtgatcttggctcactgtagcctctgcctcccaggctcccaagtagctgggattacaggtgcacgccaccatgcccagctaatttcagcagagatggggtttcaccacgttggccaagctggtctcgaattcctgacctcaggtgatctgcctacctcagcctcccaaagtgctgggattacaggcgtgagccaccgtgcctggcttctagttgtattaatctgtctttttacattggcttctgttttctaaatgttgttctccaagctgtcatatgtttggattacagaacaacttgtaagatgaatacttgttttaaatgtgcattattgaatatgttctgtccaagtgcggtggctcactcctgtaatcccagcatttcgggaggacaaggcaggagaactgcttgagcccaggagttcaaaaccaacctgggtaacgagaccttgtctctactagaaatttaagaaaaaaaaagaattagccgggcatggtgggtacatgtgtgtagttccacccacttgggagactgaagcaggattgcttgagcccaggaagtcaaggctgtggtgagtcatgattgcatcgctccagcctgggtgacacagcaagaccctgtctggaaaaaaaagtcctaagggaagctaactgtcagctttattaagaaggattgctttgtacctaccacctaatgtaaaataaaaccaagtaatacattctcaacagttatggcccccctccttttttttttttttttttttttgagacagggtctcattctgtctcccaggctggagtgcagtggcacaatctcagctcactgcaacctccatctccctagttcagctgattctcctgcctcagcctcctaagtagctgagattatgggcacacaccaccaagcccagctaatttttgtactttaatatagatagggtttcaccacgttgcccaggctgcagttgtgtcctttttttgctcataagagctagtactgtttaaggcccaaagtaatagtttttacagatcttttagtttcaactaagcttttacaatagaaaggacttgtattgcattgagtttataaacttttggtttgtgaaatccatacttgatctgttcttttccaaccaaatgtctaggcttgacttttccaccccaatgacatttcactttattaaatattagcagatatactttgataaccaacacagcttgtatgaaaactgagcaagtgtccatcatgacccatagggttctgggtagttgttaccttactgtttagtccacaaaaaataacgacttagataagctgtctgatttgctttcgcttattaaacacgttcaccatgagatgatgtgtgtaacatcagatactgttaaactagactaggatttaatacaaatcctgaaagcttaaaataaataaataaataaatggctgcaaggattccacaacagggcatgactataatttaacaaaaaaaaaaatctgttggccaggcatggtggctcatgcctataatcccagcactttgggaagctgaggtgggaagatcgcttgagtttcataccagcctgggcaaaataggggaattccatctctacaaaaatttaaaaactagctgtgtgccagccgggcatgatggctcacacctataatcccagcactttgggaggctgaggtgggtggatctcctatgctcaggagtttgagaccagcctaggcaacacggagaaaccccgtctctaccaaaaaatacaaaaaaaatttgccgggcatggcggcacacacctgtggttccagctgtttgggaggctgagatgagaggactgcttgagcccaggaggcagaagttgccttgagccaatatcacaccactgcactccaatctgggtgacagagtgagaccccatctcaaaacaaaacaaaacataacactctgtgtgtggtggtacatggctgtggtcacagctacttgagaggctgaggatgtaggattgcttgaacccaggagattcaaggctgcaatgagctgtgatcatgctactgcactccagcctgggtcacagaatgagatgagaaaaaaaatattctgtcaagagacaaatacattgtttataataaaaaggcaatgtcaccgtaaacgtcatgaccttggccaaacagctgagcccttgaccaaatagttcactggaactgcaatgtaaatgttacaatgctattgcagatgggagtgtaaacaagtaaagggccagccacttggcagtatccatcaaagctacaactcgactctgcaattccacctctaggaaggtattcagcaaacatactgcacaagtgcaaaatgacatatgtcaacattagtcatcacagctctcttcttttataaccaaatattagaaataacataaaggtttgggctgagcgcagtggctcatgccagtagtcctagcactttgggaggccgaggcaggtggattgcctgagctcgtcctagcactttgggaggccgaggcaggtggattgcctgagctcaagagttcaagaccagcctgggtaacacggtgaaaccccgtctctactaaaatataaaagaaaattaaattagccaagtgtggtggcatgcacctctagtcccagctcctcaggaggctgagacaggagaattgcttgtatccaggaagtggaggttgcagtgagccaagatcacaccactgcacaccagcctgggcaacagagcaagactccgtctccaaaaaataaataaataaataaataacataaaggtttattaaggccgagtgtcgtagctcatgcctgtaatcccagcactttgggaggccacttgaggatcacttgggcagatcacttgaggtcaggagtttgagaccagcctgaccaacatggtgaaaccccatctctaccaaaaaaatacaaaaattagcagggtgtggtggcgggcacctgtaatcccagctactcgggaggctgaggccagagaatcacttgaacctgggagatggagattgcagtgagccaagatcttgccactgcactccagcctggggaatagagcaagactccatttctaaaataacacaacataacataaaacaaaacaaaacaaaacaaaaataaatgtttgttaagacgaaactgattaagtaaatgaagttatatccacaaatggaatattatgcattattatggactgatatctgatcctcaagatggtaagcggacatggtaaattgcaccacatagcatgtacatagtacattgcatgctaccatgtgaataaggaaaaagagaaaataatatgtacttataggtatatgtactgaatgtctctggaggagacataagaaaattttaacactggttatctctggagagcagaattgagtggccagagtcaagattggaagagagttctttcaatatatatctttgtggatcttcttttttttttttttgagacagtctccctctgtcacccaggctggagtacaatggcacaatctcagctcactgcaacctccaccttctgggttcatgcgattctagtgcctcaacctcccaggtagctaggattacaggcgtgcaccaccaagctcagctaatttttttttttttttggagatggagtcttgctctgttgcccaggctggagtacaatggcatgatctcagctcagtgcaaccttcgcctcccaggttcaaattattctcccgcctcagcctcccaagtagctgggattataggcacccgccatcatgcccagctaatttttgtatttttgtagagatggggtttcaccatattggccaggctggtcttgaactcctgacctcaggtgatctgcccacctcggcttcccaacgtacggggattacaggcatgagccaccactccaggcctaatttttgtatttttagtaaagatggggtttcaccatgttggccaggctggtctcgaacttctgacctcaagtgatctgcccacctccgccctcccaaagtgctggaattacagacgtgagccaccatacttggccctttgtggacctttcattttttttttttttttttttttttttgagacagtgtcgctctatcgcccaggctggagtgcagtggtgcagtcttggctcactgcaacctccacttcctgggttcaaatgattctcctgcctcagcctcccgagcagctgggactacatgcgcaccaccacgcccagctaatttttgtatttttagcagagacggggtttcaccacattggccaggctggtcctgaactcttgacctcgtgatccacccacctcagcctcccaaagtgctgggattacaggcgtgagccaccacgtccggcctgtggaccttgctcattaaaaataacaaataattaaaattactttacacattactttctgagaccaaatcttggcttctaacatagccccagtcattctcgccttctggtgtttctgtccttgtgtagtcccctccccttgagtgtgggctgggcctagtgacttttgtctaatgaacaaaaataatgccaaatatgcctaatctgaaatgctccaatggtccaggtgcagtggttcacgcctgtaatcccagcactttgggaggctgaggtgggaagattgttcgagttcaggagtttgagaacagcctgggcaacatggcgaaaccctctctctattaaaaacacaaaaattagccaggtgtggtggcatgtgcctgtagtcccagctacacaggaggctgaggcacgagaatcccttgaacccgggaggtggagactgcagtaagctgagattgcaccactgcactctagcctgggtagcagagcaagactctgtctcaccaaaaaaaaaaaaaaaaaaaaagtcaggtgcagtggctcacatctataatcccagcactttgggaggccaaggtgggaggattgcttgaggccaggagttcaagaccagcctgggcaacatagtgagatccccatctttatgaaaagtttaaaaaaaaaaattagccaggagtacagtcctagttacttgggaggctgagatgggggcactgcgtgagtccaggagttggaggctgcagtgagccaacatcacaccattgcactccagcctgggtgacaaagtaagaccctgactctatgaaaaaaaacaacaacaacaacaaaaaaaaaaaaaccaaaaaacctgatctggctgggcacggtggtttacgcctataatcctaacactttgggaatctgagaaaggtggatcacctgaggttggcctggccaacacagtgacacccgtctctactaaaaatacaaaaattaaatgggtgtggtggcgggcacctgtagtcccagctacccaggaggctgaggcaggataactgcttgaacccaggaggcagaggttgcagtgagccaagattgcaccactg

SEQ ID NO: 96684 - DNA, 30906 bp, Homo sapiens
tgtttattgtctgtctctctcttctagaatgttagtactatgagtcagaaatttcatctgtattgttcactaatgtatttactgtgcttcagatggtgctgcctgatacacaatatttgtttaataaatatttgttaggtatgtgagtgaatgaatagatgaataaatagaaatagatgctgtattgccttcatggtgaattacagagtatactgccatgctttgaaaagctctgtcccagccgggcgcggtggctcatacctgtaatcccagcactttgggaggctgaggcgggtggatcacgaggtcaggagattgagaccatcctggctaacacgatgaaaccccatctctactaaaaataaaaaaattagcccggcgtggtggtgggcgcctatagtcccagctactcgtgaggctgaggcaggagaatggcgtgaacccgggaggtggaggtggcagtgagccgagatggcgccactgcactccagcctgggcgacaaagtgagactccatctcaaaaaaaaaaaaaagaaagaaagaaaacctctgcataggaaacatagttaacatacctttccaaatgatgtcactctataaatgttttgaaactgataatacgtattattcatcccatggaattactatctggagggacacactatgggaaatatttctctcaaatgcataccatcattcatgttagaagatggtcaggatattacactccgaacaccactctcgactgtaccacagaattctcagagtacttcagaaatgggagctgagtgtggatgattacccagaagaggacttgctttggctctggccagctctttgacttagaaagccaaggagctataggaagaatgatcagtagaaatgacaggctaggccaggtgtggtggctcatgcctgtaatccaagcactttgggaggccagggcgggcgggtcatctgaggtgaagcattcaaaaccagctggcaaacatggtgaaatgctgtctctacttaaaaaaaaaaaaaaaaaaaaaattagccagggatggtggtaggcacctgtaatcccagctacttggtagtctgaggaaggagaattgcttgaacccaggaggcagaggttgcagtgagccgagatcatgccattgcactccgacctgggcaactagagtgagactctgtcttaaaaaaaaaaaaaaaaaaaaaaaaaaaaaaaaaggacaggctagagctgtggcccatggaaaagaaatcacaaacttgggtcctatatttatcaactaggtggaatatatagtctccttccagtctttttgtctgcctgtatattttttcactattggtaaaatggtgatggcactagtcatgataacaacatactagaactgtgggaataatatgggctttgcagtcaaagatgtgtgagttcaaatctgcctctgccatgtattagttgagcaacattaggcaagctattaatatactgattcgattaagctttagtttcctctcctgtaaagtaaaaatttaatacttattcttcagcattattgagagtcttgaatgagattttaaaaaggtgcctgtattcctgataaatgctggctgtcgttattattatctagcagaatgctcattccacagaggcaggaatttttgtttgtattgcactttgatgtattctcaacaattagaacaatgtctgccacggaagaagtgctcagcaaatatttgtcaattattggatggattgttattattattaagacctcttgcagctcttttatgaagctataaacctgcgcaaaaggaacttagcaaaatgccttaaggaaagggatgttctttgtgttgataccggacacccttgtcttctctaaagagtacatttaccctccttttacctagatattattactctcagaaaccagtacacaagaaacctacaatgcttagctatttcagtcttgtcttcctaagtagactataacttcttggaaggcagggaatattttttctttccttttttacttttgtatatcctcatgctacttagtgtgtactactttttacatgtcagctgggcacggtggctcacacctgtaatcccagcactttgggaggccgaggtgggtggatcacgaggtcagaagttcgagaccagcctggccaatatggtgaaaccttgtctctactaaaaatacaaaaattagccgggcatggtggcaggcacctgtaatcccagatacttgggaggctgaggcaggagaatggcttgaacctgggaggcagaggttgcagtgagctgagatcatgccattgcacactagcccgggtgacagagtaagactccgtctcaaaaaaaaaaaaaaaaaaaagaagaagaagaagaagaagaactaactacatgacaggaactgtttcaaaagctttgcctacatgatctaacttcatcctcacaatatctctgaggcctcagtattctcattattcctataggacagaggaagaaacagaggaatatagaggttaaggaagagctgtaaatagtagagctgacattcgaacatgggtaatctgactctaatgccttgtactcctttaaaaagtggtaataattaagaaaataaggccgggagtggtgactcacgcctgtaatcccaacactttgggaggccgaggtgggcggatcacctgaggtcaggagttcgatatcagcctggctaacatggtaaaaccctgtctctactaaaaatacaaaaattagccaggcatggtggtgggcacctgtaatcccagctactcaggaggctgagacaggagaatcacttgaacccaggaggcagaggttgcagcgagccaagatcgcaccactgcactccagcctgggcagtagagtgagactctatctcaaaaaaaaaaaaaaaaaaaaagaaaagaaaagaaaaagaaaagaaaattaaaaacagagattagtttttcttctactttggtcttctttgactcaaaaaatattatctcttctttcctaaccctttacagccatattatgggaagtaggtttcccatttttctgaagaggagtttgagatacctgcatctctctcacaaaatcatatactactgggaatctctctctctctctctttgagacaaggcctgggtgagtctgtcacccacgctggagtgcaatggcactatctcctcactgcaacctcggcctcctgggctcaagtgatcctcccacctcagcctctcaagtagctggcatgcgccaccacatccggttaatttttgtattttttttagagatggggtttcgtcatgttgcccaggctggtctcaaactcctgtcctcaagcaatcctcccaccttgaccccccaaaatgctgggattacaggcgtgagccaccacgcccggtcgaaagtgccatttctttagcattcaaaaaaagtatcttaggccgggtgcggtgactcacacctataatcccagcactttgggaggcccaggcgggcggatcacttgaggtcaggagttcaagaccagcctggccaacatggtaaaccccgtctctataaaaatacaaaaattggacgggcgtggtagcatgtgcctgtaatcccagctactcgggaggctgaggcacgagaattgcttgaacccaggaggcagacgttgcagtgagcagatatcgtgccactgcactccagcctgggtaacacagcaagactccgtcccccaaaaaaagtgtcttcattcatctgaaatgtgtcagtgttaccacagcgggaaccggcattgaggaaaatcaggttttctgggaaagacttggaggtgggaactcaagaagttattctcaaaactgtgagctgggaatcaagacagcgtgactcaattcagcaccgtggacagagctgctggagccctcaggaccctggacagagaagcaggccgcgcattcccggggaaccgaattcgcatcacttgagaacccacctagagaagccagagcgttcaactcccctttccctcccttttcttcagccagacctcagccacttgctcctgagtcttaggaacagaggtacacggagcgaatatattttaagggcgccactaacagcgggagataagacttttgggagaggagaattatgtaaataaaaatggctttggctgatgtactaggagaactcttgataattctaaattagagtcctcagatgggagtggggcactgctaataatatttgttaacgatatgtattttttaggcggagcagcaaagggccactcttgtcctttttaccccacgaagtcccacctcccattccttacgctcaagttttcatttcttggagagcaccccgtacgagagaaagggaaataacttctgcagtctcttgctttcctccccatcttccccttccctacccccactcatccggtctctctgaaatacacatgtgcccacatccgcacgtgcacacacacacacacacaaacacacacacagagccacagcgtgagaattccaaaaggttctgcacactcggtggagaagattgaattcagagcaagcggatgcccccgaaagcaggctctgtccctttaaatgggttgtagtggtgggggaggggaactggccggagctggcattgtccagtttgaactgaacaccggaagtgaaggggcagggccagggccgtgcactgagccccgggccattgtccatctccgaccagggcagtagccacccccactagccagccgtctttatctcctagaaggggaggttacctcttcaaatgaggaggccccccagtcctgttcctccaccagccccactacggaatgggagcgcattttagggtggttactctgaaacaaggagggcctaggaatctaagagtgtgaagagtagagaggaagtacctctacccaccagcccacccagtccctctctcagcagtggatggggatggggtgggggtaggacgagaaggcagctggtggagaaacagcttcaagactctttgggttcctcctgctctccagggagcttacctggggctaactttagacacacaggtttggagggaggaaagaaggaagaattctttacaacgaatcaattaagagcactttctcttttctaactgggggaggcccagaaaaactctgagtcagaaactctgggaggcagacattcagatgtagtcagaggcagacagactttggaaggcagcgctttggtcaggacagatcagccctgtgtgtccccagcctctcccctgctcccccatcccgggcttcccagtgtccagaactccaggtctatctaagcacacgggggtggggggtgagagcgggtcagctccaagcagccgggtcagctcagaggcctgagggggaagagagggggaggggagctcaagggctgggggagggggagggcccattcatttctcccttgacaggtggtttgtgtttctgattggccagcgccgccaggctcacacctccctcccccaactctctggaatgtataattatctgcccggggggtgggggtggtgtgtgtgtgtgtgtgtgtgtgtgtgtgtgtgtgtgtgtgcagtcacgtggttttaaaactaccccccccaccaggtcccccacctgtatctgctttggggacccctactgagtccaaagtgcaggatctcaaattccggggtactcaagtcttctagggcagacagacccatctccagttgtgcgtgtggggagggggtgtcaaacctcaaggttctgagaagggacaccccagaggtgtcagagaccggagttgtgggggagggccggagctgaagccggagggaaagggaggggaaaggagagggaggggaggggagggggctgcccgcggggggttgggtcattgtcttttagaatttgggagcctttgaaaagccgtgggccctcccaccgctattgtgcgggggaagatgtagcagcttcttctccgaaccaaccctttgccttcggacttctccggggccagcagccgcccgaccaggggcccggggccacgggctcagccgacgaccatgggctccgtgtccaaccagcagtttgcaggttcgagctcgggacttagcggggacactttaggattcaggggcggccaggagccacgtagaagggaggtggggaactgagtcctaggctgcccaaaggaccccaagacggtgcggccttctgcttcatagggccgtctctggggccaggaaccttggtgtcccagtggcgtgcgcgccagactacgtgggtggatggagaggagaggcttgtcccgccgtgagtctctgggaaacgcgttgtgggaagaggagcaaaactttcggggcactactgtcccggtgtacgctaggggaacgcgggaggcgaccgggataggtttcttctcttctgttgcttggtagctgccccctcctggctgtccacttgtggggctggatactcgggtctccctgcctggggcccgagacggccctccgattccgtgccccccagctaagtgcccggccctccctctctccaggtggctgcgccaaggcggcagaagaggcgcccgaggaggcgccggaggacgcggcccgggcggcggacgagcctcagctgctgcacggtgcgggcatctgtaagtggttcaacgtgcgcatggggttcggcttcctgtccatgaccgcccgcgccggggtcgcgctcgaccccccagtggatgtctttgtgcaccaggtgagactgattccggtaactttgcccagggaagggcgtctaggcgccyatatccacgggtgggctccgggctcgcagttgaattgagggccatcgggagccctcattatgcatccctgtctttgcttcggcaccccaattctgagtccctgttaactatctcgtgggggagtagtgggaggcagcaccaattatcagcacccccgcccccttccgggaacccctccggcttaccacgtgtctattacctctttcccctgggaaggggcagggggcagggaggtgaccccatgtggcagaaactaaggytgtattgtgcttgccggtggggggagggcgagcaggccggccagggaagcacatgccgggcctaagccgggagcccagctcctccaacgtctgaatggagctcagaaggcgggagagagtgagggcaactggctactggacccaaggggcgtaaagccgagaagtcagcctcatcccctttttaatgcagacctcacctggctggtcactaaaaactgggtttggcagatccctgaaggatccctgtgggggcttgaaagctcaggactggggtctttgctgtccagttcccgtgaggaaggaaaacccaaagagcccaggccttccttacattcctgggccaggctgggagggaagtcggtaggtcgcaaccccaagttctcagttaaagcagggcagcacagtagggggtgaaattcagtgtcgcagggcagggggtgaagggaggctggcctctggtcctattctccgcttggcatttatggccccagacagccattgattgctgtcttaacattcctggcctcaaacaaggagccagagacttcaggtctccctcctcccaggcttccccttcctgaatatcctagaggcattccggtggtcctgggccaccagctacccataaagaccatggaaaggaagttgcttgctgcctatggcccttccatctttggaggtttgggactggatctggaaagaagaaattgctaatcccagatcgtgtaggttgacacccaggccgggcagggaggggttacttaagggaggttggctttaggaggtgtgggggaggggaaaggaggatgtggggattaagggttggagcctgaagggatggcattctttgggggaggggtagagaagggagatgctggatggactagttggaggcagcagggacgtctttgagcacagccttcagtgaggaacaaacaagggaaatagacgcagggagatggggagccaccacttactgttggggccatggggtcagtgggctacttgaacatctgccaagaggacctgcagcaggatactgagctgcccctttgcagcacccttattcccccaaccccccattagacagctagtttcccactagtggcttttctcccttctctgtctcatttacatatgtgaatgataacccacaggaagtaattgtgggagaaagaagggaattggcctttttagatctattaaatcactttattacaggaaccagctttgaatggccctcctcagcagggtagcaagcctcccccactctcccatttatctgatcacaaagagattaaaatctttcctggtctggggactggacagctcccccaactttgggaggctggaataaaagagtcagacccaacgttttctcatctcccatccaaaggctgccagatagggaggggctgaggggaatgtatcccctcatcttctgggttccttggtgatatacataccccaaggaaggtgttttcttgttttgtttgtttgtttgtttgagcaaatggggacttgggcctcagcaggcttcaccttaggatstagagcaattgggaaactattggatggcatagagcaggcattgagtctacaccatgctgggtcagatgtgctggcttggaaatactctggattttaggctcttggaacatccaggaacccatagttgagtaagttgtcaatagggagctgagctggaagagaattaagaatttgtctctctaatccccagctcttcccattctactcacaaagcacaatgatgggtggaaattccctgagcctttacctggtagctctgataatggtagcatgccagaaaggcttgggtcaggggtcctccaaccccaccttaaccgtaagttagattagtgattccagtctttgcacttgtttttttgtttgtttgtttgtttgttgcttctttttttttttttttttttgagatggtgtttggctcttgttggccaggctggagtgcaatggcatgatctccactcaccgcaacctccgcctcccaggttcaagcgattctcctgcctcagcttcctgagtagctgggattacaggcatgtgccaccacgctcggctaattttttgtatttttagtaaagacggggtttctgcacgttggtcaggctggtcttgaactcctgacctcagatgatccgcccgccttggcctcccaaagtgctgggattacaggcatgagccaccactcttctgcatttgtgaaattagaaatgactctctggaaatcttatggtaaaggaatttagtaaacacaggataaattgtttactgggggaggaggaaagtgttcccgaagcagagggtaagaaatctttaacaaaacttcccattctttggctgctggggttgggcaccctggggttggggtgggctggtgagaaggtaattgtcctaagatagcatctaccagagggagggggtcagggagcccctttgcaaataaagaggaagggggaaaggcaatttaaaaacattttcttttcctttccaaagttggggttattaggatcccaatgccctgttaactaatgttcttatgctctctcccaaatgctgtaatatcctcttcaagagtagatgagtggggggaaaagcccacccccagccaaaaactaagcaaaacgacaacaaaacaaaaagcaaagagatttctataacaactcttttccttaggtacacatctttagatctagaaatctgcctgtctctagagttagggaaatagatagcaagcccttaaattagagtttctcgacttcagcactattgacatgttttgagcaggataatttgttctggggagtctgtcctatgtattataggatgtacagcagtattcctggtctctacccactagaarccagttgcatcttaggtatgacaaccaaaaacatctccatacattgtcaaatgtccccttggagtcaaaaatctcatccctgcttgagaaacacagttatataggaaagctggaacaagaaagctaaactgtcaactattttcctgagattcatcaagaattcaaaaatcctcattttgggccattttaagagttttggcttaactcatgtttcctgtggctcaatttgcaaactctcaagatttatagaaatttggaaataagaaaagttccctgctttcccatagctcctcaggacccagatatgtttcaatctcaaatatgtttaaattggctttctggctaaaatgctatattagaagacttggagtcaaaagcccagatttgaccaagggaccaagttgggttaggagaaaaggttttcaatacctagacaactgctgaaattgccctgwagccaggtggccttctttttctaaaagccatgagtgaggaggtggtaagagcaactttattcagggtctaggttaggactgctgggtttggtgttagggttgcgggggcgggtggggaaatatacggaatctttcctcctggtttgtaacactgcacctctgattactcacctcatgtctagttattgaggtactggtcttatacccttctctatgtaacccataagctctttgaagggaggaacttagctgcctggttaattttctagtatgcatttggtgggctgaggaatgaataagaaaaggggcatcttgaggaccttggtgaatcagaagtacacttagcagtctggggtccatgttggcagagatctttgttcagagaaaaagactagagatactgaggggtgtcaattgtagctgctcgctttctgggctgggcacaacatagcactatgaaagtttgtggagtgaatatgggtagatcaccactcggagcccagagaggttcctctcgtttttgttgacagagtggaagccacggatttagtggtcatccatgagttatttctgtcttaataagaaaaggcagcttaaaaataaattgactcgatttttcagaaagttggtagagaggtaggaaggttcatgaagacattgtggaatcttctggggtcctcttctttctgagacatgcttctagacaatgtcttttttttatttttatttttattttttgagatagagtcttgctctgtcgcccaggctggagtgcagtggcacgaactcggctcactgcaacttctgacttttgggttcaagcaattctcctgcctcagcctcccaagtagctgggattacagatgtacaccaccacacccagctaattttagtatttttagtagagaagggttttcgtcatgttgtccaggctggtctcaaactcctgacctcaagtgatccacctgcctgggactcccaaagtgctgggattacaggcatgagccatgatgcccggcgacagtgtaaagtaaaggctgtgacaccatcctgaacaaagcttcaaatatgggatgtttctaccctctggttgttgacactgctgcctgccttacaagtggttttcagtaacattcaccagggccatttagttttttgaacattgctaatcacactctactggaattcttgttttttggagtaactgccctaggtaaaactatgcctcctgtcttcctgcaggcatgaatagcaaccactggccacatagtcagagtgggaggtcaaaggagttgggggagaatacacagttgatacagacttatttaacatgatctcaccatcgaggttttttattttttttgagacggaatctctctctgttgcccaggctggagtgcagtggcgccgtcttagctcactgcaacctccacctcccaggtttgagcgattttcctgcctcagccacccgagtagctgggattagaggcacctgccaccatgcccggctaatgttttgtatttttagtagagatggggtttcaccatgttagccaggctggtctcgaactcctgacctcgtggtgatccgcctgcctcggcctcccaaagtgctggatttacaggcatgagccaccatgactggcccagcgtggtgttatttaatttagacaggacttggcttttctaagcagtagaatataagaactgagtttctggcctaaaagtctaggaacctttcattcttatccctgatcaagccggtggttgggtgggggcagggtgggacggggaggacaagatgactgccctaaggagctgtggagataaatctacccgaacacttgagttcacagctcagaccaggtagcgggccactcagtacctcctggtataggcgccctcgggcttacckttgggcagacaggctgagcagcgccatctggtggagaactccaggcaggagctacagggcctggctgtggctgagcagaggggatcagagggattggctgcctgcagccttctgttccagacacccctttcaccaacctccttgacacacaccctccttgacacacacaccatcgaataactgcttctgggagaaccggttggttctcccttaccaaatcttacytccaggaatgaagctaagttagggatgtgacaccacaggactgaatcattaaaattactttcatcagctgcttttttaaacgtagctactagaaagttttcaattatatatgtgacttgcatcataatgaattgcactggggagagttaggccagctgcactcagctcagctcttgcctcttaytgcgactttaaccaaggtgcttattaacccctctgcctccatgtcctcaagctgtaaaatgagggtcttcatatcaccccactgcaccagtttgatatgagggttaaatgagttacaacacgtaaagtggttagaatgccacttagcctacagtaagaatcaattagtaacagttattttgcatagtacttagacattcaacaaatgcttgtgcaagctaagaacctagaattgaggtagagacctgcactacagaatcttccggctggaatggccctggaagaagatctggaatagcctcttgcggaagagccaagaaccccagctttaatctgcacaactgtagcaagtaccctgaaattctgttgccacttctggagaaaggacacttaggttcctttgtgttgttttttttttttctcttcatacttttttcttttataatgttttcttttgtttttaactccacatttcctaagtgacccctaaggctcattctatctctaagcttgcaaaggcataaattgaagctgggatgaggtacttggtgtgggttggatagggtaaggcaggcaattactgaggtattaagaagggatcagaaggcctaagtactttaactggagagattccttccctgttatcaaaaaaagaaaaagaaatgcttggggtgggcgcggtggctcacgcctgtaatcccagcactttgggaggccgaggcgggtagatcatgaggtcaggagatcgagaccatcctggctaacgcggtgaaaccccgtctctactaaaaatacaaaaaattagccaggaatggtggcaggagcctgtagtcccagctactcggcaggctgaggcaggagaatggcgtgaacccgggaggcggagcttgcagtgagccgagattgtgccactgcactccggcctgggcaacagagccagactttttaaaaaaaaaaaaaaagaaaaagaaatgctgtctgttgtctgatgccacattccccaacacagtaggcccatgtaggctccccacagtcctaacttgaagaaattgggaaaggatgatatgggtcatgccttctctccccctcccctttaaaataatttatctgaatcaataattcaggattggactgaagagacccaaggggagggggtcctgtttggttctatccatgaagtgggcagtgcgcaagccagagaagggagatggctgctgatggtgactttggcaagactgcctggggaaggaagaattttctatatctagttctctcaccgtgaccataaccccaacatagagaggaaggaagaaacagttgaatgtggggaggagggagagggagatgcaagagggatctgctccttggaactccaggaatctgaccaccagaaccagccagtgtcaactctttgtttcctggggctgggctctactgggggagctcaggccatgcccctccccctaaggtcttttctttttggaggggatggggaagggggcggggccctgctttgtgtgtggttgggggtggaatgggggtggtacaagaatttcaggcgcttttcagatgcaggccctgggaggctggctctgtggggctgcacgctgattacctatctgataagagaggaattcaaactatgtgttttagaaaggggcgggggaggagggcagggagccacccctggagaccaccagtttaaatctcttgattacactgaggtacctgcaggggtgggggtttactctgtaaaagtcttagacctcagatcctccagtgatgcagtgagtgacctgagaggactagtcaatttcttgttgcatgtccccatttatatgatcctcttaaaataaacctatgaggtgtccatagaggaaggtgttactctccagtcaactggggcttagagaggggatattcttctaagtttctatagctagttaggataaaaccagatgcttggcacttagttctctctgttaacccacgccacccagtgtgaagaggttgataattgccactccctgaggatttatgtgtagcaggcgaagtgctaactacttttcatgtgtaaaacctcacagcactaccataaaattagtatttactccrttttatagatgattaaagaaaggagggaacaggccatcagactcaatcaacccttgttcttaactatttacctgctgaatcacagctagaactaggagtgtcccagcctaagacaagctgggcaagcgaatgaagctggaattgcttgggtccagaaggctcttggtctggctcctctaggacctcccaactcacccactaattgcatctcttgtcccaccccgctcaataaaaaataagtcaaatctaatataatctttattttttgagatgggttcttgctctctcacccaggcaggagtgcagtggcgcgatctcagctcactgcaagctctgcctcccagattcaagcgatccttctacctcagcctcccaagtagctggtaccacaggcacatgccaccatgctgagctaatttttgtattattttgtagagaacagggtttcgccctgttgcccaggctggtctccaactcctgagcctcaagctcagaatccacctgcctcagtcacccaaattgctgggattacagttgtgagccaccatgcccgaccttacaaatctaactttaaactcagggtggttactgtgaaacagcgagagagrtattgcacccggcctgcaatatcatcttaaaacaaaaatttggccgggcatggtgtgtaatcccagcactttaggaggcatgaggtcaggagtttgagaccagcctggccaataaggtgaaaccctgtctctactagaaatacaaaaattagctgggtgtggtggcgtgcgcctgtagtcctagcttaaacccagaagaatcgcttaaacccaggaggcggaggttgcagtgagctgagatcgtgtcactgcacttcagcatgggcgacagagcaagactttctcaaaaaaaaaaaaaaaaaaattaagtgataaggaatctgtggttccttcatcttgatgaagagcatgtttcatttaagttccagtttggaatattaccccccagccaccagcataaaatacraatgctacttactcatgttcccttgagccaggactaggtaagtgcacagtgatcccttttgcttctccattttctatgaygactactccttgttgacatatttgacactgttgttttactataatagatgaagctgtaatgaagtctattctgggtagggtctgagatgctgtcacctccgctaatgtcaagttggtggtgcagtaagtggcatgatagaatgagctctgagctttaaatcaggaactctgggttcatctgaccctggctttgctacagaactagctgtatcaacaactactttttttttttttcttgatggctgctggctgtttgctaactgctttataaatatcagtgtccttaaattttggtacaaacgtgcagtgttctaataggattattccatacatattgttctaaatcttgctttttgttttttcttttaacaatattatttggtgatctttctcagctgaatgattaaaaatctgcctcctgtttcattaattcattcaaaaatgtgctaggcattatttcaggtaccaaaatgtggctgtgaacaaaccaaagactttacgttgttcttaatggctgcgtggtattcattattatagatgtaccatatttattcaaccattccccttcaaatacaccagtaggttatttccaatttttttaaagcaacaatgagatactgagtatatgtgtcgtgctaagacttcctactgataatctacttatattatgttgtgtaattcttttttcttagtgatttatggtatatttttgtagttttaccagtctgattatctgtcttaacttttcagtatttttcttaacaatgaggtgtttaaatcctctgaaatgtattttgcatatgtatcatacaaagtctgtaggaatatgacttcctttcccaatggattattaatttttatagcagcatttattgaattatttttcttacctattgatttctccatatattctcagatctctgtgattttccattttaatcctctgatccatctgcttgggttatactgtctttcggtaacattattttgatataatttcaaactttaaaaaggctgcaagaacaatacccaacactcccacataacctctacccagattcattgactcttaacattttgccccatttgctttatcattctctatcttgctacagatagttttttttttgaaaccataagttggagacagtaagcacttttatctctaaatatttcagtgcgtatttcccaagaatgggaatatttatcttttttttttttttttctgagacagggtctcactctgtcacccagcctggagcacagttgtgtgatctctgctcactgcaacctctgcctcctgggctcaagggatccwcccacctcagcctccccagtagttgggactacaggtgtgtaccactgtgcctggctcatttttgtattattttgtagagatgggtttttgccatattgcccaagctggtctcgaattcctgggctcaagcaatccgcccatcttggcctcccaaagtgctggggattataggcatcagccactgtgcctggctgggaatatcaatcttacatcgtttcagtacactaatcataatcaggaaattaaacactggtacatttatctatataccatatgcaaattttgtcaattgtcctattttttttttttttttcctgtttcaagatccaatctggaatcttggatttcattgaactgttcagttcttcaggctttgtctttttatgaccttgacatttttgaagtcctgttttataggaatgtccctcagtttgggtttgtctgatgttccctcaaggttagattcaggatgtgcatttttaaagtcataagtccttagtgcatcatattagaagatatgtgtgtcccattgtaggcaaagctaaactcaaagaacttgactagggtattatctgccagttttctccactgtaaacttgctgtttttccctttgtagttgctacactgctgattatatccaatttaaattgtaatatctggtattcttggcaatttatattttcccatagcctttagaatcactcaatcttccaatccaagatcgtggtatgtttttgcattttttcctttaatatatttgagttttttcttcatataggctttttaccttgttaaatgtattctgagggttttggtgtttttgtttgtttctgagagagggtcttactctgtcgcccaggctggaatgcagtggcataatcttggctcactacaacctccgcctcatgggctcaagtgatgctcccacctctgctgggattacaggggtgagccagacagagtctcgctccatcacccaggctggagtacagtggtgccatctctgcaacctctgcctcccgggttcaaacaattgcctcagcctctcgagtagctgagattacaggtctgcgcaccatacccagctaatttttgtgttttttgtagaaatggcatttcgtcacgtaggccaggctggtgttgaactcctggattcatgtgatctgcccacctcagcctccccaaagtgctgggattacagacaggcatgagccactgtgcctggcctattctgtttgtttggttttttaacatgttttgcagccattattatgatttccttttttttctttttcttttttttttttttttttttttttgttgttgttgttgcccaggctagagtagaatggcgcaatcttggctcaccgcaacctccgcctcccgggttcaagtgattctcctacctcagcctcccaagtagctgggattatagatgcccaccaccacgcctggctaattttgtatttttagtagtagagacagggtttctccatgttggtcaggctggtctcaaactcctgacctcaggtgatatgcccgcctcggcttcccaaagtgctgggattacaggcatgagccattgcgcacggcccattagtattatttcttaaatcattgagcatcttgagtttgtttttttgtttgttggtttgtttgttttgygacggagtcttgctctgtcacccaggctggagtacagtggcgcgatctcagctcactgcaagctctgcctcccaggttcatgccattctcctgcctcagcctccggagtagctgggactacaggcacccgccaccacgcctggctaattttttgtatttttagtagagacggggtttcaccgtgttagccaggatggtctcgatctcctgacctcgtgatcccctgcctttgcctcccaaagtgctgggattacaggcgtgaggcagcgcacccggcctttttttttttcttttttaaataaggcatatcatattgctttgattataaaaataccacttgattttgtattttttccagtattctacttatttggtcttttgatgatggtataaatactaagtgaggcattatgtgaaaaatgaatatttcagtgcttcatagcgtgacattttatttttattttatttatttatttctttgagatggagtcttgctctgtcaaccaggctagagtacagtggcatgatggctcactgaaacctctgcctccggggttcaagcaactctcctgccccaactgcccaagtagctgggattacaggcgcccaccaccacacccggctaatttttgtatttttagtagagacagggtttcaccatgttggccaggctggtctcgaactctggacctcgtgatccacctgcttcrgcctcccaaagtgctggggttaaaggcgtaagccaccgtgtgtggctgagccaccatgcccagctatttttacttttattttatttatttatttttgagacgaagtcttgctgtgttgcccaggctggagtgcaaaggcgccatcttggctcactgcaacctctatagtgtgacactttaaatttcgtaattttatatttgttgatttcttccaaatgcttgtatttacaaatttttctgtttgttgttgtttgtttgtttgtttttgagacaaagtctcactctgtcgcccaggctggagtgcaatagtgtgatctcagctcactgcaacctttgcttcctgggttcaagcaattctcctgcctcagtctcccaagtagctgggattacaggtgcccgccaccacgcccagctaattttttttatttttagtagagacagagtttcaccatgttggccaagctggtctcgaactcctgacttcaggtgatcctcccgcctcagcctctcaaagtgctaggattataggtgtgagccaccgtacccggccctctgttctattttattaagaactttaaacctgaatagctacaaaaatgtcatggcatctgcttatataattacgatttttgttaatgtactggtagactttgttgttcttaatcgtagtgactctttgagtcagtttccttaccagtaaaataggagtaccatcacatttgattcctaccctacaggaataagagttccttgtcttttggtataataatggaaattaatgttaaaatttactgcatttcccttcaccagagtaagctgcacatggaagggttccggagcttgaaggagggtgaggcagtggagttcacctttaagaagtcagccaagggtctggaatccatccgtgtcaccggacctggtggagtattctgtattgggagtgagaggcggccaaaaggaaagagcatgcagaagcgcagatcaaaaggagacaggtatggattggaaggcagcttatataggttgctaagggcatccccagtctcccaatcctgtcactttttgggtcacactgcaaaagacaaagggaagcctgtggtccctggcagcatctggaaggctgagcgcctgcaataggtgtgggcragggcagtaggtgaggaggccactgggggtgacttagtgctacttgggacaagtaagtttgctctgtggtctctaagcctcaattgttaagtgaggcagtgatactaacatcctaggatggttttagaattaaaggagatcatagatttgcaaatggtgggacaagacagtattatctatatctgttgctgctttaccaggtctgcaaatggctggtttccttaatcttgcttgggcttaaagccccttagctctgaacagatactataatttggcttctttaatttctcctatattaagggtatggaagaatctctcctatcccccaagttgcagttcctagttggggtcagtaacttatatttctggtatcttggtattttcaagttgacatgaatctgaagagatcacctagacaattagatgtggaaaggacttagagatcatttagtaatagtcctccttttgcaagtgggaagtttggtctctgggaagggaagtaagtgacaaacctgtaccagagcccaggtgtcctcattcgtgggaggcatctggcctcttcttgctcctttctcttacttttacgatcttgctttgtactaggtgctacaactgtggaggtctagatcatcatgccaaggaatgcaagctgccaccccagcccaagaagtgccacttctgccagagcatcagccatatggtagcctcatgtccgctgaaggcccagcagggccctagtgcacagggaaagccaacctactttcgagaggaagaagaagaaatccacagccctaccctgctcccggaggcacagaattgagccacaatgggtgggggctattcttttgctatcaggaagtttygaggagcaggcagagtggagaaagtgggaatagggtgcattggggctagttggcactgccatgtatctcaggcttgggttcacaccatcaccctttcttccctctaggtggggggaaagggtgagtcaaaggaactccaaccatgctctgtccaaatgcaagtgagggttctgggggcaaccaggaggggggaatcaccctacaacctgcatactttgagtctccatccccagaatttccagcttttgaaagtggcctggatagggaagttgttttccttttaaagaaggatatataataattcccatgccagagtgaaatgattaagtataagaccagattcatggagccaagccactacattctgtggaaggagatctctcaggagtaagcattgtttttttttcacatcttgtatcctcatacccacttttgggatagggtgctggcagctgtcccaagcaatgggtaatgatgatggcaaaaagggtgtttgggggaacagctgcagacctgctgctctatgctcacccccgccccattctgggccaatgtgattttatttatttgctcccttggatactgcaccttgggtcccactttctccaggatgccaactgcactagctgtgtgcgaatgacgtatcttgtgcattttaactttttttccttaatataaatattctggttttgtatttttgtatattttaatctaaggccctcatttcctgcactgtgttctcaggtacatgagcaatctcagggatagccagcagcagctccaggtctgcgcagcaggaattactttttgttgtttttgccaccgtggagagcaactatttggagtgcacagcctattgaactacctcatttttgccaataagagctggcttttctgccatagtgtcctcttgaaaccccctctgccttgaaaatgttttatgggagacyaggttttaactgggtggccccatgacttgattgccttctactggaagattgggaattagtctaaacaggaaatggtggtacacagaggctaggagaggctgggcccggtgaaaaggccagagagcaagccaagattaggtgagggttgtctaatcctatggcacaggacgtgctttacatctccagatctgttcttcaccagattaggttaggcctaccatgtgccacagggtgtgtgtgtgtttgtaaaactagagttgctaaggataagtttaaagaccaatacccctgtacttaatcctgtgctgtcgagggatggatatatgaagtaaggtgagatccttaacctttcaaaattttcgggttccagggagacacacaagcgagggttttgtggtgcctggagcctgtgtcctgccctgctacagtagtgattaatagtgtcatggtagctaaaggagaaaaagggggtttcgtttacacgctgtgagatcaccgcaaacctaccttactgtgttgaaacgggacaaatgcaatagaacgcattgggtggtgtgtgtctgatcctgggttcttgtctcccctaaatgctgccccccaagttactgtatttgtctgggctttgtaggacttcactacgttgattgmtaggtggcctagtttgtgtaaatataatgtattggtctttctccgtgttctttgggggttttgtttacaaacttctttttgtattgagagaaaaatagccaaagcatctttgacagaaggttctgcaccaggcaaaaagatctgaaacattagtttggggggccctcttcttaaagtggggatcttgaaccatcctttcttttgtattccccttcccctattacctattagaccagatcttctgtcctaaaaacttgtcttctaccctgccctcttttctgttcacccccaaaagaaaacttacacacccacacacatacacatttcatgcttggagtgtctccacaactcttaaatgatgtatgcaaaaatactgaagctaggaaaaccctccatcccttgttcccaacctcctaagtcaagaccattaccatttctttctttcttttttttttttttttaaaatggagtctcactgtgtcacccaggctggagtgcagtggcatgatcggctcactgcagcctctgcctcttgggttcaagtgattctcctgcctcagcctcctgagtagctgggatttcaggcacccgccacactcagctaatttttgtatttttagtagagacggggtttcaccatgttgtccaggctggtctggaactcctgacctcaggtgatctgcccaccttggcttcccaaagtgctgggattacaggcatgagccaccatgctgggccaaccatttcttggtgtattcatgccaaacacttaagacactgctgtagcccaggcgcggtggctcacacctgtaatcccagcactttggaaggctgaggcgggcggatcacaaggtcacgagttcaaaactatcctggccaacacagtgaaaccccgtctctactaaaatacaaaaaaattagccgggtgtggtggtgcatgcctttagtcctagctattcaggaggctgaggcaggggaatcgcttgaacccgagaggcagaggttgcagtgagctgagatcgcaccactgcactccagcctggttacagagcaagactctgtctcaaacaaaacaaaacaaaacaaaaacacactactgtattttggatggatcaaacctccttaattttaatttctaatcctaaagtaaagagatgcaattgggggccttccatgtagaaagtggggtcaggaggccaagaaagggaatatgaatgtatatccaagtcactcaggaacttttatgcaggtgctagaaactttatgtcaaagtggccacaagattgtttaataggagacgaacgaatgtaactccatgtttactgctaraaaccaaagctttgtgtaaaatcttgaatttatggggcgggagggtaggaaagcctgtacctgtctgtttttttcctgatccttttccctcattcctgaactgcaggagactgagcccctttgggctttggtgaccccatcactggggtgtgtttatttgatggttgattttgctgtactgggtacttcctttcccattttctaatcattttttaacacaagctgactcttcccttcccttctcctttccctgggaaaatacaatgaataaataaagacttattggtackcaaactgtcatccccttgtcagatgtttttgcccttccgataactcccactttcttggattgggactcagaagtttttctgttcagccagtttgttaggaatgaatcttgaaagttcagtcctcttagcacctcattacagtggatttttgtttctagttaaggcctcttgtcctttccttggaagcttccacattcaagaggggattaggggcttggcatgcataagaatggggttgcctgtgccactggctgggatgaaaggatggggccatggcttggggcatgagaccctaataatactttgtcccctactcctcaaagccttttacaaatcttaattaattaaccgcttgcagcaccccaaggagagaaatgtgttgtggaactggggaaattgaggccagaggagattcactgactagctataaatgcaacattttctttgagccaaagtttgctagctttttaatgaacatcgagtttttttatatacatcacaagtcatcaagcaagaacactgaattttaaacatctattcccactaagggaaggaggattttaaaaaggaaaaaaaaaaaacttgattggaggcaaaccaagtatattaacaccgtgcaaggaaacagggaaactggtttaaatcctcaagcctgacattataagagtaagggtaagaagtttcataatctactccagggactttgtggctccttaattgtaccaaaagtcaaagctgacagtagaacctcatgaagcagcaaactactagtggacttcattaaattgtcttgctgcaaaatgaagtaacttggactgaaatttactccccaggctgcaaagcaggaaggatggaaaagctcaacactattcatttctactcatctctagggctttctttcatcatgttgctgtgttaaaataacccctttcattagaaagagtggaagacataatcaattagaaagtgccaataaaacatctcttccttgcctcatttctttaataatattgtaaaatgaaatgcgacaaaaaggttctttgacaattgtgaatttttattccactcaaaacataatactacataaagttgtattatgctttgcaagaaatactggttgtggccgggcgcggtggctcacgcctgtaattccagcactttggaaggtctaggcaggcagataacgaggtcaagagatcaaaaccatcctggccaaaatggtgaaaccctgtctctactaaaaatacaaaaattagccaggcttggtggcacgcgcctgtagtcccagctactcaggaggatgaagcaggagaaacgcttgaacccgggaggcggaggttgcagtgagccgagatcgcgccactgcactccagcctgggcgacatagccagactccgtctctaaataaataaataaataaataaataaataaaaataatactggttgtataagaatctgtaaagaattttttcctcctctttcaattttgagaaaattgaactacaaatttgttttgtgagcctagaattcttgcaaccctttttttcgtaaaggttcagtagagctaatgcccttaacttttctaccagggttaatttctgttattttcatttatgtactgccaaagcgagcacctttctgttattttagaagtcatgctttttttttttttcttttttcagacagagtttcgctcctgttgcccaggctggagtgcagtggcctgatcttggctcaccgcaacctccgcctcccgggttcaagcgattctcttgcctcaccctcccgagtaactgggataacaggcgcccgccaccacgcccggctcattttttgtatttttagtacagacggggtttcacgatgttggtcaggctggtctcaaactcctgacctcaggtgatccgttcgcctcggcctcccaaagtgctgggattacaggcgtgagccaccgcgcctggcctagaagtcattcttatggcagaaatctttctggccttaccccttctcttgagttcgttgggataggtcttgggaatccacaaatcctaaaatatgcgtgccttaagtcggcacaaaatagattaatattctgcgcgtctgtaagattggctgcggctagaaactccttcccagacgattaaatccactaaataaaatacgaaacggtaacgagataatttttaagagtatgcaccagtgctctaatgaagcccggttctgcggcattccaaggtaaggacgctgccttacccagtctctcagcagtcctaagctgccttcgacggccgagaagcgcctcgattcttgcccctggctcatttccctggcgcgttttccagacgcctccgctcccaacgctgggctcaaccctgtcttccccagctggtctcccagcacgtggcctggagcccagcctcccgccccgctcggtcacgtgagcctggctctcacccgcgccggcttccacaccccgcgggactgagaaccgccctcccactagctcgcaggcgcaggcgcagggcagggtcccctcagtttgggtgacggaaggggcgtgtcgcagcgcccaaagatgacgtgttctgccagcgccacgtcatgaggaagtgccggcccactgaagccgtggggacgcgcccagcggagctaatcaggtgccactgaactgaaggggtgaactagaggagaagagggtgactgggcggggagcagctgcgggagaagcaaagggacgactgagggaataatcaggagaccactgaggcgtgaagtactaggcgtgcgataactgaaggagttagtaactgggagcacagagttggaaacagcttaggggaagatggagaaggaagaaacggggaatgatcaagatgtgggcaccatgatgtggcaggaaaccgacttagatgttcagaagaagtcagtgcagatacggaggaaatgggaatgggaagaagtctgcaaagccaggagaaccgaggaaaggcttttgcctccagaggtcacattgcgttataaaactctgggtggtaaaagattataggcttagaccagtgtctttggattctaatgctggctgctctccatagtccatctgattccccagaagtcagttatagctcttcgcaaaccttggtgacttcttattttctttcttgtttatccaagattacctggctggtgtttgcttgttctggagtgatcttctgactggaaaagaactatgtcatggatcaaggaaggagagctgtcactttgggagcggttctgtgccaacatcataaaggtgagcaatggcccagagcaccggttggccttctggtcagttggataatcttatataaaaacctgttattaaagttgatgatgttaagtgcaattcatgatgttaagtggaatttagcaaggaaaccaaagagtcttagaatggtaacttccaggtctacatttctggtagacttttgtcctaactctgatattttctggaagcccaggcctcttaatgtcactgggcagcctagactgctaagtattctttatagagaactgaaatttgtttccctggaacattgatccattgttccatgtactgtcttcttgatttaaataggttaatctttgatatattctttgatctgtcagtagagctgggcccggtcactcacgcctgtaatcccagcaatttgggaggctgaggtgggcagattgtttgagctcaggagttgagaccagcctgggcaacatggcaaaaccccgattctccaaaaaattaaaaaaatagcagggcttggtggtgtgcacctgtagtcccagctactcggaaggctgaagtgggagaatttcttgagcccaggtcaaagctgcagtgagtcatgattgtgccaccacactccagcctgggtgacagaacgggactgtctcaaaaaaaagagttcagaacaagactctgtctcaaaaaaaaaaaaaaaaaaagagtttgggctctagacgcagacaaacatgggtgaaattcctgttcttttttttattttgagatggagtctcgctctgtcgcccaggctggagtgcaatggcgcaatcttggcttactgcaaccttcatctgccaagttcaagcaattctcttgccttagcctcccaagtagctggggttacaggcatatgctaccacacatggctaatttttatatttttagtagagatgggattctcatattggccaggctggtctcgaactcctgacctcaggtgatccacctatctcagcctcccaaagtgctgggattataggactgagccactgcacctggcctgaaagtccagttctatcatttagtaatcatgtgactttaacaactgtagaattatcatgagaatttatgagacattaatataaagcagttagcataatgtctagcagttcttaattattattaggattgtctttcagacatttgaagactattatctcctatcttccccaaatcttccctcagctttttctctaggaatcacagcaatattatatctgcctaagacaggtttgagattggggccagtcagcttggttttgtttttcaaccacaggctgtcaagcagcaggtagtaatgaatttatgagtcagtaacctttatacaagccccacacatgctcacaaacaaatgccaagtgatctcaagcagtccaggaaatgggaagtatctccttggggaaccactgcagtggtatgtttggaagaacaagctgcataacttgaatggattttgggggctggaaaggctgtatgtgagacagaagtagaaaaaggagaagtgttgatgaggaagcagtcagggaagagccctcccaggtgaggaaaaataggctaaggagtccatttgtgttatgggagacaactcaaagctgctccaagccaaataagggttttgttttttgtggtttcttttttgagatgcagtcttactctgttgcccaggctagagtgcagtggtgcagtcttggcttactgcaacctctgtctcctgggttcaagcgattctcccacctcagcctccccaagtagctgggattataggcaccggccaccatgcctggctaatttttttttttttttttttagtagagttggggtttcaccatgttggccaggctggtctcgaactcctggcctcaagtgatctgcccacctcagcctcctaaagtactgggattacaggcttgagccaccacgtccggccccaagtaagttttgtttggctcaaaaaaagtcttttttgtttgctttgaaaaacaatttttttttttcagacagagtctcactctgtcgcccaggctggagtgcagtggcacaatctcagctcactgtaccctctgcctccccggttcaaacaattctcctgcctcagcctcccgagtagctgggattacaggcgctcgccaccacgcccggctaatttttctttatttttagtagagacagggtttcaccattttggccaggctggtcttaaactcctgacctcgtgatccacccgcctcggcctcccaaagtgctgggattacaggcatgagccactgcgcccggctgaaaagcaaaattttaataaaaatcctgatgtttggttttcttgcaagatcaccagatccagcaatgttgtgccccagttcctgtgtgtcagcagttggctagaggtcaggaattagtgccttttttttttttttttttttttttgagacagagtcttactctgtcacccaggctggagtgcagtggtgctatctcggctcactgcaacctctgcctcccaggttcaagccattctcctgcttcagcttcctaagtagctgggattacaggctcccaccaccacacctggctaatttttgtttttgtttttttcttttttccgagatggagtcttgctctgtcgcccaggctgcagtgtggtggcgtgatcttggctcactgcaacctctgcctcccgggttcaagcagt

SEQ ID NO: 96685 - DNA, 395143 bp, Homo sapiens
  misc_feature (1)...(395143): n = A,T,C or G
gaacaagtcaataatcaaacatataattacaattgtgatcaagaatttgaaggttaagacagatgctctaagacagggaaataacctactttaaaggaggcctcttggagaagctgaaattcatgataaaaatggaggtgaaaggcagggcgcggtggctcacgcctgtaatcccagcactttgggaggccgaggtaggcggctcacgaggtcaggaggaggtcaggagtttgagaccaggctgaccaacgtggtaaaatcccatctctactaaaaatacaaaaattagccgggcgtggtggcgggtgcctgtaatcccagctactcgggaggctggggcaggagaatcgcttgaatctgggaggcagaggttgcagtgagccaagatcacgccactgcactccagcctgggcgacagggtgagactccatctcaaaaaataaaaataaaaataaatgaaaaggaggtgagaaggattaaggcaagcaaaatagataagaaaaatatttgggcacagaaaaaagtgagaatcaaagccgggcacagtggcagaaatggtatgtcttcacttagaaagggtatatatgtctagaaattcaataccagaattctttagcttcataggaatttctctgtgacataagaacaaaataaatatttttatgtcttcttttgtttctcggttgccaattatccataaacgttttggctaatacgcgttgaatgcgaaagtatgcctatataatgaagagggaatttttcagaggaagctagtgagttttccagaggttaggagacaatggcttttatgtttcatttgtagcagggaggaacttaagtgacctagaattttttacctttaaattttttccagtgtagaaacaaacttgtagtgcattctgtattgcttggggagaggaatatttcactttttctctgttgtataaacactttaagttctgcattggtgataaaatgaataatggtggtacaaatggaaagctatataactaattgtttgtcatacacataatcatcactgcaaaatgagctctgggaattccattctagtgaccaggaaatctctggtatgagcaaggactttttataatgttaccaagtatgttgggaattgaaatatttatatagattgtgtagtttttagaacttagagtgcgttagagaagagttaattctctatttaagatatttggtactgtagatagactatttaaaatctgatttgttccattaggttctccctttaagttcctgatttaattcagttaactggttctccctttaagttcctgatttaattcagttaactggttctccctttaagttcctgatttaattcagttaactgagaaatgtaattttaatttcttatttatttcactccttcagtaaacatttattgactgtcagctgtgagagtcttcatgctaaagcaagtgtctgcaccacgggattactgatattatgggctgaatcattcttgcttatggggcgcggtggtcgggggaggctgttgagcagcatccttgatgccagtaacattatccccctaccccactgtgacaaccaaaaatgtctccagacagtgtcatatgttccctggggagcaaaatcatcaccccagtccagaagcattggtgataatgggaaggagcagatgagagttggaggtgggggtgggaaggaggcaagagaagtggcacttggggtgggacacatgaatgcatttaagagacattacgaaaaaagaatagagaagtcttcgtgactggtaaattatagggactggggaagaggaaggagtaagcaacaacactggtttgggaaactggagggattgtagcgctcttactcaaagaaaaaacaaaagaagaacagatatgaaagaaaatatgagttcagttgcagagacattggatttgactggaggcatggtgttctctaggaagtaggttcaggagtcgagtgtgttggagtgaagtcaggactgagaggtggattttggagggcaaaagattagtaattgacactagggcaaaaaagtgtcattcacctgctagagaaatggatgagttggataattaagatgcaaactaattgttctattagagattctaaagcattccaccaaggttaagcagaaataaaaactaacaaaacagagcaaaacaccaagtatcagaaacatttcagtgtatcttatagtcaattaagagggtaaatgaggaggaagagagctggaagaagagagaaaaggaaatgaaatggaattctgacagacaggtaatcgtgaaggagaggaagattcatttagtatcttttttatttttatttctttgagacagaatctcactctgtcacccaggttggagtacagtggtgcgatctccgctcactgcaagctctgcttcccaggttcaagcgattctcctgcctcagcctccctagtagctgggactacaggtgcccgccaccacgcgaggctaattttttgtacttttagtagagacggggtttcaccgtgttagccaggatggtctcgatctcctgaccttgtgatctgcccgcttcggcctcccaaagtgctgggattacaggtgtgagccaccacgcctggccatttagtatttattaattgctatcaaccattacataatttaatttcaaaaaatctgggaaatgcatgtattcttttttttttttttgagatggagtcttgctctgtcgcccaggctggagtgcagtggcatgatcttggctcactggaaagctctgcctccatggttcatgccattctcctgccgcagcctccggagaagctgggactacaggcgcccgccaccacgcccggctagttttttttttgtatttttagtagagacggggtttcaccgtgttagccaggatggtctcgatctcctgaccttgtgatccgcccgcctcggcctcccaaagtgctgggattacaggcgtgagccaccgtgcccagccacgcatctattcttgtaacccactttcttcttcaacatttgagcatgaaaagtttcaaacagtccaggtgtagtagcttatgcctataatcctagcaatttgggaggcaaaggcaggaggatctcccgagcccaggagtttaagcccagcctgggcaacaaagggaaacctcatctccacaaaacaaattgaaaaattggctgggtatggtggtaaatgcctgtagtcctggctattcaggaggctgaggtgggaggatcacttgagcccaggagctctaggctgcatgagctgtgatcatattacagcagtctgtgacagaatgagaccgtctcaaaaaaaagagaaagtttcaaacatacagtaaagttgaaggcagctcccagtgaacacccatatatctaccatgtaaattatataattaacattttattatatttgttttatcacatatctgtccatgcatctgttaaagtatcttattttttgatgcagtttagaataagttgccaaaatcagtacacttaagccaactacatcagcatacatattctcagctagagttcaatatttgtttagagttttctaacctacttttactaattgaatttttaaagcccatatccaatttcctttgtgggaaaatgggtggtactttattttataaaaatagtttttgtgaccattttggaatgctaacactgaagacttttattgataattacactagaattactctagatacatcaatatagaggctggtcacttttgctgtttctcgtctgtgtcttgctaccaggatgtggccaggcgtgaggtaatatctctaattatctgttaaatctagttttgcaaccacagatatgatattcttacctgatcaaatggaattaaggttaggccatgtttcaggcatccttaggaatactaaatagctattaaataacaagaaccctttggcaaagctttgtagtttgcctttatgatatccttaccggtcccccaagagtaaactatgcagtgttttatgttataaaaaaattgtggtctaaatttgcaggttccagtattctttctgctgctatgtgatcttggacaaatctcttagcctctctgagcctgagctcatgctttaattatccttgagttaagagcacctatgtgtatttgatacccacacttgtgaatttcaaatgagcctttgcatgcaatagagatttgtcagctgtgacctgctgcacaactgtcactgtgaaaaaaaatcatcaattctttccctccctccttctttcccttcttttgtcttctgaacgtctagaatatagcacagaagaaaacaataaggaaatcagtagttcagaatcaaagacgttctgctaaagaaagagcaaaaatcaagattcaaagtacctcagcactcaaagaagcagaaaattctaatagctgcaggcaaattgtgccctctgaggagcctagattctagaaaaaaggagagagcagtcttgtgaaagaggtgaaacaaaggcttttcatgtactccggaattgcttggagactgggatataaccctggcaaagttattaaagttgatttctctaaagcatttactcgaaagggccacctaaggataactggctaactgcccttaaattacatttatttttaaaaacatagtttgaaaaaggttagtaaccaaagacttacaagaccaaccttttttaaaaaagaattttaaaggctggttcataatatgcaaaggaagactacacatttgcttgctacatttaagttgcacagtataatatatagcttttctccctcctctgggttattttgaaaatattaataagttggatgtctattccatattttcaaagtggttatcaatgacttttacttaaatacttgtaaaacttattaatgccactttaatctcagtttactgcttaaagctttagatatccatatttttttaaaaaaactattcttaaaaaataggtaactaaatttaataaataatgaaaacaatgacaaaatattcaatgaggaaaaatgtttatccccatattgtggccagaacgttaagaaacttttacaggacgaagtctgcctggaagggtttgcttgggaaagtggtagtttatagcataacatctgattttgtgtgtttgtgccaagggtgtttcctttctgtctttttcctttttataggcagccacaatagtgacatgtttaatattgatgagtttgacctcctgggagttatcgtatatgcaccctttttgaatacaaatgctgtttaatttatatggtaaacacatagaatttggagactagcattttaatcaacactaatctcagtattttctacttctcctacctctccttctgtcaacaacaacaaaaaaatcacaaaccaattttataaatgacagctaatgtcctctcctggagaagcagggtctgtgtgtgaaacataaaagcagcaccatgtgtagtaacctctcctaaaccatatgctcaagcacattaacagtgttcaattagatgatcaattattcaagaaacagaacaatccattcattcaacaaatatttattgaacagccatgcagaggcagacagggggttgtgtatgtggctgtgacccgatggcacctctaaactggaattgggcttcagtttttctccgtgtaaaaatttcttcttttttatttaacttttctcttggcaggtccagcagctttgaagatcagagtgcatcttccagctgacgatctcttcggtcggggacaatgcattcgattcgcacggtggagattaaagtccccgagatagaggaaacgtttttcgcgcccaggttcagcgaggagccgcgcgggggcagagggggcggcggcggcgggcgggaagccaggcccgagctgcgttctgcgcagccattggtgggcgccgcgctctgcactgagcatgttcgcgccccgccggcccctagccgcagccgcagccgcagcgacggcagccacgggagccgccgcgcattatgcaaagcggcggcagatgcgagcggggccagccgggcgcgcgtcggcctcccctcccagcggctccccccgccgccgcctgactctcccgggagactccctaggcccggacctggggccgaggagggccgggatggcctgagtgcccgcggcgcggcggcgcagcagcgggattgcaccatggggaaccaggatgggaagctgaagaggagcgcaggtgatgctttgcacgaaggcggcggtggcgccgaggatgcgctggggcccagggatgtggaagccacaaagaaggggagcgggggcaagaaggcgctaggcaagcacggcaaggggggagggggcggcggcggcggcggggagtcgggcaagaagaagagcaagtccgactccagagcctcggtgttttccaacctgcggatcaggaagaatctgtccaaggggaaaggcgccggcggctcccgcgaagatgtactggattcccaggccctgcagaccggggagctggacagcgctcactccctgctcaccaagactccagacctcagcctctcggcggacgaggccggcctgtcggataccgagtgtgcggacccttttgaggtgaccggtccagggggtcctgggcctgccgaggctagggtcgggggccggccgatcgccgaggatgtggaaactgcagcaggggcgcaggatggacaaaggaccagctcgggctcggacacggacatctatagcttccattcggctacggagcaagaggatttgctttcagacatccagcaggcgatccgcctgcagcagcagcagcagcagcagctccagctccagctccagcaacagcagcagcagcagcagctccagggcgccgaggagccygcagcgccccccactgccgtctcccctcagcccggggccttcctgggcctggaccggttcctgctggggccgagcggcggggctggggaggccccgggcagtccggacaccgagcaggcgctgtccgcgctctccgacctgcccgagagcctggccgccgagccccgggagccccagcaaccgccgtcccccggcggcctcccggtctccgaggcgcccagtctcccggcagcgcaacccgcggccaaagactcgccctcctccacggctttcccatttcccgaggccgggccgggggaggaagcggccggagcccccgtgcgaggggctggggacacggatgaggagggtgaggaggatgcttttgaggatgcgccccggggctctccgggggaggagtgggccccggaggtgggagaggacgccccgcagaggctgggggaagagccggaggaggaggcgcaaggacctgacgcccccgcggccgcttccctgcccggcagccccgcgcctagccagcgctgtttcaagccctacccgctcatcaccccctgctacatcaagaccaccacccggcagctcagctcgcccaatcactccccgtctcagtcccctaatcagagccccaggatcaagaggcggccggaaccctccctgagccgagggtccagaactgccctggcctccgtagccgccccggccaagaagcaccgggcagacggcggccttgcggccggcctgagccgctcggctgactggacggaggagctaggcgcccgcacgccccgggtgggaggctccgcgcacctgctggagcgcggggtggcgagtgacagcggcggtggggtgtccccagcactggccgccaaggcgtctggggcccccgcggctgcggatggcttccagaacgtgttcacaggtgagcgcgccctgctgctggcctccgggtctcaagtcgcctgtcagtcagggccttcccctgccacccgccctccctgggctctggaaggcggtgacctggtagtggcacatctcttctccgtagggaatccttttccgcccagcgagctcaccccccacggtgaaatgacttggacatacttgttggttttctgtgttcttacaagatcttaaagggaacaacttagttgtgtctgtcctaagttgctctgcccatttcaccaaaatacctgctattcacaaagtttcgggtcacgccagggagataaactcctttttcgtctcgttagctaaaccatcattcttctctttcatttttcatcaccacagcattaaaaagaaaaaaaattgttcatggttctttcgcaagagtcggttttggaggcacaaatcatttattccggtacgatccaaaggcagtctctgaccgctctcatagctgtgtgtatttgtccacgtttggtatgtatgtgatatgtagtttctatcttgcagcagtctgggttccgctgcttagtgaagttaagcggtcactcactgctgtttgctgctgcaagaaaatccgatacatgctattagaaaattaataaataaatagaatagtagggataattttcattcagtttcatggtccagcccagaacagcctgtagtttggagacagtgaaggtggaaaggtcaaaagcacgtctagtccaactggtacctcccctccctagcatatgttatagactcatacccagggcggcataaagcacagccagagtatgtttgctctggtcagtgtcaagcagtccaatgagtttatcctagcttacaggcttacagggcccaaggccttaccttaagagcccaacatgtttacctaacctctattcttaattattaaatgaaatagagtgttagaatttaatgaatcgaaaaatatgaaaagttacatgactactgataggtttatgataaatatttgaaggattaaacatttcaaatgcaatctgaaaattttaaaatcttatgttctattattttaataaatacattatctgtaaaacattgcttagatgaaatttctcggcacagacagcgacttcttagttgactaaatgctggtaatattggggtagctacttttattgaccacattttaattttcatctgtgggccaccttttattttgcccttatagggtcttacccttaaaagtagcttcttccattcatttcacatactcttatttttcttcttttccaccttctctttattgtgtagattgttaaaaagaatgtttgtagttttatacccactagataaattgtaaaaaaacaaaaacaaaatgcaaaacaaataaaaaagaaagatcacttttgatagaagaagattggaaagtttttgcattaatttttgtgaatttaatgttggtaagaaatcacatattttctctttatctaagtgacattcatgtatatagtttttgaaaagtgaaaataattcaccataatgattatcaatcattaatattaatgatagctattcctactagcataagactttggaaatttatttatttcattcatttagcaaatatatatatgtatatacatttgtaagcatatatgtgcatacacacacacacacacacacacacacacacattgagcagccacattgtgctaggcagtattctaaatagtagcacactgtgctaggcagtattctagatgtaggtgatacatagaccattaaatcatgattttgcctttctaaggctcgctgactagtgaggaggagacatgacataagtgcagtgcacagaaatatctgtatagatatagacatgcaaatcactgctgggaacatcacggatgcagtggcttatctgcttggtggcaaggggtgagggaagaggacttgagagaggaggattgaacagagtcctggaagatcacaagaccctaaataggttgaatgtttgttttcctttaaaaaaacaagtgtcttcttggaacttgcattttagtttaatttgctaagtattcccaaatttgaaatttgggactcttaaaagagtcctgtataggaaccacctgggttttgttgacctctccaggtgatttgttttttaaattgtgcaaagtaaaattgcagagctagtcgtttttataaggacatcacctattttgtatttgatggttggatacagctggttggtaatcagcaaatatatttttgtgtagcagcttccgtatgtttatgtcattcactcagcattgttcaggaaaagaggatcagtaggttttacctaactttgtaactggtgggaaaatgtagatagagaaagaggtgaaataactttctcaaggtcacactgtgattcattcagaggcagatccagaaatagaaactgagtcaatgaatcaagtctaatgtcattattatttctgtttggatatacaatgttttaaggccatatagagagtaaaaactgtttataaaaaatgtgatcagatttagggcctttctttaattagattttccagttcctgtttttaataaggtgtcctcctttaatggttgaacatctggccttccttgagctggatgaagggtgattgttggccagagtgaaccagattttctctaagcagctctcatggaaactgttcttatggtggtcaaatgaatccagattgacacaggcccttgtgtctcagctgtcaactcttcatgtcatctgccactaygtttgcttctttactctcctctgctatttttttacgggtgtcttggaaattaccagaggcttggggaacactggcattgtccttagggaaatttctttttggccttaattttgcatgtatttggatcaattaattgccagctgcctttgaagcaggtgatcattatatctataagcttccataagcatcttttatttttaaaccatagaatgagggttgtcagcattacaggaagaaacagatgtttttcgctttttaccgccttccaaatgtagggagaaaatacaagtgaaaagggatttctatggcacatgtctgtgtctctttggtagatctaaaaacatttagcaatgagggagaccaaactttatcttgttttagctattaagaaactgatgatgccttaggccattgcatttaagtatttcataattaatgtgtttgaaatacatctttttcagtgtttagtagaaaaaatggcgtctgaaattcgggaggttcctttacatattaagtataacagaagcttggtactggagttttgcagttaattaaagtttagatatccaacgtgttaaatttgtgatgctaaatcgcttttgataggaatctttcccaagtcaattatgtgcttatctttttttttaaacacatggaataaaagtttaatctgttttaaagggcttaatgtcatcttcaggcacatcattgttacatcttataaaaacattagtgatgtcctcaacagctattgaagtgtgtgggctgttggcttcagtctgtagtttctgagtttttgtgtctgtgtagtttcttgattgttttcttgctgccagctatttattgttatagctgccttttttttttttttttgagacagagtctcgctctgttgcccaggctggagtgcagtggcacgacttctgctcactgcaagctccgcctcctgagttcacgccattctcctgcctcagcctcctgagtagctgggactacaggcgcccaccaccatgcccagctaattttttgtatttttagtacagacggggtttcmccgtgttagccaggatggtcttgatctcctgacctcgtgatccgcccgcctcggccgcccaaagtgctgggattacaggcgtgagccaccgcgcccggctatagctgtctttagtctctttgctcctgtccctcaatttttttgtaatttgacttttctgatcaatttgcaattggcttacaattcctgtaattatgatattggttacacttattrtacttctaagtgccagactctgttggtgcattacataactatctgtaatccttaacaacagtcttgaggtgtagctgtttatcctcatttttcgaatgaaaaaacccaggctcagacagtaaagtaacttcttgtctaagggcattaagctagtaagtggcccatccaggatatgtccttagaaaaccaaatctgttgttaatatgtataagatgaaaccaagtagatcattgagcttttggaggactagctaattaataaagtgcataggctctagaacttggattgtgcaactctgattttggcctttctaaaggttatcttgaattttttttttttttttttttggagacagatttcactcttgtcgccaaggctggaatgaagtggcgtgatcttggctcactgcaacctccgcccactgggttcaagcaattctcctgcctcagcttccagagtagctgggattataggcgcccatgaccacacccagctaatttttgtatttttagtagagacaggatttcaccatgtaggccaggctggtcttgagctcctgacctcaggtgttctatctgccttggcctccccaagtgctaggaggcctatcttgatttttatatcagtagagggaagaacccactctaggagtacacattttctcatacggcttggtaaattgctacattggatttttttaaggccaggagtagtttgatttccagcagagcccctgacagagtatagatgtccagttaatgtctgacgaatgaaggtcagaatctgcctgatacgtataaaatgtcttattataaaaggaaaggggtttatatgaatgctatgctttcccctaaatactgccttactgggttccatatatcagagaagaatttggcgatgtaagcggggaccagaacactgatcttcaatcattttagatgggtctgaaacatcctttctcatggtttctttaggcctgtggtttggattgaagtcaagtgcaccagtagcttcagggatgggttttaatgactgctttatgagttgaggatgggcctagttttaagagctttaggcgtttggatataagccatgcgtatttgaaatggagcaggtacttttagtgcttttccttctgattcttctgaaaagatacagaaaatatacagttggatgaaggtagcagtagttattctaactacgtttattctaggtatatttgcaatcctagttttgctgtttagctaagtgagtctccagtaatttttcctcatatctatgaaggtagaagaataatttcaaattaatactattaagatgaaatgaaatagcatacataaagcccctacaattctgcctggtacatgagaggcacttaactggggctatttgctctcctgactggatttattatcttaaaaaaaaagtcattgttcaaagtgatcagagccaaatttgttaaaacaaccctgaaattgtatacaaaacttagcaggatatgaactgaccagatactagttgagccccagttttgttttgttttgtttttttttgcaaattgtttatgtattattttttcttttttttttctggaattgtaagcattttgtcacttatcagatattctgtggyggggggttggataagaaaagcatatgatggggtgtggctgtaagatttgggggagggtgctgctttccaaagaaggggtgggaagaggaggcggtagctgacaccctcagtgtttctgctctgcacagcatctggctgcaaacccctgactttgcagctttaccttcccacggtctccttcataaatgctctactttacactgttttatgaacatgcatttcattttcccgactttgtgcctttgtcttgcagctttaccctcttggaatacatgattcgtctcttttgctttagcatttgaaaagtgctgattgaattccgtttcctctttgtatcttttccagccagaccttactggctgtcatctcactttctctgtactttactgtctagatcatattatatatgcttcttggatttagggattcttctggtcttctttcttgccaccctctgcctttccttcctccttgcctgttcacccgattccatccatccatcatctcctctcctactaatctgtccacagatatctcttccgtgccttgctctgtgcctgtcaatatgtgtaaagcaccgactgtactgaggtcttgatgaatacttgctcattcaccatttttggcagtgatatagacaagttgagtatccaggcttcctactggcaattaaaactagttgaattgaagctggaaaattgctaacctttctgggcagtcaaaattaattattttcaatgaggtgtgattgaatcaatgatactttatagaacttatgttgatagaagaatagctattcttgtttctgcaggttaatgttaaaatagtaatgacattacagcaactgagcttccaaatataaatgttattgtaatgaaagaagaggtaaagggaatagagaaaattgtattcctctgttcattcctgttttgtattctaagtactaacctaatgctaataaaagttagcattaaggaaccattaggaagaaacaaaaatgtactgcctgtgacttgatagttattagatatcattttagtgacagtagaaactttctaaggcttttttatcttaaaatatatggaaaatatgacctcagtcagttcggaatggtagtaaagcaaggtagtcataacatcaaaattctaagaatgagtaacaattatttctggatgctataataagatgctaaccacactagagatttattatccttttgatacctactgctccactatgggtgagaaggagggaagaatttatgtcttcttcctttgtaaagatgtacttggaagtgttgattggataggaaaattactgcctctattctgtgatccagtcaggctccaacctaccaggaacccactggaagctttattatctgttaccctagagctgcaatggactgaaaacagtcctattgttttcaggaggaatggaatactttcttgagaaaatcaagcctatattatgtttcaaaattatgcttaaaaaggcttaggcactactcagttgagtctttttttgtacttcatgcagaagggttctttgttgtagtacctggtgatagagtggacacatacaggaagaaattctgtgtcatttaaatggttgttttaggtacgcaggaggggaaagaatgtgtttcagtaagctagtgtcagcactatgggaagagtgcaggctgagaacaatctatttcccttttccgttttaccaccagcttcctattagggcacaaggcaatcatttcttgcctcttgttaataccctggcttcccagattggaagagtgaatgcaatcttgctgggaagcgtcttccttcaagtcaatttcagcactgtggttctatagatatggtgattccagcaggtaccttttctccctaatagggatgctctgtgtatttagagctttcctttattggtagagctgaagaaaattcctatgccggaagacccgtttataccacggagtaattgatggtgagagtggtgatgttttgactttgatagttttgatcaatttttgattcatgctgaaggagatttgcattggttagactgtcattatctgacaataggaccgtgtgtgtgtgtgtgtatgtgtgtgtgtgcctgtgtgtctgtgttgtgtgtgtgtgtgtttgagacagggtcatgctctgccacccaagcgggagcgcagtggtgtgctcatggctcactgcagcctcaaactcctggtcccaagcaatcctcccacctcagcacctcagcttccagaatagctgggaccacaggcgtgagccactatgcctggctaattttttttttttttttttggagagacagggtctcactatgttacccaggctggtctcgatagggccttgtgtttttgaacactgatataatgattatgtatgatggttgatcgtgtgttatgaaaatgtatgaaatggaaagctatgttatataatgtatggctcgaagatttagaatatatgaaggctttctaatattggcacaaaatatactgagtcattacttttagtttcattatctgcaatgtaagtcatctcttgttcttggatggattgtaggctttgaatttttcattatagtttaaactgctcaataaaagcagtactattaattctcttacttcaatatactttaatatattggtttttgttatgttttcagtttttcctactattgaatatgcttactgaaatactttttatgagtctgtggtattccatttagaagtgtgcattgatattaaaaatttcttagaaactagaaggttaaaaggtgttgagaggtcctaggttttttactttaaaaagaaaaaagttccattggccttaaacaagtacagcttgtttgagcccattaaggactagaatagaactatttcaggatcccaaataaatgcatttgaatactctgtggagagttttgtaaggatgctcttcattattgagatacaaggtttatcttttaaaagtataataaaagaaatgaggtaacaatagggataatctttgaaactcattttttaacctatatacttgtagataattggcttctttttcttatagaccaatacttgcctgtttggagagggtaagttatgtgagctctctgtgggaagtgttacattttgcagctaaccaaaatgttcttctataagccaattatatcttctgtccttttggtgctattttggttaaatggctttggggatataaaatgtgtggatggtatccttgcagtttctttcagggtatagggattgatctgtctctgttcaatttttagaaaaatccagaagtatgttgactctgttggattcaatattttggggataggcagagagggttgtataagaactgcagtgatttaagtggagaaagtggagagacatttgactgggctgacaacgtgatatcagtaaaaaggtgatcctttaattttttttttttttttttgagacagggtctcactctgtcacccaggctggaatacagtggcgccatcttggcttactgcaacctctgcctcccaggttcaagagattctttcacctcagcctcccgagtagctgggactataggcacatgccaccacacccggccgatttttgcatttttttgtagagacggggtttcaccatgttggccaggttgatctcgaactcctgacctcaggtgacccgcctgtctcggcctcccaaaatgctgggatttcaggcatgagccactgctcctggccaatgcctttaataacttggattatttctctaaggagactcatttgactctaaattcacagatcattttcatatcatctgcttttggataataaaagctaggcatgtggctttagctttagcttgaggctaagcccttaaggttgagcccctgatttccttttgtatgtgtgcttttgtctttgtcagttaccaatagactgctagagttgtgtctgcagtttctgtgtttctctggacctcagacatatctcacttagacatcacaagcctaggatattcaccgtgtctaaaactatacttactattttacccaccctcttaacaccctccttctgggtttcccaaacaaggcattgccgtctagctttgccatattcttggattcctccatccttctcatacttcacacccagttaatctttccattttctcttttcttttcctaagtatctctttaaaatgtcttccaatttctgtttccattatctctacccttcctagtttaaatccctatcaacagcctcctcaacattcttttgtccacaacctgcgtttctccactccattctgcatgaagcaagagagtaaatgacttaacatacaaacttgaatgggttccggtatagaaacatgtcattggtcccctatcaccctgaggctattgagtttaaattctttactatgtacatattaaatatattaatatagacattattattatttttttttgtgacggagtcttgctctatccccaggctggagtgcagtggtgcgatctcggctcactgcaagctccgcctcccaggttcacgccattctcctgcctcagcctcccgagtagctgggactacaggcgcccgccacctcgcctggctaatcttttttgtatttttagtagagacgaggtttcaccgtgttagccaggatggtctcgatctcctgacctcgtgatccgcccgcctcagcctcccaaagagctgggattacaggcgtgagccaccgtgcccagccgacattatgttatatagcatatataagctatatattatatataatagacattatatatattttaatatgtattaatatttaatctctgtagttttgtcacctcattgttcaggatctactattcctcacctcgtcctaagtgcttcagtcatttttcagatagctcatgctctctctggtaattttaggtattattaacactttttcttcctggtcctcagagaaaaaaagaatccatgtagttgtattcatgagaatccagtctgtgacacactcgcatcatcagtccaggcaaaactcgttttgtccttatcatactccctgcattttcacttcccattccgaagcctctagtagacatacagaactgcttttatctattgctctctttgaattagtctgcatttttctaaagtatatagtatttctgtttatgtttggtttatacaaatactctgagttgcagacctcattctgtttcttaaaaagaacaaaacaaaactcaaccacctttggaaaaaaatctacgaacttttctgggtgaatttccaccttgttttttgcttcccactgttatatactattcctaagaatgaaagtcctgctgggttgttcaacaccagggtcaccattcaccttttattgtgtgtgagtaatgttcccctagagctgttcaatgtggtgtctctgggcacattccctagattttatttaaacatgagcatggtgataaacatctagattcctgtacttctcggccaccagagaaaacagtctgatgaatatttccatacagggagctatgggagaacttctctgggatatacatttggaagtggaattgtcaggtcattaaataaaaggttttatttgagtaggtactgtcagattagtttccagaatgctttcctagtttatgcttcctttttttttttttttttttttttttgagaccgagtctcactctgtcgcccaggctggagtgccgtggcgtgatctcggctgactacagcctcaacctcctgggttcaagtgatcctcctacctcagcctcctgagtagctgggattacaggcgcccaccaccatgcccggctaatttttgtatctttggtagagattgggtttcaccatattggccaggctggtcttgaactcctggcctcaagtgatccactcacctcggcctcccagagtgtgggagttacaggtgtgagccactgcacccggcctccatataaatttagaataaaattagaataggttgttgagtttcttaaaaaatcctgaagttgtttgattgagattttagtcaattcatagattaaattgaggactgtttccacttttgtaatatcattttatctgagaatgtgaaagatctcttcatttattcagatcatcttttattcattttaatagagtttagacttttctccataaagagtttgtgtttcctttgctgaactatttcctgatgcttcatatattttattactaatgggaatgggatcttactttagttttatttctagttgattattgttaaggtaaagaaatgttttcagtatctatcaggtataaatactgtatgatttcctttatgaacgttatttaaatgtaaagtttatttagtaaaatctatagcttacagttatatgagattttaaaggtagtgcttttttttacagcaaataattgaaatataatcatagaacagtatacattgtgtagattcttttggaattattgtggctttccttttagcattaaatatggtaagtttttgtggatttccatacactttttggggagccatattcctaaaacccagaaacattattaatgttttaatttagtacgttgtgtcttacattgaacattaataaaaatctcactaattatttaaaatacttcaaaagcataatttaaacaactctatagtattttatccaatcagaacaccattcatccccgagtatccattgcatactttttcttagattgccttctgccttttgggatgccttttagacaccttcatatgaacttcttccacctataactcttcctaattaaatgatgctttctccccaggcttcatatgtagtctgtgttaacatccaccctgagtagtctatgaaacatccaacatttccctgcatgttgataaatcatatttctagctcagatctctcttgtgaatttcaggtgccaatttcatattgtcttttaaacatctttatatagatacgggaatagtttcaaactgaactcatcttttctccaaacccaacctgctcccttatgtattattggattcctggtagataataccatctaacaaagctctttacccagtttcttaagccagaaatttggaagtgcaagttagccaagctatgccactcttcctcctccttatatttaattagtctctacatcctgttaaaatatacctccaaaaatatgtttttaaatactcatcccctcctttccaggaggatttttttttctttttttttgagacagagtttttgctcttgttgctaggctggagtgcaatggcgcgatcttgctcactgcaacctccgcctcctgggttcaagcaattctcctgcctcagccttccaagtagctaggatttcaggcgcccaccaccacgcccagctaatttttgtgtttttagtagagacgaggtttcaccatgttggccaggctggtctctaactcctgacctaaggtgatctgcccgcctcagcctcccaaagtgccggttttacaggcatgagccaccatgcccggccttttccaggaggatttttaatgccactctccaaattttccagtagctttccattgactgtaggaacacaattgaaacctcagatttatattcaagcagaagactgaatgtgttcaggatgaaggagctagatgtgatagcagtttgtatgattcaagtcagcataagggaagccatcccttacagaatgtccagtgttggcatgcgtggtcttgagaagagcaatttcatcatcactggagatgttaaaatagagactgagtgaagatcaaatggggtggtcgtagccctggagaggctgaatttgaccactgatattctttccagctcggagagtcaatgatgtatgacttgaaaagtaagagcagcagctgtggtctgtgtgactcattccttttatttgagactgctttaaatatttatttaaaactcttcaaccaagtgattttagaagctgccatttattagagtcacttttatggatttaacttaatagatacaacaattaaattaaaaaaacatttttcttttgtctttctatagtttttcccttttaatcttgatttatttcatgaccttttaaaaaaataccaggaaattcataacctgtcataggtcctgaaaagtggttggtagttatcatcatatgtgttctatgatattcttttttcaacttcattagatttattagattaaatttctctatttatttttgtcattttcagcctttggtaaattgaagttggatagtgtctttttctctcttccccaggaaaaaaaatcccttgatgctagtcaaattgaactttatataaattttaatagacatgtagtaccgagaactctctataacaaagtcactttttgaatactctcagtatgatgtttttgctataattgatgtggaacacatcttttaatacccttctcaatatccctagtgtcaagtaacataaatgcatcaaacgtgcacctcagttcaccacagagaacagtcaacttcttcaaaacaattatgaagacacattgtaggcacttgttcttgaagactaagaggatcttcctgtaagagtgtctaaatcaaaggtgtacctggattcagtgaattwtgattcctccaggggtagtagagtttcactctgctttatgttggtccaaatccctttattagccatggtcatctttgcagatgagggcagggagttcatcatccttgtgtgttttgtgacttgttttccttaatggtttgtctagctattggatttcacgtttgttttctttctttgagacaaccctagatatttatccttgtagcagtcttctttttactataaaacctgcagcattttggacctaaaactagacatggtaatttctatttgatcataaatggccctccttattttttttcttatttggcaagtataagccgttagtatgtgagatacagaatatgtgatatctctgtattcagtgacatcataaacttaagcaattatcattaatgtcttataatagatttgcttgtcaacatccttatttcctcctaatatttcaattgatagataacatgggatatcagggaagtttattagatagttatgtctgagctataaggtcagagaaaaatttaacgtgacaagacatctgttttaattctcattttgcataagatatagtggcctggaagaaacagaaacctgtgttgacaccttttaaaatacagcaactgtcttgttcatccttctaccattaaaaaatgcacagaaggggcctggtgcagtgacttacacctgtaatcccagcactttgggaggccraggcagatggatcatctgaggtcaggagttcaagatcagcctggccaacatggtgaaaccctgtctctactaccaatacaaaaattagcctggcgtggtggcgagagcctgtaatcccagctactcaggaggctgaggcaggagaatcacttgaacccaggagatggaggttgcagtgagccgagatcctgccattgcactccagcctgggcaacagagcgagactctgtctcaaaaacaccccaaaaaacccaaaaaacccacatgcacacaaggaaaaaatatcagtgacatatttgtaggctattaaaatataagtttcaaacagatgattaaaattgaatgctatcataggacataaaactcagtacaaaacttacacttagccctctcatgtatataaccttagacatatgactcaagtatttgggccttgatttctttacagtggaattagtggtttgaacgaaatgatctctaagatttcttctggctctaacatactgmagatgaacatactgaagtggattgtcactgagtcacttgatcgtcctcatgacaatgattagtctttggaatgagtaaaaccagaaaggttacatgcaccatcaagggtattgggagaagagcatctcctactgtctgtcatcaaagcttctattcctgtttggacactttcttgtctcagtaaaatgggagactctccctgctctatgttgaactcactgaacctatgtacacccttcatttagatactcttgcaggaagatcctctcagtcttcaagaaaaagtgcctacagtgtgtctttaatattgttttgaagaagttggctgttctctgtggtgaactgagacgcacatttgatgcattcgtattacttgacactagaaatattgagaagggtattaaaagatgtgttycacatcaattatagcaaatacatcatcctgagacactgactctccctgcggtatgttgtcagcagttagcaaccagcctgtactctgcatctcttctacaagagtatgccagctacatcatcttattgtattattattactattattattattagttaagggcagggagcatgttttcttcagcttgtcttcctctagtaggcctaggacattctttgggatatgacggactcctaagtgcttggttatatcttatctttgctcctccccaacctcccagttccactaaggatgtttaattaaggcagtgtgttctacacagactgcttttaaaatgttccttcttgggctttggttgttgtaagtaggttgttagcccctgcagggcacagaccgcatggtctgtttcttttatatccgaatgcagaaagttggtcagaagcttttcccagagttgctggctgagtcagaagtagaagatccctggaataaaaatgaggagagcagagtgtgcctccagttttggcactgccactttctaatcttatgacttcgggcagactctagaaccttttcattcctcagtttctttgaagttgtgatgataaatcctgctctgcctacttcacagagctgacagtagatgcagaaatgccttttacattgtatagccctgttcaaataaaatactttttactttttatagtgtcaatggtcacaggcccaataaaaccctagtgcaaggagagttgattttacttcttcattgtgcaagaggattgcaacatttgttctgatggtgaataaaaacttaccccctaactgcggtgtccatgtttatctaggcttgtgagttttgcttctcaaggtaagaggagtatttatagctagtgtatgactgcaaagctgattctacaagcttcacttttgattagctacagtgtggaagaatatgtgggaagagcgtgaggggattagtacagcaataattggagaacattaatgattaataagtccccgactctcatttaatgaatattatttttgatgtgaatttaataaatatagtaaaacaaatatgcaagccctttttttaaaaaaaaattgaggctaggaattctagcaagcagtgtcttaaatattaccttgttgttaaaatctactaaatttaaggaaaaaaacccaaaacttggtggatgaagatatttgaatctgtgattaccttgcctattaccgtactatttcaaatgcttttagatccaacttatgatttccttcttttaagttgaaccaacatttttaatcacatttacaagtagagagtatttgaagtatatcttgatcataataataacaggtaacatttattgggtactgttaagcctgttacaaaaattgtttcatttaattttcacagtaatcctcggaggtaatgaggatgattatttccaatttctagatgaggaaacaggattaccaggggttatgtaacctgtctaaggccatacctagcataatggaggcatcagtgttatcggaaaggggtcccaatccagaccctaagagagggttcttggatcttgtacgagaaagaattcagggcaagtccttagagtaaagtgaaagcaactttattaagaaagtaaaggaataaagaaaggctactccatagacagagcagccccgagggctgctggttgcccatttttatggttatttcttgatgatatgctaaacaaggggtgaattatccatgcctccccttctttgaccatataggggaactccctgatgttgccatggcatctgtaaactgtcatggcactggtgggagtgtaacatgaggatgaccagaggtcactctggtcaccgtcttggttttagtgggttttagccggcttctttactgcaatctgtcttatcagccttatcagcaaggtctttatgacctgtatcttgtgctgacctcctactcatcctgtgactaagaatttcttaacctcctgggaatgcatcccagtaggtctcggtctcattttacccagcctctattcaagatggagtcactctggttcaaacgcctctgacatcgggattgagatccaggaagtagcttctgttgcttaagctatggctgcaatcccatgcctccccacatgggtgtacttcatgaagtcaaggtacagagtccacgtgttttcaggggaaaggaataggcagaaaataaggaacactttccatcctataaaagaatgagagaattcttcatggttatactattctagatttcttcagttctgcataattaggtatataatatgtaatatgtgtgatcaatgacatgggcctttcctagataaagataacgtgacctttgacaagacacctaacatccttaggcctgcattttcttttttttttttttttgagacggagtctcactctgtcaccagctagagtgcagtggtgtgatctcggctcactgcaacctccacctcctgggttcaagtgcgcctcctgcctcagcctcccgagtagctgggactacaggcacgcaccaccacacccagctaatttttgtatttttagtagagaccgggtttcaccctgttggccaggttggtctcgatctcttgacctcatgatctgcctgcctcggcctcccaaagtgctgggattacaggcgtgagccactgcatctggacaggcctgcattttctagttcagaaaatgatattagaggctgggtttgaaggacaggaagatggcccctcccactgagtcttttatttgggtggagggaggaaagggagcagaaagagcccaagaaactttgcccgtctcctgcccttatctttatagagttataaatttctcagaaactagcatttatatacttataaagtttatagcaatctgtgctatagagatgattttatcagcttttgagaattttctccacttgcagtgttgctgcacctgctgggggtgtgttctctaggcagtgtcagagcctaactcttcctttatggggattgcacttgcgttttcctgataagtgaccctgggacagtgtgtgcttctgaaggcctccctggctgaccctgtggtccgggccctagggactgaccttctagctggcaccagctcctgctgtgaaatggctgctgcccacaggcagtgttttgtgagctgttcattcagcagatagatttttggcaaattgacttagtgctgttttgcaaagagtaggagctcaggaaatatggttgaataaataaacgtaagcaaatatgaagtaaaatgcaggcttgaatagctggacacttgaaaaagttaaaattactctagggccaatgattttcatttattggtgtggttgacatgtctgtctaggaacagtgatttgaccaaggagtagagtgaggggactgggggataccttgactgggggatactgtggtcatggggtgtgaaagcccgtgtcagagggaaccgggaagcctctggttcctggccccagccagccagtttgcacagttaagaagtaagattgtggccgggcacggtggtgcgcacctgtaatcccagcactttgggaggccgaggtgggcggattgcctgaggtcaggagatcgagaccatcctggctaacatggtgaaaccccatctctactaaaaatacaaaaattggccaggcatagtggcacacgcctatggtcccagctactcgggaggcaggagaatcgcttgaaccggggaggcagaggtcgcagtgagccgagatcacgacactgcactccagcctgggggacagagcaagactccgtctcaaaaaaaaaaaaaaaaaaaaaataaggttgtgtttaaggcttcagggcagtccattctccctagtttagattcaaggcatcctaatcctatttagtaggtgagtgtctcctgattaaattctcaattatcaaatgcaggaagagaaataaaagttcatgtctctgtccactccccctgacctggttggtcaaattacattccttgaacagaaaaggagttcagtatagtccagctggagtgtgtgtcctggaaataacaaaaactgtttgccttcccaccacagcgattttgactctttaataaactgtgttcgtatctcttggttttgcaaaatcaggaacatgctttgtttagttttgtgatcttgaattttcacatgatttttgtgtcacatatttctgtgtaagtaaatgtttttaatagtgtgatttaagatattttattgtgaaagtggaatatacacactcagagaattacaatgaattcccatgaatccattactcagcttcagtaatcatcaatattttcaatgccataatagttttatcaaccctttttttccacttctaccccatgccacctacttttttgtgaaataatttaaaacaagctccagacatcatgttattttaatatcaaatatgtatctcaaaaatggacttttaaagtatgctacaatgtcattctttatattgaaagcaaatagagtaagttgttcaatattacctggtaactagtccatcctcagaactctctgatactctagaatggatgctaggtgcaatctgacagttgaattggttcatgctgagttctcctttcttttgttccagaggctgggggacagcaggaaagctcgatgggggatgctgtgtactttatgatcacccccagcaggggcccaccatgtctggctttctcagttgtcctgaagctgtgaatgatccctgggtttggggctgacagcttgatcctttctttgcaagagtttcaattgaccttttctctaatggattttccatccacttgctgttctttaagtgaacccattatttcattagggattgcaaaatggtgattttctaattatatcatttgttttttttttttttttttgagacagagtctcacactctgtcgccagactggagtgcaatggcgagatttcagctcactgcaacctccgcttcccaagttcaggtgattctcctgcctcaacttccagagcagctggaactacaggcatgctccaccatgcccagctaatttttgtatttttagtagagatggggtttcaccatgttggccaggatggtctcgatctcttgaccttgtgatctgcccacctcggcctcccaaagtgctgggattacaggcgtgagccaccgcgcccggccaattctatcattccttttgcacattttggctggaatttttctgtattgaagactttattcactaggtatggttgttaccctgaaatacagttctttctagaaaggcagcataaatgcctcattatttcctattctgttatcagtgccctagcattcttcagtgatagctgatgttttatttttctggtttctttaaatatatttaatatgtttaaatcaattaagtgattattctttctgtaatagcatggcttttaatggctgtatagttagcagtcatgtgtataaagctatctttttttatttatgtctgtattgttggacattttagttcctttgaattttggtactattaataatctatttgttatagtaccaggaactgtgataaatacttgacatgcattatctcatttagtcatcataatactcccatgatgcatcactctgaggatacctctgaatatttacctagaatagcttttataaagttgaatttctgggtcaaaggggtgaatttttaaagatcactgacacacattgccaaattgccccttaaagctttccttgtcggtgctgatgcccacttctgggttttgggataccttgagttcaggttgagggacactggaggaacaaaactggtaaacctgctggtttggtggttctttgaattctcatctttttccccagtcctcctgctattacaatacagtcttgtcacagagccaaccccaaaactggggttctgcctgggagaaaacatgggttcttggcttccctcaggaagcaattcaagagggaaccacagagcaaagggaaagcaagtttattaagaaagtaaaagaataaaagggtggctaccccataggcggagcagccctgagggcttctgactggctatttttatggctatttcttgatcatatgctaaacaaggggtggattactcgtgagtttttttggaaaatgacaggagattcccagaattgagggcccctcccccttaaagaacatacagggcaacttcctgaggttgccattgtatttgtaaactgtcctggcgctggcgggtccatgctaacgattcctttagtatgctaatgattatctttggcatataatgagcagtgaggacaaccagaggtcgctttcatcaccatcttggttttggtgggttttggctagcttctttttcacattctgtgttatcagtgggtctttgtgacctgtatctcaggaaagcagtcttgtggagctccgctctgtcttcagaggcttcacgtagctgccccaactgccccatgcattccgtccaggtatggggccccttcttccatactctgttagtgcgttcacaaaggtctgcccggtttcaaagaatggggtatttagagactgggcgagattatgggagagaatatagaaagagttgagagaataagctgtggggtgagccaggaagcactccgacattgccgtgttgggtagagaagccattaaaagggacttgggagaaaatggctagcgagttagagaaaataggggaagggaatatcatgagctgagagtaaaatgctttaaggagtaggagtaaatcaacagtgaaatttttctgaaagataaactaagtaggatgaagacagaaatgttggctgggtgtggtggctcacccatgtagtcccagcactttgggaggttgaagcaggaggattgcttttgtccagaagtctgaggctgcagtgagttatgatagggccactgcattccagcctgggtgacagagggagaccttatctttaaaaaaaaaaaatggaaacaaaaagttattgataccatgctgcccagcagcttctggcacatcatgggcatggaaatcaaattagagcagactgagcaaggagggagaggtagcaaacgtagttaattccggttagtagttttgatgtgaagggaagccaagaaatggaatcgtagctgggagcggagagtgatgtggctcaagggaggatttgttctttcggttttttttttaaagcatgtttgtgtgatactgggaatgtccagcaaagagggaggtgtttgtgtttcaggagagaagggatagccaaagaagtgagatcttggcacgcaataaggaattcagctcagaacacaagggaaagaacttgctcttgtttgtcacagggcctctttccattgtgaggaagacaagtgtgagcatttttgcatatttggaatttgtctcagattcttccattgtctcagtaaatcatttgacaatatcatctcatcattgggaagaacgggtcaggtggggagaagattgtttaaacattgtattggagtggaagcttacatgagaacccacagcagtgttggcctccttgaggtatatagctgtgcactgaaagtcaagacagacaacacctgtgtggctttcttttacaatgttcagttgttcaggtgcaggcaaagagaaagtggatggctgcgccgaaacaggtcgtggtttcacctgacaagcgtggtggwgggagagagggataagaaagctgaagtgtttgaagtatgtaattatagtgatagaacatggaatttaagccgctgmggaaggaagtgacacagcacgagtgatggattgtgcaacagtagtagggacaactgattcaaggtcagcatgctggatggagcagtagaaggggttctagagtaagagcctaaaagtagaaggtagttctcaggagttagatgctgcattcaggcatttgtacatagattcattgatgatcgaaaaattaattgattatcccgtctttgccagccactccttgaggtcctgagtagaaggtggtaaacacacagcagggactgctgaaatggagtttacgctccaggagtaggagacagatcacagacttacataaattcaagggctaagctctctgaagaataaagtggataatgggaacaagagtaatggggtgtgctccttcagaaagggtattaggaagttctctcagtgaaagtgaccactgaccagagacctgaatgagatgaaggagtgagggagtcattgatgtatgcagaagaagagtgttctagtgcaaaagtcttcatggtgagagtgagctcagtgtgtttgaggaggagaaggccagtaggcaagagtggtgagaggtgggaggtagggaggtggctcttgcatctggtgagtgttgcgggggttgtgactgattggggctgttgccttgggttataaaataatttactgaaacagtagtgaggtgaagaatgcaagtttattagagagtaagtacgttgcaaagggcaacgggtagcacagcagagaaggggctgtctgccaagagacaggggctgggggaaagtttgatagggtcctgcttgtggggccactgtgcaaataaaatgacgctgctggggctgcatgcagagtgaggtgtctgggaacaggatagtgtgcaagcaggttgtttgtggttagcagtcactcagaacaattgttctcccccacccgggaccccccttcctcgttgttgctaacttacctatcaggactgcacagtgagggatttgattttactctgagggtgatgggaacccactggagagtttggagtaaactttggaattgatcttctggaggttgtacggttcctgatagtgaccaatatgaggctgtgagatgggaatgggtggctgttttgtggtggagaaaatgttagctggaggcaaggggatcaaggtctcgggcgaggtatcctcctgagcaatggtttgctctccatgtggatgtccaaatcactaagaatgataggagcagaggtggaacgtggggcagtgaggcaggaggtgagttatttagtgaatgacgaagggagggaataactagaggttagtggatggcagaaaggaggagggatagtagggtctagccagtggcaggaattttcagaaaagctcatggttttgaaggagaataaatcatctggaagtgttcatggggaacaaggatgttacccacgttttttgcctcagatgtgaaggatttgacttaaaatgcctccacctggccgggcgtggtggctcacacctggagtcccagcactttgggaggctgaggtgggcggatcacgaggtcaggagttcgagaccagcctggccaacatggtgaaatctcctctctactaaagatacaaaaaattagccgggtgtggtggcgcatgcctgtaatcccggctactcaggaggctgaggcaggagaattgcttgaacctgggaggcggaggttgcagtgagccaagatcatgccattgcactccagcctaggcgacagggtgagactccatctcaaaaaaaaaaaaaaaagtgcctccacctgagacgattgcagggcgaggatatcctcaagggaaagcctagttatcactaaagaaggaggtgaagtttctttagagagaggttaggcctggggttctcagcctggggttatttttgccccctgccccaggagacacttggcaatgtctggagacattttgggctgttacagctgggggcgaggtggctgtgccaccgccatccagtagtaatggccaaggatgctgctaaaagcacaggataatttcccccactaccgctaaacacggaaataccaggcccagggtgatgatagggttgtggtacagagacccttgattaaggatttcggggcatatgctttcatggaagtagagttccagcaggtcatcattttctctcctccacactgttctggaactcctttgataatttttggctggatgtgcacgtacacatttaccttcagtcacacacatgcaagatcctgctgaccttattttttgtcatatacattatctgagcggtaggaaagaattagtcttagggctattttcagtaattcggtaacatgaatacaacaatmtactgttatgataattaatcacttgagaattgagggatgccatttcctagatatttagttccagttagatgcaggcaaactgaagttctgtaggggaaaaatttgttatttcccctccaaaaaatcctgggagaccaaagaatgttctctaatgaccagaagaaatggagaaaatagagagatctcttgtgtcctgctttgtcactcgaaatatcaaaggcagcttttgagattagttttgttttatagacagaaatacaaagaggcataacaactgcatgactagtatcctggtagaatggaacatttagacatttgaaatgtagttattgtaactgaagtatagacttggcctggttttgcaaagcctggagctaagaatggtttttacatgttcaaagttgctcaaaacaaaattaaaccagtgaaaaatatgcgacagagaccttacgtgtggctcataaagcctaagatacttactatttggccctttacataaaaagtttgatggtatrgactgataaatcatttccagttctgactatgatatgaatgaatctatcacagaatcatagcattgtatttattcagaaatcctgaaaatatttattgatgctttttatgtgcaagtgaccaagtttgcaaggtagatgctggccatcagcaagtttatatgtcagtgaggaaggtcaactttaaacaaatgattgcataactaattagataaaataattaattacacaaagaaactatgaagggttccaaaagagcatggaaggggattactgaagacttttctggataacagttgatctaaatttgaagaaagaatctgctaattagaaggaggagaaattgtggccctggaagggaccctagagattttccatttcctctgatgaaagtttgtgaatgcaaaacaagctacataaatgtttgaaagttaaagagctaggccaggcacggtgttttacgcccgtaatcccagcactttgggaggctgaggtaggcagatcatttgaggtcaggagttcaagaccagtctgaccaatatggtgaaaccccatttctactaaagctacaaaaaaaattagctggacatrgtggtgcatgcctgtagtcccagctacttgggaggctgaggcaggagaatcgcttgaacccgggaggcggaggttgcagtgagccgagaccgcgccactgcgcgggtgacagcgaaagtctatctcaaaaaaaaaaaaatgtgtcagaaaaaattaaggcctatakctatgactctgcactctcgctaacattagaaccaactgacaaccagtagaaaactgatgcctgagcccggcttccagcaattctgttctccccaggtgatcctcagtttcagccaagattgagaacccctgggctaggtggacccaggccctctaggatcctcagccagtgtcttattttttttatttttatttttttttttttgagacggagtcttgctctgtcgctaggctggagtgcagtggcgcgatctcggctcactgcaagctccgtctcccgggttcaagtgattctcttgcctcagcctcccaagtagctgggactacaggcgctggccaccaagcctggctaattttttttgttttgttttttgtatttttagtagagacggggtttcaccgtgttaaccaggatggtcttgatctcctgacctcgtgatccgccagcctcggcctcccaaagtgctgggattacaggggtgagccaccgcgcctggcccagtgtcttcttattatgcctctcttgcctttttttagggaaatagtaaaaaaaaaaaaaaaaaaaaaaaaaaaaaaagtccttaagttcagacctatgctagagttatatttctgaggagcatctgagagaaatgtgaatttttatcccttttctgggtgacttatttttattttgctggccagctctcttcttgtgggttggtgcctttgcctgcctcttcgtctcttcattctctgtccccgccatgatggacactgtgaatgtcagtcactgatatttctgagtctaaatggcggcatgatgcgttacgaactgcttccttcgagaaccatctgcaattaaattcaagcggtttagccttttggatccaaaattaattaattaatttatttatttatttatgaattattttttgagacaggcaacactcttgttgcccaggccggagtgcaatggcgtgatcgcggctcactgcaacctctgcctcctgggttcaagcgattctcctgtctcagcctcctgagtagctgggattataggcacccaccaccacggctggttatttatttatttatttatttatttatttgagatggagtttcgctcttgtctcccaggctagagtgcartggtgcgatctcggctcactgcaacctccgccacccagcttcaagctccgccacccaggttcaagcaattctcttgcctcagcctcccaagtaactgggattaaggagcccgccaccacgcctggctattttttgtatttttaatagagacggggttttgccatgttggccaggctggtcttgaactcctgacctcaggtgatccacctgcctcagcctcccaaagtgctgggattacaggtgtgagccaccatgtctggccttggatccaaatttaaatccaaaattggatttaccaattaaatccaaaagggagctgagtgaggtggtgtgtgccagtagctctagctacttgggaggctgaggcaggaggatggcttaagcccaggagtttgaggtaagcttcagcaacatagtgagacctcatgtctattaaagaaaaaaaatctgagctgggcgtggtggctcacacctataaatctagccactcaggaggcttaggtggggggattgcttgagcccaagagttcaaggccagcctgggcaacatagcaagaccctatctgaattaaaaatcttagatggaagctgtatagcccataacttcgcctgttgtcttttgaggcaggaggtatttagggggatgagagagcaaaccagttctgcagttttttatgtggtaactctggcctcagactacagagctttctcctagcttgagaggctcctttctgcgctgtcagtagccttggaaacggtgttgttccctggcagtgtttacccagccgctgtcccctggcgagttcagagccaggtgatcggcagtgctcgcycttaatgactgtgtttcatctgcagggcgaacgctgttggagaagctgttcagccagcaggagaacgggcctccagaagaagcagagaagttttgctcccggatcattgccatgggtcttctccttccttttagtgattgcttcagggaaccgtgtaatcagaatgcccagacgaatgcagcttcgtttgatgtaagtaggagaattcacttctgtccgtgaggcagatttgctgtggaaatagcagctacgatgtgtatctgcccagtcaccctataatttaaaaacaacatgtgattcaagcattttttttccttagstgctcaacagctcggtatgtctgtttgtacacaaaaaaaaaaaaaaaaaagaaagaaaaaaaactagcgtattaagtacattygccaaacctccttttcttgacagatggtcactcaagagttctctagcctgctttaatcaaygatgattttaaaaattgatttctaaattatttttaattgtggtaaaatacagacaacataaaatttacctctgtaaccatttttaaatgtaccgtttagtggcatcaaatacattgacgtggttgtgcatccaccaccaccatccatctttagaactcttttttatcatccaaaataaaccctgtacccattaaacaataactccccatcctcctctttccccaagcccctggcaacaaccattctctttctgtctctatgaatctgactatgctaggtagctcatataagtggaattatacagtatttgtcctgtttgtggctgacttatttcacttagcatratgtccttgagattcatccatgttggagcatgtgtcagaatgtccttcccttttaaggctgaatcatattccattgtatgtatatgttgcattttgtttatacrttcatccatcaatggacatgtgggttgtttccaccttttgctrtaatgctgctatgaatatgggttcataatgagtgaataatgccgctatgaacatgaggtacaratacctcttcaagaccctgtaatcagcgatgattctaaagtggctgtaagtccatatgtatgacttggctggtcgtaggcattccttcagaagcagctccacggggcacagttattcttcccagtgggccggaggtttccatgggccctacgatgctattttgtgcgttcctaactcatgtttgtgtgaagtacggacgtgaagcagcattgtctgcttcatccccagctcccattcaccaagagagttaatactgtacaacagtaattcaccaggcatattcacaattcataatgaatatgaacacagctggattctcattgtcaaggcagagtattgccagtcgttctcaggtatgtggtatgtgtgtggcattggttgggatgagtacgcctctaaaacccagatgtgtaagaattctcgtggatgaaattctcataacaaaattgaaggttggctcacttgtgcagagcccaggatttttagttgaggataatgatttttcttttttttttgagacgtagtctcactctgttccccaggctggagtgcagtggcactatcttgacacactgcaacctccacctcccgagttcaagcgattctcctgcctcagcctcttgagtaactgggattacaggtgcgcaccactatgcctggctaatttttgtatttttagtagagacggggtttcaccatgttgttcaggctgttcttgaactcctgacctcgtgatccacccgccccggcctcccaaagtgctgggattacaggcgtgagccactgcgcctggccgtggtttttcatcatatgggttagttactttgttttgttgctgccaacagtgctctcttatcagccttcttcaatatataggaataaaataatgatgagctttaaagacaatgacaaagccccagctgaggtcaagatacgataataaataataaagtgtctatatctgcctgttcactttgcttcctcttctttacccattacagcctgcagtcttcctcaatcttcctttagtattaagaaaataaatcacataaaatattcagagagcttcttgattcttgatgcttcccatttgaaagaaaattccccatgttgtgctgtgacttgtgaagtttccttcctgagatttgtttacatttttcctgctgcaattttttaaaatgacattgcagctaatcgctgctaggtagatctctttctcttatgggaaaaaatatataacttaaatgttttcctcccttctcttgtatgacaggtctgtgttattgtagaggcagaacgctagaatgatggtgtgttaaatgttatagagctcagttctagaagatatattgatttggcaagttggaactataattagtatagtgcaggcaaaggcaaacactagccatgtctagcacttgctttttgattcaaactgttcccaagttaacggcattttcctccyttaaagcccagaagtgaacagtcttgccagtcgataaatgtagaattggataaacagaaaagaatagggtaatcctatttctttctctctctcttttttaaaatcaactaacctggttgtttcttatactcacctcactccatccttgtgttagagactagtaactcttccccatcatcttattttggagggcagctgggtgtggcatcgagcgtgaaaaacaaacaacaaaggtataaaatcccttaatgttgtgtgaaggcatttcctcagaattgggaatttctttccttcaacttgatgtgattgcattttgtcttcctttattcattggctctgtacgacctctctactcccccatcaaagtgaacataaaacaaagaagaaaattaaagatactcttgtatgaaatgttatgccctatacttaaatagcagctcagtaacagaactatgcgttcattggatgcgcagtcaaggagtttcttgaaaactggagagggcgacgatataatgatacagggggttctgaggactggggtgtcaatgagggatgaggaagaatgtgcttatctatggggagagaaattttcgataattagtatctctgctgatttccagaaaatggctgttggggacatttctaactaacaatcctcttgaggtcagttgcccttcgagacagaacatgctgtgggaataatgtcataactggtacccttcctacctacccccccccactttgttcccttccctgatgggttcctctcccccacctccttatcctctccgttctcatctttgcacttatgtatgcaattacagcaataaagatcttcagtttggggctcttcactgatgtagtttatgtattagcctacttgactcaacccttctgattttgttttatgttattttatacaattttagggcctaacattttgctttatcgagtgttatagaaagtatgaaaagacttcacattttctcttacattttaatatgattaagatgtcaagaactttaaaagacaaagatggctttgagggatgctgttaattcattcacagatttttaccaaatatattcattctagaagccaggcagtgttttaggctctggagatgtgttagtgagcaagagaatgtgttctgttgaaatgtgtttcctattcaaaatggagagagacagattttttttcagaatgcataggctaattaattgctctcagattctaataagtgatatgaaggaacacaggaccaacaggatggagtgaatggcgtgggggtaggatgagcgcagaggggagcctgtgagatgaggtctgtgggaaggccattccaggcagctcccagggcaagtccaaagggccttggaggagcacagacatgactcagaggaagctggggcttcaggagatgaggacagcaagggctcaggccacagcacaggcagggtctggaaagccgtggaaggaatatggcttttttttttttttttgaaacggagtctcgctctattgcctaggctggagcaagatcagaggcatgatcttggctcactgcatcctccgcctcctgggttcaagcaatttctagctaatttttgtatttttaatagagacagggtttcgccatgttggccaggctggtcttgaactcctgacctccagtgatctgccacgtcggcctctcaaagtgctaggattacaggcatgagccaccatacctggcttttttttttttttaaatgggagcttttgggaggttttatgcaggggaagaacatatttgtcttatatttcatgtggatcacctggcctggtcttggtttgcttgttgtggtggtggttgtttttgagacagggtcttgctctgttgcccaggttggagagcagtagcacaatcatggctcaccgcagtctcgatctcctgggctcaagcgatccttccacctcacccttccaagtagctggaactataggcatgagccaccatgcccagctaattttttaagttgttgttatagacagggtctcactgtgatgtcccaagttggtcttgaactcctggggtcaagcagtcctcctgccttggcctcccaaaatgctgggattatagacataagccaccatgcccggcccccagcctgctctttgaatgattgagtgtaggcaggcacagaagtagaagcaggaaggcaggtgggatatggcagtagtttagttctagatggtggctgtaggttggggcaggacggtgacaggggagatgaagaccagttagtaggttggggtggattctggaggtatggctgatgggacttctggtggggcagacatggcgacaagagaacacaaggaaatcaaggatgacttcttggtttgaagcagctgggtagatggttgtgccattcactgaggtagagaagacagctgcattttgggaggaggatataaggatagaactgctagcaagagaaaacagggatcatactaatgcttgctacttggcagattatattgttgacttgtagatcatggtatatttcagtggtctgaagctaggcttctttgtgtatttggaacctactctagtcatttctctcatgcctttttccaaatgagatccctttttttgggtcatatgcatattttccagccaaccacacttatcttacataattgttgattattcattaacaagctcttctaggatttctttaatcctaactgtggcatatattatatgatctacttacatcaccaagagttaagcaagtttacttgacccaaccatttttgcaggggtaggtgattctaaatctacttaatccttcatgagcttatctttaaatgtctgcctagcaggatatttttggatgcatgtttttggttgctggacttgtttgggtttggcagatctgctgattttgctaaacatgtggtgatcccttgctcaccrgatgggcaagagctccttgatatgtatgtaaatggacatcggtttggatgaatatgtgagcgaagctaaaattaaagacaaggaagacataacaattcaggttaaaaagaaacccaagaaataagatcttgaacctgttgaaagatgaagctgttaatcaaaaccaacagcagccagtcccggaaaactaatgaaatatgctctactcattgttaccgtagacaaaaagaagacttaagtggacaracagaaattattatgtgcatttgaattcatttttttttcttttttgagacagartctcattatgctgcccaggatggagtgcagtggcgcgatcttggcttactgcaacctccgcctcttgggttcaagggattcacctgcctcagcctcctaagtagctgggattataggcaggcaccacgacgccgagctaatttttgtatttttagtagtgacgaggttttaccatgttggccaccctggtcttgaactcctgacctcaggtgatccacctgctttggcctcccaaagtgctgggattataggtgtgagccacctagcccagccttgaattcatttttttttccagagcaggaaaaacattttaatgctatttagtcaagcccacacagatcttttcctgagaagcaacaaaagccttgccacatctttcagctctaagagaatatagatatacgtatatattttttgctgtatatttatttttgaaacgttgtgtacagtatcaactttcaaagttgtttttattttaaagatggtattaagatgatacttaattttttcagaccaactttaacaattattttagctgatgattttgtttaccaaaatttatataagctatgtggacttgctgtatgttaatgcctgctgatgcctttttttttttttttttttgagatggagtctctgtcacccaggctggagtacagtggcgtgatctcaactcactgcaacctccgcctcccaggttcatgcgattctcctgcctcagcctcctgagtagctgggactataggcacataccaccatggccagctaatttttgtatttttagtagagatggggtttggccatgttgcccaagctggtctcgaactcctgacctcaagtgatccaccccctcagcctcccaaagtgctggaattacaggcatgagccatcacgcccagccaccattattgacattgctcttgccttctggcggtcatgcatgaggatttagctcctttatactccttccttgtctctccttcttccttctaatataattaatattgctattttgagttttctttcataatacttctttgaattttaaataatatgcttatgattttttgatattgtttcatcaaattcagatcgtatctcttgccaccccactcaccgtgtaatagttacactattagtgtctctacttttgccttcatttagtctgagccctgtttacctcccagcttctaccagatacacttttatgtttagggcatacttttaaggttaatagtttatctataagttgaaagacatatggatgctgtgtgaatattgcactgcagaggcagatatattctgattttgcttccttttcagtattccaatatcacaacccccaggccactcaaacaaggattttcctgggtcaagttcaaaagaattttgtggttttatttatttatttatttattttgagacagagtctcactcagtcacccaggctggagggcaatggcataatctcagctcactgcaaactttgcctcctggtttcaggctattctcctgcctcaccctactgagtagctgggattacaggtggatgctaccacgcccggctaattttttgtatttttagtagaaacagggtttcactgtgttggccaggctggtctcttactcgtgacctcaagagatccacctgcctcagccttccaaaatgctgggattacaggcgtgagccaccacgcccagctgaattctgtgtttttagtaaacaatcacttgctcaaaagtatcccatatttagtttagtttacatttggcttatccttttcttatacagggaactcccatccagcacaacaaagttttcgactgcctcttattttcttttttgggtgaagaaacatagcttttccccctgtattctcaatattttttatttttcagctcattcttgccatttcatggaattcttaaattctttctcttctaatttaggtcaggttcttcgtatttaattatgacttccgcttgtacttctcagctccctctttcccttacaacacctgtcccccaagcccctgccctgttattaggaacacaaagatgaaaagaaaggttctatcctgaactggcttacgattcactttaaagaaataaacacatggaagtaaattattggagcttagtggttgaagtgggctccacagtcaaagtgtccaggatttctcaactatgctgcaagcttaggtaaatggctggatttctgaaagtttatttcttcttgggtaaaatgaggaataaatrtagtagtttctgagtgagaggaaagtatggatacgaataaagcattttgcacactacaggcatatagtaagtgttcaatgccctttgcctgttaccatgggtcrcaatcgtgtttaggctccaagtggagatatttatagtacaaggagcaaaggggaaggtttttaactgggtctccttgataactcaggagataacacctggggcaagacctgaggmatgcgtaggagtttgctgtggggaacagccatgaaagaagtctataggtcgggtgcggtggctcacacgcctgtaatcccagcactttgggaggctgaggtgggcagatcacctgaggtcaggagttcgagactagcctgaccaacatggtgaaacccccgcctctactaaaaatacaaaattagccaggtgtcttgacacatggctgtaatcccagctactcaggagactgaggcatgagaatcgcttgaacccaggaggcggaggttgcagtgagccaagatcgcactattgcactccagcctgggcagcagagcgagactctgtctcaaaaagaaaaaaaaaaagtctgtatactgggcagcacatagaaaggcacaggggtgcatgtgagcacagtttctaagtatttccggagtataaattgggagaatgatgcgtagaaaggagaccagggatgtaaacaaagacaacctgggggtgcttttgaataattttgagtagttaagccataaacagattggcatttgtaaaatatcactgtggtggcagattggagaatggattgaagaaaactaaaattagcatctgagtgatcagaagagtgtctgaactgaaacagaggcagtgggattggaaagagccagctatagggaatctttaggatttagaaccgacaggacttrccatttgattggatgtgaggaagtggagtagatgatttctttgagtttctggttcacatttctgggatactgtactaaagagttagaatactaaagacggaacagatttcagagagaatgatcattctcttttgacatctagaatttgtgattatttgggactttatggaggctatacctcaagggcaagggaactgatattgctggcatagaccataggttgtatggtaaaatcatgagcaaataaatctcgtaaattaagagaaagttgaccaatcaaaagattaaagttcttaaggacagtggagaataattagatgtagtgagaatatagagagaatgaattcattggtggttgtggccagagggaaggatattggtgtttaagacttcagaggtggaggtgttctactcattccaaagaccagtccatggtggagaggtaggctcgttgtgattagaattgagaagctcagggtgttggctgggacttaatgtcccatagaatgtrgaagagtcaaccttgagaagcagagagaggaccatgtggtaaagtccttgacatgtgaaggctataccaaggaggtttgtcagggtctgtgatgaggaggggtagatgctgatacccctgggtgatacgggctttggaagtggagygggttacgctcaggatggacgtggaatactctctagatgatcatggagggctagattagagggtcgcggtatgagggaggattgggaaaatcacctttcaggttcagtcatcgtttggcttggatgatcacattggccttttcattaccttcttgggtttgcctgttactggtttccagtccagtctcctcagccttgtctagtggttctcattccagggttatgttgccctgcagaggacatttgacaatgtccaaagacatttggggttctcacagtagggagaggggtgcaactagcttctagtgggtagagactggggcactgccaagcattctaaatgcacaggacatctccttctttcccctaacaaagaattacaaaatgtgcaaaatgtcagtagtgccaaggttgagaaatctagtgatatatgtctgatcatgttgttttattttattttttgagacagcatcttgctctgtcatccaggctggtgtgcagttgggtgatcacagctcactgcctgccttaacctcctgggctcaaccgttcctctcacctcagcctcccaaatagctgggactaaatgcaaatgccaccatgaccagctaattaaaaaaaatttttttaatagaggtggggtctccttatgtggccaaggctggtcttgatctcctgggctcaagtgagcctactgccttggcctcccaaagtgacgggattacaggcatgaaacaccgcacctggccatgtcattttaattgtttctctatcagaataaactccagcttctttggatctccatggtcttccttctgcctttcaatactttcccacttctacctctcctgacccactttcctttccaaactcttttgccacgctgaagtgttattgattttcctaattgtccatgtcttctctcacttgtggggctctgtgggcacctctacttctgctccccactattatttcccagttagcctccactctttctcataggatgctattcagagttagatgccattccttcccagacatcttctttagccatctcagtctgcattttctctctcaaaggatatattacacatattataattgyctatttaccctgtaacacctgaatgcaaattaaatattgtgtgaaggttccttgaacaatgtaatgctgtgtccttgtgtttacctgacagatctccccagagtagttaggagtggtctctagtcctagactggattctaatcccatcttctccacccacttaagaggtgaaaacatttacccaaggtcacattaaaatttttcatgtctaataatctctggagttgttttgaagattaaatgagattaatttattaggcatttagcacaatgtctagcacatcatcaatgctaggtaattattagtgattggtatttaatattattgcctttcaagttcttattacagaatcaggcataactgtttaataaatatgccttgattttgtaaagaagagagctgtaggaaagccatgatgactgcagtgaggaggaactggagaatctattcagtgaattgtcttgaatgatcaaaggttgcctatgtttgataatcttgaaaacacttggactgggtgtggtggctcacacctgtaatcccagcactttgggattgggaagctgaggcaggaggatcgcttgagcccaggagtatgagaccagcctgggccatatagggagactctgtctttacaaaaaatttaaaaaattagccaggtgtggtggtgcacacctgtagtcccagctattggagaggtgggaggatcacttgagcctgggaggttgaggttgcaatgagctgtgattgcaccactgcacttccacctgggcaatagagtgagaccctgtcccaccaaaaaacaaacaaaaacaacaaataaagagagacagagagaaaaaagaaaacacttgaagagggagaagatgggagaagggatgggatctggctgtgttctggaattaatttattagtctgggagttgactctgtattggatctcttcttctgggcttattgccatcctcctttctcaatccattttacttaattttactgctataattaccacattccttcaccaaccctcatgcccccacatctttctggatggagtggaagggaaatggaaagagtagggaaagctacggggaggtaactgcaaattgtgaagggaaatctgtcatgcccacttggtgttatgttcatgaccatcccgtagtgactccatgctttccctaggtcagtctgtggaagtattgcacttgaatattgacatgcgttgtgcttatttagctctctgtgtgtatgtgtgcaagtgtctggcatacttgacagataacgtggcatggaagaatgaatcgttttgctttccctagcacctcaccaaagaatagggacctccatttcatctagaattcctaagacagggaggaaccagagagggctggagattgttttgctacacaacattgctcttctctttcaaagagttcattttattttcttgattggataatttcttgtggggtaaaatcatggatgggaacagtcaatacatataaataggaagaaatctgcttactgagttttctgtaagggatattttccaatccaatattacttttttcttatgaagtcaatttatttcataaagaatataataagtggatatgtatccagaagttcctactcgatttctttctttgaaggctatgcacttgttatatggtttgaaaaaaattgcctcgtayggggaacttttctttaccacaatattgattgtatagtgagttaaattatgtcccctctgtttgtagtcagatagttcagtgtgaagtagaaggctttcaatatatattttaaaaattgttaattctctggaatctatcattttcgaaaggactttgtcatgtttcttttttttttttttttgagacagagtctcactctgtcacccagttggagtgcagtggygcgatctcggctcactgcagcctccgcctcctgggttcaagcgattctcgtgtctcagccttccgagtagctgggactacaggtacatgccaccatgcacagctaatttttgtatttttagtagagatggggttttaccatgttggccagagggccttgaactcctgaccttaggtgatctgcccaccccggcctcccaaagtgctgggattacaggcatgagccaccatgcctagtcatgtttttttttttttaatcaatttatagtaatttgtccccagttactactcagtgaatgtttgtatgactggatcttgtagtaatcagtawccaagtttttatacatatgtgtttaagcatatgtatttttaagcatagttggagattattatgtttaagcctattttgagattattttatttttctgatccggtacgtgatttaataaatttctaatatgtgttgccatttatrtatcttatttcagagggcaaaacgggtgatgtttttcccccgttatgctcaattcaagtgcatcgttgcaaaagtagtaatgatagttattgttattcccccgatcatgaagttttctgagctcagaggaagtgctaccagtcagtagtttcatagattttagaatgcttcccaacagtaaagttaattgaagcttagaaaaatagatttttaaaaaacacactcgtggcaatcagactttttaagacaatgacatactttcttcatgattgttttttcctcctttaagaggattatgctgttttagatatccattttgactttcacaactggtacttttttttaatcacccatttggcaaacagtgttgggtgactcagaattcattttgaatttgtatgatggacttttattaaaaggggtgactcagctcgacttttctgtcatgattttcttttcttgtctttctcctgtagatgcactgaatattaattagttctattgatgtgacttgtatttcttctgacctccttttccttttctcaagagccaggaggagtataaaattgggaatctggcctggtgcggtggctcacacctgtaatcccagcactttgggaggccaaggtgggcggagcacaaggtcaggagtttgagaycagcctgacccacatggtgaaaccmtgtctctactacaaatacaaaaattagctgggcgtggtgtgggtgcctctaatcccagctactagggaggctgagggaagagaatcgcttgaacccaagaggcggacattgcagtgagccgagatcgcgctactgcactccagcctgggtgacagagtgaaactccgtctcaaaaaaaaaaaaaaaaaaaaaaaaattgggactctatggcaaagtgaaggaccctgtacagagaaaacatgacttaattcaggagcttaaagggtttttttgtttcttgttttttgtttttttttaggtcctcccaatttgtactggactttggaaatctgaaagaagatttattctcctgttattacctttattgtctagatcaggggttggcaagtttttctgtaaagggccagatagaaaatattttaggctttagtaaatattttacagtgcctgtcacaactactcaagtccactgttgtggtgtaaaagcagccacggacaatacgccactaataagcacggctgtgtttcctaataaaactttgtattacaaaacagagcacctggccatatttggctggcaggctgtggttggctagcccctgctctatactcatgtaatacatagatagtaaatttattctctgagcttttctttctgtctcttaccatgtgtgctcaccagccagtcacacaatatttatggaatttttctatgaaaaatatagggccttttcttgttcttgtgtagcttactgtggaaaggggctactgggtgaacagacacggtggtacagtagttgataaagggtgatagaagagttttcaggttttgagtggtcgaggatgcccggagcctggagcccagtgtacaggaggaggaacagaagaggcgtcttaacaaatggtactgtggccaggggcggtagctcacacctgtaatcccaacactttgggaggccaaggggcagatcacttgaggtcagaagtttgagaccagcctggccaacatggtgaaaccttgtctctactacaaatacaaaaattagccgggtgcagtcgtgtgcgctgaggcaggagaatcccttgaatccgggaggcagaggttgcagtgagctgagatcacaccactgcactccagcctgggtgatagagcaagactccatctcaaaaaaaaaaaaaaaaaaaaaagtaaaaagaaaagagaaatgctgcctgggacccagaggcatttgtgaaggcttctggaagaaacgtttaagaagtgaaccctattctcaggagcagtaggragccggtggagggtgttaggtggaggagtatgacgtggtcagtcrcgtgttttagagagagcattctgggtgttagaggagtagggactgaggggtgtgctgtgtttgtggttaggatgctggaagaccctgaggaaaccgttgcagcaatccaggagagaacagtgccctcaactatgaaggagttaggtagtagaaaatccttttatttttaaaaagtattacatgtgggccgagcacggtggctcatggctgtaatcccagcactttgggaggctgaggcgggcggatcacttaaggtcaggagttcaagaccagcctggccaaattggtgaaacctcatctctactaaaaaaaaaaaatacaaacattagtcaggcatggtggtgcatgcctgtagtcccagctacttgggaggctgaggcaagagaatcgcttgaaccaaggagctggcggttgcagtgagccaagattatgtcactgtactccagcctgggcaacagagcgagactctgtctcaaaaaacaaaaaaaaattgcatgtggtcacacaatttgtttttcccccttttaaaggacttccaagtatccagggagttgcactagtacaagaattggagcttttcctttaacaaatcatacatcttaattttcttctcataataccacaatagttaattaataaaataatcttacttatatttgggaaagaaatttgggattaaataaaaggcagattctaattatacttggattaatattgttactcctactaatctcaaactccaagagtcagaatcccccgaagggcttgttacaacacagattgctggccccacccccaagtttctgattcagctggtctgagttgagatcagagcatttgcatttctaacaacttcccaggtgatgccaatgatgccggtcggggaccacactttaagaagtgctgccttagagggtagacgtgagaagccttggggatttggttgctcatgtaaaggtaagggagtgggcagagacaaggagaatgtccaggtttctggtctgagcactagggtagatagagggtgatgcaattcacactgtgtgtaaaattcacaatgaggagcaggttgtggggatgattggttcaattaaaatcctactgaatttgaggatacctctttaaatatatacaaaaaggccattagttttttgtatctgaggtcaggagagagagcctaggagaagagagattgacgactcttcagtgtgtagatgatacttgaagccattatgctctggaaagtgccagtagaatgggaagcaagaagagactgacgtatagataaatacttacccaataaggggaaaaaagctacaaagagaatgataaagacaaaaaaacaagatattttttaaaaagaaagaaggagtgttaagtgatattcagtgttgccaagaaatcaagataaagactgaaagctactgataataccctagtagagaggaattccagtggagcgctgagagcgctgcccagatttcagcaggctgaggtttggagacgaggggtgtagggtgtggtgggaagatgggaggtgaagtcagtccacgtgtgtgattagctctgtgcacttgggctttttgctcaggtagatgtatcggaaggttagtgagggtgggaattgaaggtatcagcctaaaggggtggtttaaagagtaggctacaaagtcagaagaccagagagggtgaatggtagaaaggaggggagccaagattctcaaggtctggaggctgagggggttcggataggatgcctacaggtattattgggtagataaattggtttyagttggtaagctgctggagggtgtggcctggtgagtggtctgctggctaagattgcgtgaaggtgagtgcttgcattggcttactctcactttctttcttcctctgggtgtgaatgatttgctaatcatggttcccattccagtgtgtaaccagtttgcaggtcattgtcagttttttttgtactggtgctttaaaaaacaaacaaactgttttcagtatttaaaaacacattaagctttctatgtaccaggctctgttttaagcactttacaattattaactgttttaatcttcattacaagcctggtgagatagtttttattttccttttgcagaatacactgaagcacaagaaaattacgttcattttcttccttgctttgaagttccattaccaacacaaaaccttcaactgcatttttgcatttctggctatctctgaccctaacttgccacaacacagatccacgcaggttggaacacaaaactgtttcctcctttggatatatagtctgtaaaatgactgctggggcctgctgttttcctgagagtgacttctctttctgtgctttgtaattttacttcatgatatttacaggattttatatgtagaacagctcatgtccaggttaaattctgtggggggtgggtgggaagtctcttccattttgcagaagttttcaaggtatttcctgatttgcctatcaaacatagcctatcccaggatatgggaagaattttcctcttttaattatttcaagccatgtgtctgtacagtgtacatacttgactaatttgctgttttatgagggaataataaaaacaccaaaactgaagaagacaagtatttaatatagcccagttctcttaaattggcaagtgaagacatttgagctgaaaaggtgaagtgacttttctgtccaaaatagctttgacagagccagaatcttagtctcctgctgttcagggcagtttgctttttccccatgctgcactgacttctattagaaaaggaaaatttctttcatttacaacagagtctaactttcctcatactattggtagttaatggccctgtacatttgttaaatgtagttgggtaacaagtatttctttaacaaactaattacctgacttctgggtcaggtgaatgtgttatgaagaatcctggacatttttagagatctttgaaaaagatgtcagggatacttttaagaaaatactagggattcaaagatggaagacagcctaagacaagagtgaagcttagcatgagtaatctgcatgaaaaatctgcatgaaaaataacaggcaacggtattttatttatttatttatttatttatttttgggatggagtctcactctgtcatccagtttggagtgcaatggcacgatctcggctcactgcaaactcctccccctgcaaactctgcccccacggttctagtgattctcctacctcagcctcccgagtagctgggattacaggtgcccgccaccacacacagctactttttttatatttttagtagagatggggtttcaccatgttggccaggatggtcttgaactcctgacctcaggtaatctgcccaccttgacctcccgaagtgctgggattacaggcgtgagccaccacgcccagccatatactttaaacatcatggtgaaatgagaactttgaaaacaagaattttaagtgtctcctatgtttgcattttgtgcaatgaaatgaaggggacaggatagttgctgagactggatttcactatttactcttaggacaggagagaatgtgtctatgtggcacgttggacagggctcacatggtgcttctgagggaagtcctcagaagttgggtggttgagttgggacattcggcctgggggaaccagatgctcaaagccaaatctgaattggarccacaatttctaaggtaatttagacttagttcccatgatgctatgtgtgaaaaacttggcaacactgattcattctgaagtcgctacatgagaggaggacagttttgatcacagactgatggratgcactttggatgcagatcagaaatatatcagagtctccctgtagctttgaagttacaagggtgctgcatttaagcctgtaggtaggagtacggcggcttcattgtcatcagtgttttctgatattgagcttctcatggtcccagttaggctatattgaggctcctgctgacccagtcaggagcatgaaaagagggtgtctttgaaaaaaataaagctgctagtgcaaagccaaaatataactgagattaaagactgtaatgaaccgagctattttgaatctgaaagttagctcaggttttggtaaatattaattgtattttgattatatttactgaagatggatggacaagaagacttctgagccatggtcccagggtcataggacaagtggagaaaaccttttcatttatttatttatttatttatttatattttttggggggggataaaggtctttattgaacaaccttatctcactcagtaacaaaagagcaggaggcaacaattcccccggaagtctgcagctgtgtycacccttggcagcaggatgcatggcccactgatacatcagctgcagttcagagcccctggtggtcacttagagatcataattggggttcttccgaaggataacaaaactttccagaatgggggtaacaggaagaaactcctcagtggccaattctgcccgttccccgtgggccaacgacactggggttgtatgtgtctggaaccctgtgatggtcttaggcttgccagcctggcccaccacatccactgcctggcctacatggacagacactggcaatggcctcagctcctcatcaaacgtaaccagcattcggggccgcatggcagccaccagcccatacaatacatagtgtgatttgcctagaataatgtttcgaacatccaggaaagagagaggcacggtgagcagcccagccatggccactggactcataagctgccagtcactgtggtaggggcagagggtaagtgtacccttccctaaatgtgtcaggccctgtgccaagtgcaccatgaagaggtcgttggggtccttggcatgatattgagctaactggcgcaacattgcagccagacgggcattattggtaccactgcccaccatgcccatggcaaaaatggagttataggaaacttctggatcagcatcatgagataatttgcttagggtatccaggatgttgatttgaaacagagatgagggccagtgctaaaggtacagccctccggagtgcaggctccccatatctcagcaagtggccaaaggttcatagtgccgtctctgcaccaatctcccccacagcaataagggcaatccccagaacagccactccctgatgtgctcccatgtcagcaggggtttcctttttgtccttgtccttcttttccttcttgcctttgtcttcctccttctctttggagtcaaagtgttcgctgcaaacgtggagcagctgctgcaccttcagcacattcccagagcctgcctatgcacacacatctaccagtgtgttggcaaaactgcggaatggctctgatgcaacctccagtgcagccaggattgcctcgatggcctcacccttccccaggtgattgagacccagtccaagaggaagccaacgagcataagagtccttgagctcagtacttctccctgatggtctgaaggatagtggaagttacatctccattgcaggaccccactgctatcattccacaggctagagctgtcacacctgccacctccatgctggactttgaatctcccatcacaggcagcagcagtgttaggacatcttcatgatttgagccagcgtaggccaagcctagcccaaagatggaaccaagtctcatggtgttgctgttgtggagaacatagtctgaaagcagtcccagagcagggacacactcattccagaccccagagttcactatgccacaggcaagaagaattcctgacttaatgtagtcctcaaaggagtacaggttacttstcaatctgaatgaggccaccatccacatcccacagcagcagcatcccaacagatgcagctgcactcaacattccgtggtccttgttcttgtaaagccatttgttgccatcatcgttagcagcttgtcttaaacaaaagctgcattcacaaagccactcacaaaagaggaggccaggttcatgcgggcagagtccacctgagagccactgcccccaaacctgttgttctctaggtgggttttgtagatgtcatcaggcaccttgggctccatgatgtccagctcccgagctaaggccaagaagttgctgttgagctgtacattggacatgatctctgtcaggtgctcatactccttgacatcttcactcagctccaggaacaccccatgccagcctagcatgaatgccatctgtttctgtactaccacatcctcgcaggatgtgaagatgtcttctaccagctccatgtcattgcgcatcagtgccaatctcagagctttaggraagcggctaaactttcagaacacacccagggcacaacgcagtaggactgagttctcaggctcagacacrtaattcacacaactggtgagataaaggcagacctttgtgtatgcattctcatcaatgtccttctccagcatgtccacctgctcaatttccataaggtcacaggcctcatgctctgcgtcgtggaccatgttgtaggggacgatttccttcaccagagtgagcagtggctcctgctggaccttctttgcatcatccagctcctgccactccttagccacttctcctgccaggtgcctgayatactcatgactccatgatgccaattccttctgggagcctactagccgatacttgaggcactcgcactccccactcatggtcatggccaaaacagagatgatgtcagcagcaaaatgctcattctccccaggggccatgttctcatasatttccttcagtttgccrtagtgtggacgcagamatttgagagacttggtcaccaaagtcatggaagttgtagaagaacgaatctgccttcgcatttcctccagcgctggtygatacagggatgtgtccttctccccgagtcattccacaagcatcwccagttcatcttgaagctgtttatcttcctcagacagctccwgttctttgtccttgtccccggcatcccgccgctccttgccgcttggcttctcatccatgccgctgagggccgccgctgggggctgctgggactgcaccagcgtcttgtcccatcctccctcctccatctccgctgccactgccctttattttttaattttcatggatacatagtaatatatatatgtatatattataggggaaaaactttttctttagtattgtatttgacatgcacttaatgtttttactacaatgaggcaatttttctttttctttttctatttttttttttttttttttttttttttttgagacagggtcttgctctgtgacccaggctggagtacaatggtgcaattatatgacactgcagcttcagactgtcgagtagcgaggaccacaggcacgtaccaccacactctgctaatttttatattttttgtagagacaggttctggctatgttgcacaggctggtcttgaactcttggcctcaagtgatcctcctgcctcagcctcccaaagtgctggaatcacaggtatgagtgagggtgctgggacaatgaggcgattttcatattcaaaatagatggcagccaaagccaggccaagggtcgaggcagaaatcttgcattatgtgtgttagaatgctacaacatttgacacaatagcctgcagacaggggtgctcaggagacaggttttgagcttcatgcatcaattagctggtctttgagggtgacatctgttggtacatataatcactcttcttcccaggtgtagattgtgtaactgaaggatagggtctacatatgccacgttcaaagtgatttaaaaaaatagtatggctgggctcagtggatcagtggatcacacctgtaatcccagtactttgggaggccaaggtgggcagatcacgaggtcaggagatcgagaccatcctggctaacatggagaaaccccgtctctactaaaaaaaaaaaaaaaatacaaaaaattagccagacttggtggtatgtgcctatagtcccagttacttgggaggctgaggcaggagaattgcttgaacccaggaggcggaggttgcagtgagctgagattgtgccactgcactccagcctgggcgacagagcaagactctgtctcaaaaaaaaaaaaaaaaaaaaatagtatggccaggcacagtggctcacacttgtaatcccagcactttgggaggccaaggcgggcagatcacttgaggtcaggagttcaagaccaggctggccaacatggtgaaaccccrtctctactaaaaatacaaaaaattagccgggcgtggtggcatgcaactctagtcccagytacttgagaggctgagatgggagaattgcttgaacccaggaggtggatgttgcagtgagctgagactttgtctcaataaataaataaatgaataaataataaaaatttaaaaaatagtatatagtgaagagtagagtgcctgatttactatttagtaataaaacattcactttccttatagactgttttgaatttatttaggaacttgcccccaaataagtgaacaccaatctagtatcattattgtaccatttcacttgacagttgttacagagtctgttctttaaagtggaatcttgatagaatgggaatttcagactcattttggagataagctgtaaagaactaatggtggatgatgttytcctcagggtaaggtggaagacggggcaattagaccccrtggtgaatgcagattaatgaatctaagtgagtctatttggttttttcagtttagttggccggagtggaggagcragtcatagaaaattggggcttttttttcttgtttcttcatgccatgccattcagtactgactgagggtcaagcactgtgctaagtacttaacatgatctcttcaattarttggtcttaacttaaataactcagttaatctgacttccattttctgatgtgaaaactgagacttagggtaatttgcccagagtcagttgttttgtaagcggcagaagatggaattccaacccacgaaggctgactctacatcttgtgccctttctccaccctccatagccaatctgttggccttttttctctttctgttgccatcactctggtctaagccrccttagtgttgaggctggtctcaagtggtagtcccctaattagtctccatgggtccactctgctctctttagttccttctccacaaaagagtgattttttttttctttttaaaagataggatttctctctgtcacccaggctggagtgcaatggaacaatcatagctcactgcagcctsgaayycctgcactcaagtgatcctcccacctgggccccccaaagtgctaggaatacaggtgtgagccattgcacctggccttgatttttaaaaaccaagtccaatcttgttacacttggagatgctttaccctagggtcatactgtagctcttatttatgacctacagggacctcccttagctacctgctggctaggtcggcagcttcatcttatgctattctgtgttactgtgctgcctgggaatatttataaaaygcaaattcttgggctctgcttctggaaagtctgattgactagatctgagactgggctctgggaatatgaatttttgataagccagattcgggraagtcttgctctagaaagtgtgttctgtgaatattagttgctacttcgccatggaagctgctcttgtcttttgttctttcactcacctttgaattctcaagagttacagctctgctcatgagagatgctgtgccagagctaagccttgtcaacaaaacgttttccctggattgatcattatggctttggttaacttcttgtgtgtaactgagaaactgctcagccaagagagacggagagacacacggagagagacagagacagggacagagacagagagagagagacagagacagagagacagagaccgagagagacaaacagagatagacagagagacagagatagacagagacagagacagacagagacagagagagagagacagacagaaacagagagacagacagataaagagagaaagacagagagacagagacagagagagagagagaaagacagagagaaagacagagagacagagacagacaggaaagatacagaaagagagagacagagagagagaaagagagagagacagggagagaaagaaaaagagagagagaaagagaggagagagagaaggagagagagagactgagactgagtttgtctccaattggggttaacagaatttttggtggaattaacaccactttttatttcttacaagaactttctctatttaattttctctatttgaaaaaacttgagatgtaaaatgcagatgttcatacccaggtatgttgctgaataaaaactctgtatattggccaggtgcagtggctcgcgcctgtaatcccagcactttgggaggccgaggcgggcggatcacgagrtcaggagatcgagaccatcctggctaacatggtgaaacccctaaaaatacaaaaaattagccgggcatggtgacgagtgcctgtagtcccagctactcaggaggctgaggcaggagaatggcgtgaacccgggaggcggagcttgcagtgagtctagatcgcgccactgcactccagcctgggtgacagagcgagactcygtctcaaaaaaaaaawaaataaataaataaataaaaaactcgtatattaaatgtaatcttattcaatatatactgtactcataagcctaaaccccagggtttttcttcctttatatattaacatgtgttttgaaatgtgcttttgaaatacaaggggttgtaaaacattgaacytgcagaatgtggacaataaagtaaccatttttgtacttatcaaagtttcaaacaaccctagaaaaatttggaaaacttttgcaagaatcttgtctgtaaggtttatattctatattaagaagttattatgtaatgcacatacagatacagataaaattacttttcacagattaatttttacagatatttttatctgcctttatcaccaagtatttgatttgtaagttgtttaggtgcacctcatatgtgtgcataaaatgaacaaggtactattcatgtcacatccatttcagttctttgttgttggttaattctagcatttgtactgcattaaattattttattgcagtgttgatttttattttccccatttgcactgaagagaatataaggttgacatttctttttggcatgtttctaagctcagcaaatatagcaaccgaggtgctaaatttcagtcaaaaatagaactcctcagcctcattttggaaatttcttctcattcatgcacagggattctagtgtcaaatttttagctctgccctctgctggtcatttcaaattatgcagaagaattctcagaacagtattcatttccaaatataaggagttacaggaaggcgtcttaaaatttcaccactgcaaaatatattcacaggaagattaattgtaatagctttacattttaaaatcaaaaattctttgaggtaaatttttgaaattagagagtagcgaaagctttatagatttttcaagaaaatagcatttgtgttttttttyccctgagtacaggtgaaaacaaatatggttatagttaaggtatcaataacattagagaaaacaatctgatatgtataaatrctaatgttgattaagtattttttgtcctcttctgatacagcacttactccattaaagtctcttgattggttaaaataacacaacttccttttcagataaaacagatttttaattaagttgtatttgctaaaggttatatgctcctttagctaaatgattaacccttattgaaatatgttttcacttttaaggatttgaacaaaaattttgtacagaagcttacatcaagatacaaagatcatggatgcttatagatacgatgaactgcaaatgaaaattgaggtcagccagccatcagacatagtcaacaaatcacgcgggtggaaactgggtagtctcttctgtgtacagaaggaaaatgattattgatgaaacaagacatcagtccatcccatgtgctcattaattatgaacaagaaacaatgtctgtaaacacaaggaaagtttttacaacgcgagaccaagaaaaacagggaaggcatatcttgctcacagccttgttagatcaaggctttaattaaggtcaagctgatatttaataataatttgagactaaagtccagctaaagagtactgagctaggtgatgaaaattggttttgtttctcaactcttaccaacggtgtggcctcaccagtaaaagtcaaactaaatccctctagtgacccgtttaatgctaatagtcaccactttttgagctttgctgagggttttacacatgtcatttgatctttaacaccccttggaggttttgttaggtgtattttttataawgagactggccataataattagtagagaagcattgagatctaggtatgataaactctgaaatgcctgctcttaactgctgtgtctattatgcagaagtccctaaatctattttggaataatcattacaggctctrcatccacacatgttagcatttcacaggtatgttcaaaggcaaagagatgataggttttcacagtaaccttccctatatccatagcttcagaaaataagaaatatatggtagaaattaaccatccttctatgggwctatacatrgatattatggataaatatcctggtttctaagtcccaattgttatgttgatttaagggcayggtctttagaaatgacttgttcaaattctctactttattctattgaagtatatttgggctcagtagatcaaagcactgcacgtgaaggcctacctcrtttttaaatgatgataataataactgtagccataatggctatatagtctactaatgggtgagtcagtgcccattctaagcaccaacragtcaccctagtctataagtagcagagcatgtcacagatcttaatctcagttccagcctgtttcctgtgctatccgtggttggtgacagatcttaaggctgagcccttattttagcttttctttctgtgaaaagagacccaacaggcagctttcatatatgtgctacttctgcttggtatgcgctttcctggrgcgaattgttcaaacctcaccttcagctaacacctttgagaaaatgtaagctccggtgtgggcgaagtctggattctgagagacaggagtcttagaaaattgtgaatgcagtttcgtacagtatttctttttgcttaagaaaatctttatgataggcatttagatgttgccccactcagcttgagacttgctgtctaattttaagactgaatcactgaaaagtgtaagtctacctctgaaggagcagaactctctgtgtggcaaagcagaggggccaatggactttttctttattttatttttttgagatagggtcttgctctgttgtccagactggagtgcaatgctgcgatcatagctcactgcagccacaaactcctaggttcaagcgatcctcccaccttaacctccctagtagctgggactgcagatgtgcaccacctagccaatctaattttttttctttaaatagagatggggttttgccatgttgcccaggctgctctcgaactcctgggctcaagcaatcctcctgcttcagctggcctcccaaagtgctgggattacaggcgtgaaccaccatgcccggcctccaatggactttttaatgcaygtcactgttctaaattaawccctgctatcagcacttttcatattcccttttcttattccttcttgagggtaggtaccaccatgggctctggcatttacagaatacacataattctcctctctrtctaatccagtcctgatcctctgtcttctctaggccctgtctagaatctgtgtgctcttcactggrcccttttgatactccgagctcatttaaaaaaaaaaaaagaaaaagccttacattccttttattccttcccttaactcaaaattggtttccttttataaggctatagtttttgaaattcaccccactctaattccttcctttggatcttctgctctcatagagccaggaggaggatgtgtgtgtatgtgggggtgggttccatatgcttaaccttttgtttccgtttccaaatttgtcctagcagtagcatcatgcggtagactcatacataccacgctctcttcttcttacgcttgttcccataattgctggagaacctcagcacagtggccctgttgcctgtgcctacttctgggatgagctaggactaagcagagacaacatcccragaaactaatgtcatgctagaataccaatstatgaaattctatttctggaacctttgctgctctactaagcagatccatgcagagagaagcctgccactgtcttggcatttctcagcctttcaaccctgtggagtgtctattttgcaagtcaccacctccttctcccttactcagagccatcagtgattattggagacagctacaaaacagtggcaataaaatccactaaactttccagaggcccagtctgagttgttcaccctgtagccctgtgattttgggtgagttacttatttgagacttagtgttttcatctgtaagatgaggaaaatagaagagttttggtgaggatcagataaaatatcaggcacttatgtaagagaacattatagagtaagtgtggtggaatccccaggcgggtctgagtcatggctttgctgagtgattgctgtgtggcactggctggctcayttgtcctccgtgggcttggttcctagttgttaagatggagggttagtgatatttacaacgtgggctgtaaaggggctatggcaatgcccagcatagaacgagggctgagtagatgctagagccattttatcatcatttttgttgttatattcatggcaggactttttcgggcaaaattcttatatcatctcatttaatctcactcggttctcaaaaagtacccattgagctggttgtatttacagttttttttttttttttttttgacaggcttgcagttgtacgatcatagctcactgcagccttaacytcctgggctgaagtgatctcccacctaaasctctctagtagctggtaccacaggtgcatgccaccatgcttggcaaatttatttatttatttttttgtagagacgaggtctcactatgttgtccaggctggccttgaactcagggctcaagtgatcctctcagctcgaattcccaaagtgttgggattacaagtgtgagccactgctcccagcctgtatgatgctattttataggccagggactaaaggttctcacaggtaaatttctagaaaaagatggagttatgatttaagcccagaagttgcctcatttaaatttcatgaactttttgttggattatgataaagctaacatgcagtaaggggttcaaraagtgtgaacaccagccgggcgctgtggctcacacatgtaatcctagcatttgggaggccaaggagggtggatcacctgagttcaggggttcgagaccagcctggccaacatggcamaaccctgcctctactgaaaatacaaaaatcagccaggtgtggtggtgcatgcctgtaatcacagctactcsggaggcaggagaatctcttgaacccaggaggcggaggttgcagtgagccgagatcaggccactgcactccagcctgggcgacaaagtgagattccatcaaaaaaaaaaaaaaaaaaaaaaaaaaagaagtgttactacctacaaggcctacccagttaagaataattcatgtccgtgtcttaggagaacgtacgttctcactggagagagggagcagacagacaatgcatcaaagagaattctcagttcaaacacagtcaatgctgacacagatagtacagagtgctctgggaacacagatgaagcaataaacacccrtgtaagtggaggaaggccccattctagaaaggtggcatttgaagtggcacatgaaggttaagtaggagttttcaaggtggaaaagacaggttgttcttggcggaaaacctggtttctgcctcagagatacggttggctgtgaaagatcctgacacattgaagaaatggtgagcaattccagttggcagaaaccaaggtgggctgtgaaggatgggcggagacagggatgggtgatacctgttactaagggcatcttcataggcacatccgcaatcccaattccatctcagaatcattagaggtctcaaatatttgtatttactcatttttaaaggctagtcaagtgtagtagtgagaagaaggaaagagtagaacaaggaatttgatctgtaactgattctgaacaatcaattgaaatcaattgaaataactcactacccttggaccaaccagagatctcagatttgtagtagcaagaaaggaatatgctaattttttccttccttccttccttccttccttccctccctccctccctctttctttcttccctcccctcccttcccctcccctccttttcttttcaacagggccttgtgctgtcgtccaggctggagtgcagtgttgtgatcatggctcactgcagcctcaacctttcagacttaagcaatcccccscccgaccttgacctcctgagtagctaggactagagttgcacaccaccacaccctgctaatttttgtatttcttgtaaagacagggtttcatcatgttgcccaggctagtctcaaactcctgagctcaagcaatccacccaccttggctgccaaaatgctgggattacaggtgtgagcaaccacacctggccactaatctttgctttcgatgaagatgattttctgcatagtggagagctagctaccaggatgtggtaatcatgaaagagactmtaaatcttgttttaatttttatttttttaaccaatctcattctgctgcccaggctggagtacagtggtgcaatcatggcttactgtagcttctaactcctagcctcgagtgattctcccacttccacctccatctctggaatagctgggattagatgtgcactgccatgcctagctatttttaaatattttgtagagacagggtctagctatgttgccaggttggtctcaaactcctggcctcaagtgttcctcctgccttggcctctcaaagtgctgggattatgtgagccactgtgcctggcctatcaaaatgtttttaaactagatttgagagcccaragtgattgagatgaataagaaacacattctacagacatatctgagatggaaataattcattttggtgacttactagatttagaaggtgtgaggttgtcaaagatcaaggtttctagttttgcagattagatgggcaattctttattgagtaatgttttttaataattcatgctcttaatttttgatgagcaatgcacaatttgttagtatataaaaggactctttagctatatcattaaaaaaaaaactgaccatctggactggcacttcaaaattagatacttttttttttttttaataatgactaaaacttggaatttttataaatatatatcaccgtaaagggacagacgtggtggctcactcctgtaatcctagcactttaggagcctgaggcaggagaatcccttgagcctaggagtttgaaaccacctgaggcaacatagtcagactctgtctctactaaacaacaacaacaacaacaaaaagtcagccaggcacagtggtgcatacctatagtcccagctactaggaaggctgaagcgggaggatcacttgagccaggagtaggaggccgaagtgtgctatgattgcaccactgcactctagcctgagcaacagagtaagaccctgtcaacaacaacaacagcaagaagtatgtcattgaaaacagcctcatgcagagggaaatgttcagctgggtttgaggcagataaaaaaaatccatttgtttaaactccaaaccattcactacttccgaaaatttattttaggatacttaaaatttattgattgccttctcttaagatgtctcggcagaggcatttccttttaattcatccatgttgctcttgttacatttccaaaggaagtgctacagaggtaatgcagagtcaggaaactggttccagtaacgctgtgaagggagtgagggcagggtttagtctctgaaatagactgtgcacttgcttcacaagagggattttttctctccaacagctgagttagagcaggctaaggtggtgggctgaaatcctagttggccctaggatggtaagagaaagcatccactcttgtgatgggacggaattatgcaaagtagaaaaggtttgtcaggacctgtctccagaaaggatcaagcagaatgcattgaccaagaagatggaatttgaacatctacaggttagtaggaatcactgaggaagtgggatatgttagattaatagatgcaattcattaatcgcctgaattataatatacaggaaagacaagaagaaagaaaaataagatctagaaacaaagaggatttacgttgctatttgagcaagcttttgaaagctttaggaagagtggacagaataatagaattattcaatttaaatggatttactcttaattgtacttgctgatatctagaaaatgaaagttaagaaaaaaactttatttcttagcaataaaaggcatttaactattgactttaaaaagtctaccgcacagcttacattatttaatatgacaaattattgtttcctctacagtgctgtgtyaatagctaatactttatatagctaccttctgaagctgtagagaggcttataactttaacgtttcatgctgacatttagttgatcctagtttatctggtataaagtagttgctcacaattaattactcaagaactgagcttcgtgtatgtctgtggtagaaatctgtgggagtatgtgagttcattaaaaccgtgctttcctagtcattgctattagtttaacgctttccttgaaatatcagtcactgagagaaataatagcttctgttatggctctgcacagctgtactgaaagattttgttttcacttttcagaagtattagaaaagttgcctccatgtctgggttatctgaaggtgaaaccagtcaatgattataataacttcttttttaatttagaagggaaataaaggaaggaaggggagaaaaggaagtaatgaagtgggggaaaggaaggaatgaaggaaggaaagaagcaatattaactatagtaactgtagttggtactatttatggaacacttgatatttcaggcattatgatttgcaaaaattatctcataatatccccattttacagagggaaaattgaggttcagggagattaactattcaagactggcacttcaaaattagatactttttttaaaaaaatgactaaaacttggaatttttataaatatatatcactgaaaagggccagacgtggtggctcactcctgtaatcctagcactttaggagcctgaggcaggagaatcacttgagcctaggagtttgaaaccagctgaggcaacatagtcagactctgtctctactaaaaaaaaaaaaaaaaaaaagtcagccaggcacagtggtacacacctatagtcccagctacttggaaggctgaggccttccaggatttaaaattawttttttaaattctaagagcatcccctaatccccataagatcctacctctctcatttttttttcttgcagctggataatgttagaagatgtgttaaatatttaatccagccggaatgccaagttagattcagcttggatttgaaaaacaaaaccaaaccaaaaagaaaaccactggttttcaaggcctcagagcataagctttgtgtattacaggaaagcttctatgcttggctggaggtaggagaacctttctgtctttttctgaatttgctatgaccttgggtaagtcaactgacctccctgggtgatgttcagagcattattgatgttatataatttattcttatcaatgccacaaggttggctagatatgtttcctctctaatgtatgattaggaaagagtcatttagacttcagttaattttattttcttcaaggtcaaccaataattcagacatcaagttgaatggaaatgagcttctaaatataggtcaaatacttttataaaaatcacataactgcatctcccccccaccacgcctgaatttgatccatctcccaataagctctcccaagctactacttagtttctattgttagtatgttactgaccaagtgcaccagtcctgcattttgtgtcgaactgattaataattttcttctgaacccctaatgcatcccctattttgtccacactctcataaagactctagttgataaaaatgacaggctgaatattgctaatgtaatatttcaattcagatgtaacatctcttaaagattgagctaattaataccatgtttttatgtttcatattgtatttattattctttggtagcttaatgattacccttctacataatatttatatatagtcttttatctggaaccaataagaagatttgagaaaagttataaaactgctataaaacattataaaaactgtttcccgttcaacctgactgctttgtttcccttaattctgggattttccatcatttgcattatctaattgatgatagaatagtctcatggtaccataaagtaaaagactaacaagaaattttaattggtttgcttgtccaactgctacaaaattataaagactgcctttttctgtgttttttttttaaatccaccctatgaaacttatctttatgtctgtcttttctctgatacgctggggtttaaagtgagctgctttagcctcattagaaataaaaggtatcgtgttaatgtcttctagatgacctttagtaatttgagagatattctccatttttgtaggcttgacrctctattttttccctgctcttctaactcctgtattctgtggcttctgtatttgacagtagtagccccactcccagcaaacctgagccgtcacatctctctcttttggttatggagttcaaaatggggttcctcacccatctaagagtcaggtattactttgttcttgctgtgtgagaagtggaaggctagtgaaatgaactaataggatcttcaaagtgaaacagaccatatccaacttgtagccatgtcggaaagcctgtccacactatcattacaagctcagaacagagtgtggggagaacctattctatttaacctaacctgtttgtggggagccagccctgactgccatttattacttttaattctaattacaaataatgcatgctcactgagagggtttgaaagtttattttaaaaagcccaagtcatggtggtatgaatgtttttgctctctcttgagtgcttagattttcaatccctcttggagcatatgaattatttgcatacatggagakatatatatatatatctgtgwatatatatatatatatatatatatttgtgtatatatatatayatatctgtgtatatatatatatayacacacacacacacacacacacatacacacatattcttttggtcttcagtttgttcctcatcttagaattttttttttgttattaataaaataagagtgttaacaaaacctctggactcaggtagtttcattggtgaattctaccaaacatttaaagaagaaataaaaccagtcttagtataaactctttcagaaaacagaggaggaatgaacactgcccagcttattttatgaggccaaaatttccctgatactagaaccagatacagtcattagaaaactatagctactatccctgataaatgtaaatatttattaatgaaatatttgcaaatttaatccagcaatgtatataaaggaatgcaaggctggtttaatatttgaaaaccaaatgacatatcaaaaccaggttaggttgattccaggaaagtaaggtcagcttcacatttaaaagccacatatttttcattatatacattgtatgtatatatacattatatataatgtatataatatatgtatataatgtgtatatatataatgattctccctagagattatcagaaaagygtttgataaactgtatcaccattcatgacagaaactcttaggaaacttagaaatagaaaacttgcttaccctgataaaggacaattataagaaatctacagcaaatatcattagatggtgaaatattgaaggtttgttcttttaagtttgggaatgagaaaacaatgccactattaccactctgtcttgtactgaacaattattcctatatggtctagaagataaataagaaattggagaagaaataaaactgccattatttatgatgatgtgattgtatatgtaaaaatttcaaatacatttacagataaataattagaaataaaatttacataattactgaacacaaaatcratatgtaaaaccaatgccatttctgtatcagcaaacaaaaattttaaaaatacttaaaaaataatacatttaagacagtattaaaaacatcaaataatctaagaagacrctgaacagacatgtgcatggcctgtatgcagaagcctaataaacttcattgagaaaaatcagaaatgacaagtatatgaacagatttatcatgtttatggttttgaatttttttatttcatttctctccaaactaatagattagatgcaattctaatcaatgtctcaagggtgtgcgtgaatgcgtgcttgtgtgctttagtgggatgtgacaaactacccctaaactttatgttggaagggcctagaataaggaagatgatctttaaaaaaatcaaagtgggaggccgaggcaggcggaatacgaggtcaggagataagagaccatcctggctaacaaggtgaaaccctgtctctactaaaaatagaaaacaattagccaggcgtggtggtgggtgcctgtagtcccagctactcaggaggctgacacaggagaatggcgtgaacctgggaggcggaacgtgcagtgaggcgacattgtgccactgcactccagcctgggcgacagagggagactccacctgaaaaaaaaaaaaaatacaagtggaaagagttaatattccaggtatcaagacttattataatgcaacagtaattaagcattctagtatttgtgcaaggacatagaaacacacagtggaacagagtcacctaacagactctcatgtatatagacagttaatgactgacaaaagtggcactgaaaagcagcttaatacagccttttaaataaatgagatggggtcaactgggtaatcatatgaaaaagataatgaaagttgatatccatctcacaaatacaaaactttctaggatgattataaatgttaatgtgaaagataaaataacaaaccttctggaagataatatgggaggtatcttgttgcttatggagtaggcaaaaacttcttaaacaggacaataccctggctatagaggaaaagactgataatttggagtatattgaaagtaaatgggctgggtgttgtggctcacacatgtaatcccagcgctttagggggctgagatggaaggatctcctgagctcaggaggttgaggctgcagtgaactgtgattgtactctagcactcaagcctgggtgacagagcaagaccttgtttcaaaaaaaaaaaaacaaaaaattgtcaaaagaaattatgaagaaagcaaaagcagctgggcatggtggctcatgcctgtaatcccagcactttgggaggccgaggcaggtggatcacagggtcaggagttcgagaccagcctgaccaatatggtgaaaccccatctctactaaaaatagaaaaattagccgggcgtggtggcagttgcctgtagtcccagctactcaggaggctgaggcaggagaatagcttgaacctgggaggcagaagttgctgtgaaccgagatcgcaccactgcactctagcctgggtgacagagcaagactccgtctcaaaaaaagaaagcaaaagctagttatgaaacgattcacattttcttttttgtatgttgattttggtaaattgcatttttttccttaaaaattatgttttatctaatatttttaaattttggtgtaaagttattctaatatcttacttactactttaaagcctgtaggatcaatgttatgtttccttttttatttctgacattagttatttgtatcaatacttgattatacttgccagaggtttttaatattattagcttttccagaagacttctttggaggctatttattaacacttaaatctgtttccttctttctcccttctttgggctaaattgctggatctttttctctcctaaattctttagatggatatttaacatactgatttttgtaaccttctatctttttaatatatgcatttaaacctacagatttctctctaaacatgactaactgtatctctaaagttatggcaaatatttatattatccttcatttaaaaaatattttaaaatgctgactctgttgtctttttcaataatgtgtgatttagaattgtattgcttgatttccaaacatggagactttgttttatcttcttttattattgatttctaatttaattcattatattaagagaaaacatactcttcatttcagtatgttgccatttattgagatttaccgaagatgtgatcagctttcatcagtgtgctgtgtatgcttgaaaagaatgttttaggttaaatgttttgcttcagtccattaggtaaattgctgattatgttgttcagatcttccatatccttactttttcttttcattgtagcagctattgagaaagttattgctactatgtttgtggacatgtgtttttccttagagctctgccaatttttgctatgtgtgctttgaagccttgttatttgaagcacgcatatttagaattatttattttccttatgaattacatttttatcaatagaagactctcactttgtttcttatgatgctttttgctgtaaatcattatctgttattaatatagctatacttgccttctttagtttaaaatttacatgttatatctttttactttctagtaatcttaatcatttttataccttttcatttgtatcttcaataaagagcgtaggttkggagctcattttttatcttgacagtcttttgttttttactgaagtataactaagtccatttacatttaatacaattgtttaaatgcttggatttaaagtactattttattgtatattttctatttgtcttatctgttctatagtccttttccttttgtgtcttttggatttatcaattactctttactatttaattgttctctctggtattttaaaaactgtaattttaccaactatcttttattattattatttttatttttattattaagacaaggtctccctctgtcacccatggtggagtgcggtggcataatcatagctcactgcagccttgaactcctgggcttaagccatcctcccacctcagcctctcaagtagctaggactacactacaggggtgcgtcaccaccccaagataatttttatgtttatttttaaatttctaaatttttttgtaaaggcaagattttactatcttgtccaggctggtcttgaactcctgggctccagcagtctttccgccttggcctcccaaagtgctgagattacagacctgagccactacacctaagcttatcttttaaaactgcatacatttttgccttttttgttttttggtactttcacctatttcctgacaaattaagcaaccttaagacctgtttccagacaaattaagcaaccttgagattccctaacttaataaatttcacttccaagttacacattgttattttattttaattctttctatattatctccacaggacattaatactgtttatatgtttagtattcatttaatcttttttctttgttctttctttctgcatcttcaggaatctgtttgggattattttctttcagcctaaagagcatctttttgtatttcctttagtgcaagcctgctaggtgacaaattctttagtgtttttggtcttaaaataggtttctttcattttcttcttgaaaaatatttttacaaggtgtagaattctagtaggcagtttaaaaaagatcattacactatcttctagctttcaatgacactaacttcttaacaaaaataatctgtttattcattcattgaaggtcatctatttgtggctgctttaaagatgttatttttagcttttttatagcagttttactgtattcacccacttatagcatttatagggctttgaaatcagtagtagtttgatactttctttcattttatgttttcaggaatgatctttctatagataatgcttctaagttattctctttatgatatctttttttctgggactccaattatacataagttagagttcttcactgtatcttttatcctcttattttttctgcaatatttcccatccttttgactccatttcttcattctggattgtttctttttatccttctttgaatgcactaattttttattcagctgcttctaatctaccattaagtagatctgttgaggttttaatttggctatttgtcagttctagaattgctcagtttttaaaattatttctagttatctgttggcattttttctttctgtttaaaaatttaaatcagggtctcatgttgtttcccaggctgaagtgctgtggtgcgatcatagctcactgcagcctcaacctcctgggctcaagtgatcctctagcctcagcctcccaagtagctgggactacaggtatggacaccacacctggctagattttaaaattttttgtagggacggggtctctctgtgttatctaggctggtctcaaactgctggactcaagcaatcctcccaactcgacctcccaaaagtgttggcatgactggcatgagccaccactctttgctgaagtctattttgtcttttatcttcttggagagatttaacatagctattttaaaatgtgagtctgataacaatctaggatccctgtgtgtctttttctgttgtctgttttcctattgatttttgtttattttttatttatgtctccatttttctattttttttttttattttatgctgtgcaaatgcttagtttgatctcatcttttcccagataggatttatgtttgcttttgccggggacctggggcactaatattccaagatcaccttgaggtatgttcaaagatttagatgctttgaagttgaattttagccctgaaaatgttcgacctgccttcttctagttaatctttgttactagtgtgatggaattttagattctaaccccaagtgagaggtgttggtagggccagtctctcttagaggtcagggtcctccagtccctttccccggataatgtgtccacaaactctcacaggaatcctgtagggtgttgaggggtgggggcaaaaggatcccccatgagccaacctccgctcactaggtctgtgttctcccttgaatcctggcttgctaattttttcttaatttaatattccctttcctcttcccttcaagatatatataaactcacatttatgtgttccatgttttttatatatatgtatataaatataaaatatatatatataaataaacgttacctcattatataattatacgttatgtagccattagctcatgtattattattattaatttttttttggagacagagtttcgctcttgttgcccaggctggagtgcaatggcacgatcttggctcactgcaaactctgcctcccgggttcaagcgattctcctgcttgaacctcccgagtaagtgagattgcaggcrccagccacmaagcccagctaatttttgtatttatagtagagatggggtttcaccacattggccaggctggtcttcaacttctgacctcaggcgatccacctgcctcagcctctcaaagtgctggcattacagatgtgagccactgcacccagcctcgtgtattatatttacaatataaatttatagccaaatactttcacttggcaacataccataaacagattttacatggcattcaatgagatgtgattttaatagctcttgattgtcccactatatgtacaamttaaattttttattcttactgctatttttggaaactctactttttttcttttgtaaaaatgcaagtaacattggaataaatatattctagtacataaatatttttgcatatcactgatatattctccccttagagaagacttctatgagtggaattggtggttcaaaacagatgggttgactgggcgcagyggctcacgcctgtaatcccagaactttgggaggccgaggcaggcggataacctgaggtcaggagttcaagaccagcctggccaacatgatgaaacccaatctctaccaaaaatacaaaaattagctgggtatggtggtgcatgcctgtaatcccagctacttgggaggctgaggcaggagaatcaaaccaacttgggaggcagargttgcagtgagccaagattgtgccattgcacttgagcctgggtggcagagcaggactccatctcaaacaacaacaataacaaaaaacaaaaaaaaccaaaagggataggtttttaaattattttgatattaaatttttctgtagaaaatttgtgccaatttgtatctcactggtagtaatgttagtgcttcttttaagcacagctaagaaaacactcctttgtcatttttattttattttgggtgggggggacagaattttgctctgacacccaggctgaagtacaktgatcacagctcactgcagcctcaaactcctgggctcaagtgaatttcccactttgtcctcccaaagtgcttggattataggtgggagccatagtgcctggcctatttgtaaacatgtcagagatctcagttcatcctggggtttaatcttttgatgttatcttattattcttttacatttgtcattttacatttgtcattttacatttccatttttaaataagcccttttatttaaaagccaaccatagatgctttgggcaatcacatttatgtgttccatgtagagctgttttaatggctwtgtyatagtgctgtgtgaagattgtggcagaaatagaaattataagtgtgaagatcatgcaattatttaaaaaatctgtattatttataaaaccatgtgcactatgattacagctacataaaacattcaaagaaaatttagaaaataggctgggcacggtggctcacacctgtaatcccagcactttgggaggccgaggcgagtggatcgcttgaggtcaggagttcgagaccagcctggacaacatggtgaaaccctgtctctactataaataattggccaggcatggtggcacactcctgtaatcccagctcctgaggaagctgaggcagaagaatcctttgaatgagccaagattgcgccaccgcactctagcctgggtgacagagtgagactctgtctcaaaagaaaataaaatttagaaaatatacacagtggatgctgtggtattatgatactgattagttattgtttttcttatcttcccctctcaaaacaattctatagggttgtgctattattttttaataattaaatgattaacgcaaacccagatattgtgagttcaattcaggctactgtcagtagatctaccttttatccagccagtcagtcatcttataaatggttcaaatgagttaaaataaatggacatctcagctgggcacagtggctcacgcctggaataccaacattttgggaggctgaggtggaggatcacttgagctcaagagtttgagaccagcctgggcaacatagcragactccatctctccaaaaaacaaaaacaaaaaagctaggcatcatggtactcacctgtagtcctggccacttgggaggctgaggtgggaggatggcttgaactcaggaattgaaggctacagtgacctgtgatcacactactgcacttcagcctgggccacagaatgagaccccatctctttaggtaattaaataaatacggcctttttgttatttccccaatagtaataatgtgtttattgctacctagtccaaaaagtatttacaatgattaggaaaaaaagatatagtaagaaaataaaaaggtgctattttagtgaaaakattaaagaaaagaaaaaacaatactgaagtggaaccaggaatgagactaatcaaaaacacatattccagaatctccaaacatgtggcaggtgggccatatgtgaatttcactgtttttttaaataacmaaaatgaaaagcacatctgatcaacacaatttatattgtccctgagattaaaaaaaagaaaacacaaatggccaggtgtggtggctcatgcctgtaatcccaacactttgagagggccaggcaggtggatcatgaggtcaagagatcgagatcatcctagccgatatggtgaaaccccgtctttactaaaaatacaaaaattagctgggcgtggtggcacatgcctgtagtcccagctaatctggaggctgaggcaggagaatcgcttgaacccgggatgcagagactccatctccgtctcaaacaaacacaaactcaaaataccatccaactatttagttctttagacagagctgtgaaattataagatcaggaataaatgtgtcttcagagccctcctacacragatattstgtaatgggatgggcattttcagtagtcttctgtggacttggcagtcttgtctcagatatcacacccaagcccaattcagttgaggcaattctttttgaggtcagtaggacaaggtgtagagccctctgctggcctgagatagatttatctacataatctagggatagatttkatttgatttgatttgatattgttttgttttgtttttgagacggtttcactgtgtcgcccaggctggagtacagtggtgcgatcacagctcactgcagcctcgacctccccccgggctcatgcattccttccgcctcagcctcaagtagctgggaccacaggagtgtgccaccacacttggctaatttttttatgtaaaatttttttttctgtagagatagtcttgctatctcgtcctggctggtctccatctcctgggctcaagtaatactcctgcctcggccttctgaagtgctggaattataggcgtgagccaccagcacacctgaccaggacagattttagagtggttataaagaaatcagtgagctgcatacttcgaggcaatttttatttttaatatttttttccccttcatgcaaactgtggcatcaggtgggagatagtactttatggaatatctgggatayagttaccatattttgctactttaatatgggtctgctggccttgatagacaattgagctggggcagtgctgatagtttcttattaagagaggaacttaaactcagattaattcccacacagatggacattctgtctctactcacagataagccaatcatggaatgagaatagcaacagttcctctcagacagtaataatctaggttctgcattaatatacagtccatccctggcgccgaccagaacccgtggacatggtgaaccaggttatcaagtgcaaggctgcagttgcctgggaggctggaaagcctctctccgtagaggagatagaggtggcacccctaaaggctcgtgaagtttgaatcaagatcattgccactgcagtttgccataccaatgcctataccctgagcagagctgatcctgagggttgttttccagtgatcttgggacatgaaggtgctggaattgtgggaagtgttggtgagggagttgctaagctgaaggcgggtgataactgtcatcccattttacatcccacagtgtggagaatgcaaattttgtctaaatcctaaaactaaccttgccagaatataagagtcactcaagggaaaggattagtgccagatggtaccagcagatttacttgcaaaggaaagacaattttacattacatgggaaccagcacattttctgaatgcacagttgtggctgatatctctgttgctaaaatagattctttagcacctttggataaagtctgccttctaggttgtggcatttcagctggttatggtgctgctgtgaacactgtcaaggtggggcctggctctgtttgggccgtctttggcctgggaggagttggattgacagttatcgtgggcggtaaagtggctggtgcatcccggatcattggtgtggacatccatcaagataaatttccaagggctaaagagtttggagccactgaatgtatgaaccgtcaggatttwagtcaacccatccaggaagtgctcattgagcggactgatggaggagtggactactcctttgaatgtattaggaatgtcaaggtcgtgagagcagcacttgaggcatgtcagcagggctggggcgtcagtgtggtggttggagyagctgcttcaggtcaagaaattgccactcatccattccagctggtaacaggtcgcacatggaaaggcactgcctttggagggtgaaagagtgtagaaagtgtcccaaagttggtatctgaatatgtgtctaaaaagataaaagttgatgaatttgtgactcacaatctgtcttttgatgaaattaacaaagcctttgaactgttgcattctggaaaaagcattcgaactgttgtgaagatttaattcaaaagagaaaaccagcgtccatcctgtcgtgatgtgatgggagcagcctaacaggcagagagaagcgcctcctagaccttcagcagctactccagagaatggtgtgatgtgcgtcattcatgaatctctgtaatcaaggcaaggataattcagtcatggactggactctcctccacataaataattgctagctcattaaggaatattttaacataataaaagtaatttctacaaaaaaaatacagactattggacaatgaaattttcttgcatatggaagaaccagaaaaaatgttgatctgaaatattttaaggtgggaaccaaaccctcatcttacctgtaaaaatctcagcgaagcactcttagaatgcctacctttgagcattgttattttctggtggacacactatgataaattatttgtggattatagctctgagttattttaggtgttgttatttataacctagtraaaagatggggaaatagctgctaaaagtaacttttctctttcttaagctagcaggcctgtagcctactttacgccacttttaggttgtgtttttaaagtttctcatatgcctatggtagaaagtttgtatttgttttctttaataggaagatacaatgtcattccgcaaaagccaaaacagatctgaagaatttaaggatgtggagtggagtcatgaaaatgcatccctgctttaacccaaaaataaaactgtgatttgctctgttaaacaattcttatccatcctgaccttgtccttaatactcacagtatgttgattatttatacttgacattcctgagaaaacaagggaatgtaggatttggtaactggtagctagaaactcatataccctattcgggaaaataacacatttgtgaaatattacacatacacayacacacacacacacacagaaaaagacatttatggatggttgaggaaatatcacagggcaattgttaattgaatgcaaaactggttgacaaacagcacaaatgccaagaaaactcagtttgctcaactacttatagtcatgcaaagagcacagaaagatttagtgctggttaagtagagatgatgtgtaggtgagataatgattttcaattcctctgaaaaggatttttttaaagaaataaagtgtgactattgtaatcaaacatagatttttaaaattcaaaacaaatagtattcatggcatattacatttgaatatcaccatgtaattttcatagttcttttcacatatcatttactcttccctcatgcaagctcccccaaaaagacaagggacacatttttcctgatttactgatgagaatattgaggctccaaaaggtgatgaggtttgcttaggggggagcaatgaatatatcttaggaattttatctattccrtgttttttctttaaatagttaattaccaataggtttagacataccagataacctgataccttcctttttccatatgatacccacaaagtttccttttggttccttggtaaacaaatgaagaaaatgagattagcagctacagcctctgcctatattgaccagccatctcttttatttatttttacttgataaatgtgttaattcagtaggcagccagtggcccttttttttgttttttgttttttgtttttttttagatggagtcttgctctgtcgtccaggctggagcacagtggcctgatcttggctcactgcaacctctgcctcccaggttcaaacaattctcccgcctcagctttccgagtagctgggactacaggcgcctgccaccacgctcagctaatttttgtatttttagtagaaaaggggtttcaacatgttggccaggctggtctcgaactcctgatctcaggtgatctgcccggcttggcctcccaaagtgctgggattacaggtgtgagccaccacgcccggcctcaagtggcttttatgtagtcatcatagcactgtccagagctaggggagatttacaagacctgtgtccacccttctcatcctgaagtcgtttgcagtcaatttgaggaaacatgatatacactcaggactaggggacaagccactgttttggatagtacaccattaagtgttgaaatgtggggtgacaggtgtgctgagttagctgtcccattcaggagtggcctttcagcagaggtgggtctgattcaggtgaaatgggacttcaactagattttttaatgattgattagactccttgagtgggtagagctggagarggcattctagtggcatgaagcttggtttaggaaacaagaaatgaatctgggaaggaagatggtgggaatataggaacgttgaaatgatatttaagttgaagagttgggatttgattctgcagacacggaggaaccatggaagaaatctgttttgcttattttctgctagtggagctacgtgatgaatgggaggctttgagattactgttacagcccagtaatacattacagttctgaggtgtggttcaaagacagggggactgaccagatacttttgtttgtttatatgaggttttatagagtgcttttagcatgctttgtattttggtgaatgatgaaactcagtgagatagtttatccccttggttgttggtgctacctcttttatatggaaaaaactatgtctgaggctgttagtaggatgatggctctctaggcaaaagtctttttgtggttgatcatgatgccaggtctggagcctctcagtcactccagccctgcttctctccaccaactcccagaggagctggtaggccaagcatttttctaagcatgctatagatagcatattttacacatgaggaaccgaagctcaggcttagaagcatgctgttgtggccaatttggttctgctactctggaaaatattaggagggcaatggctgcaaagatttaagataggctgttttctggggctgtgtagaagaactgtagctaactgtagctaaaataggtatcattaccactaactggagggcggtgaaggatagagtggagagggcattacatttcagaaacttcttttctttctgtttttttgagacaaggtcttgctctgttgtccaggctagagtgcagaagcatagtcatcattcattacagcctcaaactcccaggctcaagtgatcctttcacttcagcctcctgagtagctaggaataaaagtgtgtgccaccatccctggctaattttttaaaaatttttaaatattctgtagaggtggggtctcactgtrttgcccaggctggtcttgagctcctgggctcaagcaatttacctgactttgcctcccaaagtgctgggattataggcgggagccacatgcctggctacagttcagttgttttcttaagccatcacagtatccatgttacctcttaagaactgacttgtcaattttatcatgtgctgctcttgaataagtgcatcttagctatccccaacagccttgcatttactgtttttaaaaaaattattaaaaaaattttaactgttgcaamatacacagaacattaatttaccaccttaaccattttaagtgtccaattcagtgttgttatgtatattcacattgttgtgcaatcaacctccagaattttttcttcttgcaaaactgaaagtctgtacccgttacattgcaacaacttcctatcccccatctctccaatccsggcaaccaccatttgactttctgacaatatgaatttgacaatgttatgtacctcatatgggtagaatcatacggtattcgtctgtttgtagcaggcttatttcatttagccaaatgtcctccaggttcatccatgtggtagcatgtatcagagtttccttctatttaaaggctaaataatttcccagtttgtatatatatcrcattttgtttatctgttcattcatggatggtcacttgggttgcttccacctttcggctgttgtgaacatgctgttatgaacataggtgtacagatgtttctttgagatcctgtttttaattctgtggcatatatatccagaagtgtaattgctggatcatatagtaattctatttttaattttttgaggaactgccatatattttccatagcaacagtatcattttacggtatcactaatagtacacaatgctttcaatttctccaatccttgccagcacttatgttctatcttgttgttgttgttttggatagggccttkctcttttgctgagctggagtgtagtggcgtgatcatggctcactgcagccttgacttccgggrctcaagtgatcctcccaagtagctaggactacaggtgtgtgccactatacctggctaatttttatatttttgtagagatgaggttttgccatgttgcccaggctggtgctttattttkttgttgttgttgtttgtttgttttttaaatagccattctcytgggtgtgaggtgatttcattgtggttttgatttgcgtttccataatgattagtgatattgagcatcttttcatgtgcttgttgactattttgtgtatcttctttgaaacaatgtctattcaagtcctttgcccattttaaaatcaggttatttgctttttgttgttgacttgttaggagttctttctatattcaggatgttaaatccttatcagggttgatttgcaaatacttcctcccattttgtaggttgccttttcactctgattgtgtcctttgatgcacggaagttttaaattatgatatagttcagttcattgatttttaaaaaaatttttgttccttgtgcttttgttgtcatattcaagaactcattgccaaaaacagtgttaccaagtttttcctgtatgttttcgtctaagagttttgtagttttaggtcttatgtttcagtctttgttccattttgaatttttgtatatggggtaagaatttactgggttttaatgaaagcaaatctcaaatgaagttttgcccaacatgtaaacatttattaaacatacaacattagtttgcacaagagcctatccaagctgacttgagagtcagagcgtggccagcttgccactctggtaggtgcttgacctcaccttgtgtgaaaggtccatgtgatacaaacaccaaggaataggattctgtgaccgactgttggcarcaggcaaagagacatcctcctaaactagaggtgggaggtagcactctccggctgtcacaccttgacatcatcccttgcctgagttttatcctttttaagtgtggggatgttctctgatgttgtactcaatctacttacattgaattccttcaggttctccaatgatagctcattgtctaacattcattatgttaattaaagccactaatttcaccaatgaaaaactatttctgatattcagtatgctaaatagcgcagtttctggtgttggtcgagataggatagctggaagatacatgagtagctcaaatgcttagccaggtctgaaatgtggtcctttctgatccaacgctgaggctaaccccaggaatctgaattctcagttaggaccaatgactgtccctaaatgtaaagcttaaactaactggtctatacattgtatcttcctgttcatgctggagattattttatgaatttcttaatttgttaaatacagaaatagcaacatccatccgataactcatttactttgtagtctcgacccagtgattacagtggttttttgtttttcacttccaccatactgttcttctctttgctttacttgatgtggatcaaaggtattagggaaatacaaccagttaagaaaaatgtcacaaatatagggcatgcatatattgagcatatgcatcctaaaatggttgaacacattgttattctgaartcctaatgagcagttttccaaggtgtttataggccatggagcaggcttccctgtgagatttgtagtttgtctcctggccctaggtatagtactagctgctttctcattctgtccagattctgttggtcygtagctggcgaggtctttcttggccagaagatccctattcaattctttttttttttttttttcttagcaggttcattcactgtttcatggtttctctcccagtttccaacctggaccccagataagtcggtttcctgggccttttgtggttgaaggcacgggagctattattgtcctgtggtgcccaagtacagcctgtcctttgacattcccacaagtatataaacaattttaaaagggatatcatattcagatgaattaaagatgctagttcagggagttctctgattgactgtctggactrtctgattttataattccctgcagggctacatagcatctctccctccaaagaaagaggcgtaggttttactatagaaatgaagttgaggcaaatgtggttataaagataaaatgactgcgtgaaaaaaatgtgtatcttaggaatctacactgaatagtataaaaatgctgttttaatgtttcatatatgtatgcatatrtaagtaatttacatagaaatgattttgcaatgtattagtcatggyttatttttttgtaactgaattaatagcatttcaacattttttatttttaaatatagcaagatcaactttatacctgggctgcagttagtcaacccacacactcrttggactattcagaagggcagtttcctaggcgagttccatccatggggccaccatccaaacctcccgatgaggaacacaggctcgaggatgctgaaacaggtaaccctttcctttgtcttcagagataactggaagaggcaagatagagagagagaagttttattaaatcttagttttaagtaatcttttatttttaattgcatggcattcagatataatcttcaaaaagtttttactttggggtcttttctctctttgttccttttgttgtcttattttgtgttattggctgggaagatagcgtgagatcagcctcaggtttatttggaggagttcagcaggatgatgaccccaagcctggttttaagaaaacactttatatttgtcatacagaactgagaaccatatttgtgtaacaatcaatgctttatggaatatggttgttttgtccttttttccccccttcttcttcttcttctttttttttttttttctggacaaggtctttctctgtcacccaggctagagtgcagtggagcatractcgctgcagtctcaacttccctggctcaagcgattctcccaactgagcctaccaagtagctgggactccagccatacaccaccacgtccagctaatttttttgtagagccagagtctcactctgttgcctaggctgatccagactcctgggctcaagcagttctcctacctcggtctcctaaagtgctggaattacaggcatgagccaccgcacctgggcttttcttcattttgttgtaataaattcccaacttcctcctggtggactgaccaggcataaatattgatttctgaagcatgagtgaggagtaaatagaagaacatcattgctattcatagatttctcctccacccgattttcctaaatggtaacatagatattagagttaagaattttgattttttttttctcattggctcatagagaggaagacagtcattagaaacttattttggatgcatagtagaagagcataacttaaaagcatggagcttgggctctgccaacttattagctttgtaatcttaggcaaatttcctaacaactgtattcagttttctcatctgtaaaatggtgatgagcatagcatgtactgtgtagggctgttatgagaattataggcatttatatgaagcattagaatgtagaatgcagtgcctagctccgtgtatttaatattatttattacaattattatcattgtttcatgtcattgccttattcatgaggtccctttcaaccgacaatgaccaacaatgtaaaaggttttattccagtcccccacccaaagttctgcacttgcctcccatttgcatcccagtctctggaggaatgaatttgcgccttttttctttccactgatgcactgaaatgagggcccacacttgaccttgaatctcccttttgagatgtccagtgcttttgaaacactgtttgatattcactaggtgggctgtactccctgaaatgaacaacaaatgagagagagggtgtaggaagtgttgttccaggaagtgttgttccaggttactgagtttatcgtaacacttacagagagcagtttctcaaaggccaaggcagacttcctttaagcaaagatcttcagagatcagagacctctaacatgatagcacctgaaaatcaagcaagtaaaaggacttttcgttttcaaaggaaaacacacaattaaaagtattgatcccattttctacactactctatttatgataacatttattgatacaaaatacttaggggtagatatagttgaattaatcagttgcatggagagcccttttatcccrtgttttrcatcattgattgggtgatattttcatgttttctgttccctactgtatcattctcaacttttctaactgaaacatttatatgatattcttaaattttagggaactttataaaacattatgaaacattttatgttgctggtatatatactggtggagcacttgactcgaagttaattgaatgtgataacytgaattttagtttggtaaaagatgatagttggaattgataccaggaagtttgtcacctggtttttgcttcatgatttgatgtagcttgcaaaatgctagagcaagtgatttttaatgaaataacttgtctcctttttaaaaatgcattcttgaagaggatgatggaggtaagaagtaatttaacttagtgacttatttttctcttgttgatctataaaccccagcagtcatatagcattttttcatcagagtgatctaatgggtctttctaaacttcttctgttgtgactccctgacgtaaatttggrgagacacttccatgagacagcctcgttcccagaaccataccacactctcttctaatcagtcagttgtaagagtgggcatgtcagtatcataggtaacctttgcctacagtctcatgttttacatcaatcacaaagtttgataatataattattaatagtaatgatctatttgtagttaactgataggtgcacattcttctgtagtgacatcttggttaaatccactgtatataacacatgacccctttttttttttttttttttttaatggattcttactctgtcacccaggctacagtgtaatggcgccatctcggctcactgcaacctccgcctcctgagttcaagtgattctcctgcctcagcctccggagtagctgggattacatgcgcccaacaccatgccaagctaatttttgtatttttagtagagacagggtttcaccatgttagctaagctgctctcgaattcctgacctcaagtgatctgcccgcctctgcctcccaaagtgctgggattacaggcatgagccactgtgcccgggtgacccctttctattttaattcaaagtgaaagagttcagtgacattttctgaagaagaaagacttgcaggtctagcttagaaaattgaggacttttttttttcctgcgtgcttcgttcgttgtttttttcagctcattttttgttgttgtttgtttgtttttggagtctcactctgtcgcccaggctggagtgcaatggcatgatctctgctcactgcaaccaccgtctcccgggttcaagtgattttccctcctcagcctcccaaagggatgggattacaggcacccaccatcatgcccagctaatttttgtatttttgtagaaacggggtttcaccatgttggcccagctggtcttgaactcctgacctcaggtgatccactcccctcggcctcccaaagtgctgggattacaggcgtgagccactgcactgggccttttttccagctcttaaaattggttacccaattcacatgtccagctagttcagatttgtggtactctgtcttctgcctttttcatgtatctcactttaactgcatagggagcatctcactttaactttttcacgatctgttctgtgaaagatggtgttttcctcctttatggattggtgaaggaactgacccttctttgtatgaattggaagggctgaggccatggtgaggtcttggtgcctcttctcaccagtgagttgcagattcctggcagtcctttgttctcatcctggctccctctgcagttggcattgtctccacagatgggcctaaagtgttaacattgaccttttgaagtctgcagaacacccctgaaggataagactggctgggaaaaaaggaagtaatgtgcttcccatgttggtggcattaaacaaataaaaaacccaaaccagttggtggcaaaaacattgatacaaagaaaccctttctatttatcattttctctttatcttctccctcagtttcccttggctatacacagcagtctcccacccatccatggctgtttcccactcatggacccttttctggagtcccatgacatcctattcatctctctgtcatctgaatgctttacgtattgaatttttctgtttatacatatacatgtcttccccatcagctttcagaatttcaagactttctggcacatagtatgtacttaaatatttgagtgaatgatgaaattcttttgctggaaaagatctaaataaacatctacttagcacattaatgcaagatttgagggagagttttgtatgggctaaaacagttcttggaccaatttaggggctcaataccaagtttcaaaggtcattcaatagatttgaacaacatcaaataattaacttgagttttcaaattcatggagaacctggagcaggagcaaggtgtgtagatgtgaatagggacttgatcattgtcgtttcctctgtggaaaattaaatcccttccctttctttgaaaatgtgaatggctgagaggaaacagagaactgactttttagaaaggcaatcaaggcacagaaaatcctagaagaaaatatatggaagaggatctggtagaaatatggtagctgacttcctactgcaaggaataaaagaaaagaaagaaacaaagaaccatggcagaagattttcatgtgaaaatcctttaaaatgcagttgtgcactggctgaatacattgtaattcacctttgttccaaaaaaagatttgagcagcttataaatatgtaaaatgtacaaaaggatcataaaggaatatagatcaaacgaaaaggaatttaggatggaacaataaaatgaagctgagataagacagccaagtgaaatgtatctcataaggatctgccatttttaaaggtaattggaaatttagccctcaggtgcaaagcagaaaggggaatgtgagtgtcttcctcagtgtccatgagattgaaaacacagtcactcacagaagcacaactaatatcccaaagaagtgtctctaatggttcctaagagaagaaattctgtgccgtgcaatgtcaatacaactcatttcttttcttttctttttttttttttttgagacagggtttaactctgtcacccaggctggtgtatggtggcatgatcccggctcactgtagccttcrtcacccgagctcaagtgatccttccacctcagcctcccaaagtgctgggattacaggtgtgagctaccactcccagctaatttttaaaattttttgtagatatgaggttttgtcatgtagctcaggctggtgttgaactctgggcttaagtgatcctcccaccttggcctcccaaagtgctgggattacagacatgagccaccatgcctggtccatttctgtgttttgttcaaatgttttaacataagttcggttgagataatgcagaaattctataagggaccaggggagacttggtagtattctatctctctgagcccctcacttaatcaaggaataaaatgtactggaatagactgactgtgtctcccaaaaataattacatattttcaacatgtaaatatataatataatatatatattatatgattaggttatgattatataatataatatatataaattgaatatatattatatattgaattagataatatattgaatattatatattacatagtatgtgcatgcatgtatgtgtatacatacatgtatatatacacacacacatgcctacatatagttttcataaaattggccttgattttctcctgcgctaactagagcctaggtgtggctgtattttgttgacaatgagaggcagagcctcagtactattaaataatcaaataagcagatcatggaattggcctcatttaggaaaattcaggtatttaacctcatcttcatttgtggaaagacatggtatatcagaattaaaaacatcttgcatttattaggcagccaatcataagtcatgctatttaaatgaagtttaatgaattctgtttcagttaaattgactggatttgaatcaaactggtatataccattaaagaagctataatataataattttatatagctgcattttaacttaaaatgtctgtttagagactacttcattcatttttagaaggcatattttgtatgtatattttaaagggaggtttattttccattcttagctgagaggcatatcccrctyattgtcttactgtcttctcyctgtaaatacacagctcatccaagtatgttttgtttcgtgagtgaaaggcttattttgtgatggtaaagaggtcagtcctgaaacatttggagtccatagggagtccagaattttagattatgctcggaattttgaggtaactttttaaaatggaatatttaaccytttttttttttttttttttttttgagacttgctctgtcgcccaggctggagtgcagtggcgcgatctcggctcactgcaagctccgcctcccgggttcaagcgattctcctgcgtcagcctcccgagtagctgggactrcaggtgcccaccaccaggccggctcatttttgtatttttagtagagacggggtttcaccgtattggcctgaccttgtgatctgcccgcctcggcctcccgaagtgctgggattacagatgtgagccattgcgcccggcctgttttttttttttttttttttttaagaacattctggtttcttaattttaaggatgggtgaaggaggtggccattttaaatgtacccttgagagctctctcaccaggttagtctttgaaaataataaccattctagtgatgaatattcgatggagatgatcagtctgtcctagagctgggtttaaggcaattcctgaaagtgccctggatcctgggaggaggagagtgttgggaacgtgggagtcgggagttccgggagtgatcactttcatttagggagctctatgaaagttggaactaggctgatatctcagattcacctatctagtgactccactcttcagccattactggtacatcaatttctctccgctccctaaaggacactttcgccatttttcatgttccctttactttctccctcctataccttccccttctctttctccctcctataccttccccttctctttctccctcctataccttccccttctctttctccctcctataccttcccccttctctttctccctcctataccttccccttctctttctccctcctataccttcccccttctctttctccctcctataccttcccccttctctttctccctcctataccttccccttctctttctccctcctataccctttccccttctctttctccctcctatacctttttccttctctttcttttattctgtattgttttctttttccttatcatgtatttttctcttctctcccagtggttctcatttattttccctttatttttcagtgaagttattctgtacatctctttcatgttaaaatcttgaccctctagaactcctattttccagcttatgattttgaagacagcatttcaacctgcaaatttctcttctgtgttttaacacacagattcaaacaaataaaaactataatgaaagggatgggattgggagaatgaattcagttcaggtagccattgaattagacagagaggagctgaaagtttgggtgtaggtgtgcagaatattttgctgatgcatctttctaatgtggttttctaagtacgtttttctgataaactgcacttgttctttaccatcagagcccagaagtttactttttgggtccagttaccgggtcaaggactatagaacaaagctagaaagcattttatgcatttctaatgtaaagaactctttgtgtaccaccaggagagcctttaggctcttgtggcacgatctaaatagaagaggaagagagacttttccccactggtacaaagccaagacttgtcttgagtctattgtgtttgggaggatttggaagtgacgaaaaacaatagaaaatgagagcgttccggagtttggatttgctttaatattaactgttaactagctttgmtgttaaagatctttattaaaatttggctaactctggtgttaagttcagagtagagatttgtcaatataagagaaaagaatccatttttgattagctcaatgatatgctatatttatctgggaaaatggttgtattttaaggccagttgtttattgccactgtgacacttactggtaagtgactgcatcatgctattctcartgagttttgttttaaaatatatactcctagctgagattcagaaaatagctaaaggcaaggcaatatctatattgtctcttgtaaaatccttactctctctttctctgcccaggataccccacttttcctggtggaacccactttcatgttcttatcattgttttgatctttcatttattctttcattcactcctacaattactcaacaaatattttaagcacctactaagtaccaggcactatttggatgtgggggacacaacaagaggaaaaactgacaaaaattcttgctttcacagagtttatgttctagtggaataagaggtataaataagtaggcaaccaaatgcattatggagtatatggtgtgatgatccaggttacgaagaaagtaagggtgagtgtgtgctgagtgccaaggagtgggtggggtcgctgcttgagcaaagccccgaaggaagcagccacagagtggggcttgcagattttgggaagaagagtgagtgcagtgctctgggcagaggcagtakccactgtggctttggcggccctatggaagaagcatgactggtgtgtgacaagacaagtaagctggccagggtggctggcctggtgagcaagttgggacagatggaggtgggtagagaggctagggagtaacagtagttgaaaccaggccttgtgggtccctgtggagacagattctcatctgagtgaaatgaaaactttcattgtagcttaacagtatgttatgctgtttaaatactaaatgccttttatttttctgtagcattgtcacatatatcagctaccatgtggctaaattggaaatgtcaaaatgaccataaagagtgactgctggccgagcacggtggctcatgcctgtcatcccagcactttgggaggccaaggcgggcrgatcacgaggtcaggagttcgagaccagcctggccaacatggtgaaaccccgtctgtaccaaaaaaaaaaaaaaaaaattagctgggtgtggtggcgggtgcctrtaatcccagctattcgggaggctgaggcaggagaatcgcttgaacccaggaggcggaggttgcagtgagccaagatcgcgccgttgcactccagcctgggtgaaagagcgaaactccatctcaaaaaaaaaaaaaaaaaaargaaaagaaaaaaacaaaaccaaaaacagtgactgctgtaycttgtgtccagggtctggtctgcatgccagtcaggggtgcaacgcgacagtcaggagatataaactctcgtcytcaccttgccaacaaccacttgcattatgggctttgaatttctcatctgaaaggtgcagaggatggatgagattagtggtttttcaggctctgattcatggagcaygaggaattccttgaaggccctttcatttttatttttatcctaaaggcccttttatttttaaatttgcacacaagcttcacttagaagaaagtgccctctcgcttacgaaaagaaatccctgacttggttatgccttaggtctttttagaatgatgaatttgcagtctcatagaatctcagatgacatgaggactaaaagagaaaaactgcttcagaatcccttcttactcagtgtctcttggtgacagtgttcgttatctcttgttgaaatcaaggggcaatttgacaacagttagatgaggcttttgagctcccatccttcaaccttggtgaagtggcttctatcgtgatacagacttcagctaagtgaataatataatctgtgaaagtcttagaaggactttctggcacaatttagaaactagcaatcgagacaaataaggatagttgatatatagagaagggcataggaatatcccaatttttaaaaatgacatgagcattctcattgtatgtattatatatattgaaaagtagtcatatcctaataacccagttatataattggaagagagactggatattttttggtacttatggttaatgatatattttagtgaaagttttattttctgattgaagaaataggaaaattgtcctttaagatactgactgtctgcttcctttccaatctagaatctcaatctgctgtttcagaaactccccaaaaacgctcagatgctgtccagaaggtaagatgatcttattaggatgtcagattcccatctgtcttatttgtcttaagattgtgacagacyctgcgatttatctttccatctgcccggctggctaggatgcccttgttttccctaagcctgcagtggaatccagtcaggcagaaggggatgttttcttccatttattttttgcatacaaaatcagccttgaaatggaactgagtacaagcttttcagaagctgttttattctatatccagccaaagagttgggcccaataacagcgggctccagcaggaaacggtggccactccagggagaagtctgcgagatgtgcctgctcaaacagtcccatggctatgatctttaaaaagaaatctgtcagagctttgctaaagtcaaataaggttcttattactttggtggatgaaacattaattagtatctgtttaatttccaggaarctattttttttctgttactgtattagtccgttttcacactgctgataagggtgtacccragaatgggcaatttacaaaagaaagaggcttattggacttacacttccacatggctggggaggcctcacaagttcatggtggaaggcaaggagaagcaaatcacatcttatgtggatggcagaaggcaaaaaagagcttgtgcagagaaactcccatttttaaaaccattagatctcgtgagacccattcactatcatgagaagagcatgggaaagaycagcccccatgattcagtcatctcccaccaggtccctcccacaacatgtgggaattatgggagctacaagatgagatttggctggggacacagagccaaaccatatcagttaccaaagaagccaaattttgtgggtttttttttcttacgctaaaatgcaagctatgctaaaatggatttcttattaaaaaaaaaaaaactgcaagaaaggaaacgtgtatggaatagtaattgtggatagcaattgctcttttggatataaaaccattgcttacaaaccaatttacattttcacccaactatgcttttgtcagtaacttagtattagaaatgaacagtaaaaagatgtgttctgttctgttggtggtctaggagaaaatgaggagacacatacttgggttttacacccggatctatttctgattagtgtgatgacaacaagcttagattacctgggacatagggttcttctctgtaaaattaaattattgctgatctctgakaactcatcaaataaagtaacttccctttagaaaagaatccctgtgttatacatgaaagttgtgctccccctggaggagaaattggggtacaacattggttgaaaacagcacctgggtgcttttcaaaaatgcggctaggttagctatccttaaggacagttcattgaaaaagcaagtttttccagcttattgttatgggagcagagggctacatcaacttggtggcacttggagaggcacggtgggctcaactgatggttccttaattatctgcaatgattagcccacagcgaataagagaaagaaagataaaaaggtaaaaagaaatagtaaagtcagcagttattaagaaagatagtaccctcaaatcttccctcactttttaagccttttttttggtgtggaaagcatggctaaattgtgatttaaagggatacattaagtttttctaaattcttatgttcaggacgtatatgaatcaattgttacatacgataatgtcaaagagaacctgaacaggaagtatttgataatatcaacaatgataaaacatgtacagcattgctttctatattatgctatttcaagatacatattcatgtgtgtaacattatagtgtttttcctgagcgatggaccatggtaaaatatattgcaataagcagaaaacctaatggagtaggttatttaaaaacacttgattttacaacttgaagactcaagggtgaaatagattgaataaatgttacatcttatccttgttgacagtgaagtgtctggaagtcaggaaaattaattgagagggaacaatatttggaagcaatcgattttaagcacccgacaatgacatcacttacttttggaatcattaactctttgtcatacatttattttacgggctgattcttttcttagatgatatggatatgtttcatgacaggctaaagtaactggccrtaaaggggatagggaaaactcaaattaattgtcaacctactgtatacctgttcttttactctattaccttaagaaatcctcacaataatcctttaaagtaactattataatgcgcatttaactgctaaagaaaatgattatatgagttaaaataacttgcatcagatcacaaacttgataaagggtaggctcgctatttgagtacagatctgtttgattttatacttatactatgataaaaattatacttttacatgggtaatcacccgatgccaaaatcgtcagatgaatgagatgagattctaaatttattttattatatktaaactctaccatgtatcagttggatgtccagatacattatagaggcaaataggtatattagttcacttatacattttgaagttttactagaactttgatrtgctaagttgtgttaattttactaactttagtgctttgttattatgtaaaaaaaattatttttcatggaaagtccttgctttttccttcttagtcactagatggcagttctgtatctctaaatgcagctggaaatgagaggtttgaaggcagttttctcagtatgaatgatgaacctaagagatttttctggtccatcagcgttgcctgcgttcttctgtggtcgtaatgtgagatccccaggactgcttagtcagaggcttgcagccgagttggaaagcatcctctctaagttattcttcagatgtgtgttcagacacctgttctctcaatctgagcacattggaatttattgaatgagttttgacttttactctttctgtagttaataattctgagagtgcgatatccctagaaaaaacacatgactcataaagcctttcctcaactcacaggagtagaaggctgtggtgttgccagagagtctgatgcttaaagcaaatacagctggcactcaagtgaaaagaacggactgtagctactccttgaatgcttttattgatgaccctgtggaattaggttttcaaataaaattacattcttgagacctcacttactgattattttaatttcaagtaatatgctctgaaaatctgctctatctgaagaattatgtcataaaactgaaatgcgactgtcttttgattctgtttattaaaatctttgccatttgaaatatttaaactgtaaagccttttatactctgtagtatataatagcttagtgtcaattattttatctaagaacatttgcttctaagttaaagattggtgtatggtaacatgcttcacctggtagccacctagtttctaactttttgcttttgaaattatatatacaatttttgtttcaaagcatttttctaaaactcttggtatctttctaatatacatggactagctggaagggaaatagaataacattttgatttttaaaaactctagctttgggtaagaattgaaaataacaggtaattgaaagtcaggtctttgaacattataatatttatcatttatcaatagtcacatctattacaaagtgctagacaataaaaaggaattagacgatatcagcactgtcttcccccatatgttgtatgatctatatgcaaataaattctcaagtgtcagaaaaacgctttgctctgatcagccctgccgagtcccctcattgcccaatctaactgcaaatttatttgaagaagtaaatatttttttactggatctccttaaagtatctgttatagtactctttatgcagtggccactcagttccattagtttcagaaataatttaggaacaagtcaaggaaacagatggagtaatgtggagtagccttgtggatggtcttggttactcagaaacaaagtttgaagagcaaaagaagcattggtcagatcaaaagaaagtggagtaaaagtgattctgaagaaataatgctggagacttaataaaacaagccatttgaattggggtagaatgtcttagacatatagaaagtttctaaagaaacattgttgagtatgaggtctttctcaactccaaggcaaaaggtaatatgaatttgcaaagtaattggaaaccaacaaaacaataacccacaagacaagtaaataactaaaataaggcggagtaagaaatacaagtcttaaaggagatagagagagagatacttgggtctgaaaccatgagttagtcatccttgaagtcttcctcagtgtctaatcattcttaggtcctcaataaatagtttaaccactaaatactctgacctaatgagtctgggaaggggcaagcgagagatggttaggaagggaagagaagacaggatacccttagggcagtgctgacattgaagataggtaacattttgaaaggtattcaccatactatgttaagagaaagaaaggattttttttttttggtgtgggaataatttttattctgtagaaactccaaggagctcagagaaaaatatagacgttttagcttagaaataatcacaaaagaaactcttctatgagttttaagaatgaaaaccagctaacatctggaaagcagttagaacttgagatgagaatgtgaagaaataattggatgtcacagattgtttttgtttttccttggggtggtcaggcttgggggtgaaatgaagtaatatctttgctctattgagttttagatggtgtaaaactagtttgcactatgcaacattattaatggcctgtggagaaaggcaaacagtccaagcagctaatccaatgggggtcgtggagctgataaaagttctctgcttataaaggaggcttgtcctttattgaacatctgctgacctactgtgtgcaaggtatttgtggtagatattgaaggaaatacgaagaattataagacaaaatcttgggtattaagaagcagacagttagaagaacatacctctttcacgtacatgaaatgatttgcgagatgcaatgtaattctgccaagataaacttaacaaaaagggtgaaggttgttgagagactacaattaagggcaatttcttaggaagggtgaaatttagatcaaatcgtcatttttggatagatggagggaagaagagtgagtatttcagatcagagaagagagtaaaggtagaaaattggaagtgaacatggcactgggtgtggggccagggagaagcgcaatagtccaggtgacctgagaggcagctcagctggcagctgccctggagacccaggttttgctttccttctcccgggcctccttggcctgcagcctgacagtgccttaacccagagcccagtcttatctggattactgcartattctcccgatgggtctctctgcttccagtcttaacccttctaatctctcctccacaatgcctccagagttatctttctaaaatccaaatttgctgatgtctgatatctgcttagactcatccagtgactgctcatagcatttgagaaaatgttcagactcctgagtttgacacatggggttttcccttgccatcctcagtcttcagcgttatcactcactatttcctgtatgattggctggcttgttccaaccctaaaaaatacactagtttttttgttttgttttgtttttgtttgttttttgttgttgttgttgtttttttaatctttaggatccttcatatctgtcttatacatgtttcttctgcactcctcttccctttttaaaaatctacttctattttttaatctaaatttgtctaaacttgattttgttctagacactggacttgagaagactcagtctagggtgcatttcaggagtggtagaacatttgcttatattcataccatagtggttgaggatctgggctttggaccagttttcctgggcacaaatcccagttattccacttttaactggggaactgtcaaagatgaacaaagtcagacattagttaaaatggtaaggacagattttatatcagtggcaactattgcgctagggaagagtccagcgtgaactaaactcaactttgatttgtacagaggtgaccaagcattttaaagggagaataaaggaatagggagaagggtgagtggaggctcaggagactcagaagtgaaaaactgcaagggttcattagtgtaaatgagattaggccagctgtgtctactaactggcagttataagttaggagtctgtcctccgccagagactaggaaagaggccccatcctcaggtgaaggctgaaacagtaagttgttttggcagccttgagttttcttaggcagtaatttaaagagcggtaggattatctttgggatgcagcctttagttggtagaaactatgttaatgtttgctcargcctttacaggccaaggctaaggcctagttgagaagagggctcagaggagcctggctagagcttgatcaagaagagaatctttgttagaatttargaatagcattttactctgtgtgccttagttttctcatctataaaatgggtataataagaattcctatctctacattttttttgtgagttttaaatatatttatgtaaaatgctttggaggagttcctggcactcaaaatgttagctctttatcattattgttgttatagttgagcaatactctggttttgaaagttgctttcattgcataggtggtcctcattattcttggatttgcatgtatttgcraactcacctacttgctaacatttatttggagcccccaaatcatattcatatggtgctttcayggccaatcacaaacacgctccaagtggcaagaaatttgagttgcttgacgtggactttcccagctgatgttgaatgaggtgaagctctgctttcttctttcagctctcattctgtaaataagagtgtttttgtggctgttttttcatgtttttgtgctttttcttgttggttttactgttcgaaattgcctccaggcatagagctgccgtgttgtctaatgttcctacgtgcaagaaggctgtgatgtgccttgtggcaaaaacacatgtcagataagctttgttcaggcttcagtgatgctgctgttggccatagtaaatcagcaatatatattaaataaagtgtctttcagcaggaacacacatttaaaaaaggtaatgcattgattggttgacaaaaatgtgaccaggggcttgcaggaatctaaacctgtwttttttctagaagcaatattcagtattcactaatttgatgttcacaaagactttataggacaaaactactgtgaataacaagaattgactgtatctttttaaattctcacaataaggctgggtgtggtagctcatgcctgaaattctagcactttgggaggctgaggtaggaggatcacttgagcccaggagtctgagactagcattggcaacatagggagaccctgtctctaccaataataataaaaaaaacagctggccatggtggcatgagctacttgggaggctgagacaagaggatcacctgagcccaggaggtcaaggctgcagtgagctatgattgtgccactgcactccagctggtacaacagaatgagaccctgtcttgaaaaaaccaaaacaagacaaaaacccaacattctcacaatatccttttgcagtaggcagagtgagtgatggagtctccacattttatggactattcaaggtcttatgagcctaatagaggatttaaaacgttttatgctcagtagtcgggagccatgagtttttgaggaatgagcaagacagtttaaggaacaattacctggcaagggaatgtagaatgataggaagagggagagtggagccagttaggaccagctattaaactctcaaagtaattccattacttctcagctaaggtgctgatgtgatacaggaaaagtggcaaccaagaattgaaatgatggstttggtaaccatgtctagggtataaattaggctgtgtggtttgcagacttcagtatcaactgggagctggttagatatgcagattctcaggccctacccagacctactgaactggaaactgtggaggtggggcccagcaatctgtgtgtgttttttggtttgtttgtttttgttttgatacagagttttgctcttgttgcccaggctggagtgcaatggcatgatctyggctcactgcaacctccgcctcccaggttcaagcaattctccttcctcagcctcccwagtagctgggattayagrcacctgccaccatgcccagctaagtttttgtatttttagtagagacaatattttgctgtgttggccaggctggtctcaaactcctgacctcaggcgaaccgccggcctcgacctcccaaataatctgtgttttaacaaaccctctaggcgattctggtgcacaytgagcttaagagacaatgaattagagaaatgatcgaaagatgttcccaagcctaggtaaactacaggacaggcaaaggagtattttgttgsaggataagatgcttgatattatgaaacatacatttggtcttaattgccatctcctggcatacaactcctaaaatccttggaatcttcgaagaggttaagtgtctttttatatgctactgtttgttgtctggtaacttcaggatggggctggtccacagaaagaccaaagcatagtaatagggttgggactttctgccccaccccccagcctcgggaactgggaggggctgaaggttaagctggtcaccagtgcccagtgatgtagttaatcgcacctacatcatgaaacctccattaaaacccccaaaattgatgggatttggagagcttccagatagctgatgaacacatggttttcccggagggtggtgctccccttttcccaagcctctccccatccatctcttcatctgcatcctttgtaacatcccttctagtaagtcagcaaaagttatgtgtttccctgagttctgtgggctggtctaacacattgaacctgcggagggggtggagggatcctggatttatagccagttggtcagaagttcctagaggcctggacctgtggcttgcatatgaagtgggggcagttttgaggactgagccctcaacctgtgggacctgatgctacctccaggtagatagtgttagaattgatttgaattagaggacactcatctggtgtctataatagaattgattgcttgctggagggacgaaatctttgcacattttgatgatagaggtcacagaagtcctctgttttcattgttgagtgagagaatagggaaagcattgtggttaggttttttcctgtaccctcagatgcactttaaggaacctgggtacctcccaggttcaagcaattctgcctcagcctccagagtagctgggattacaggtatgcaccaccacgcctggctaatttttgtattattagtagagacagggtttcaccatgttggccaggctggtctcaaactcctgacctcaggtgatccacccacctcagcctcccaaagtgctgggattataggcgtgagccactgtgcctggccaggaagatttttcttgaaaaaacaaacaccaaaaaaaagatatttgagaacagttgggtgttaatgcaagggaggcgattaggaggtaaaaaactgagctgcactttccatccatagatcattcaaggaaagtgaagctggaataaaatagtgytttccttccttgcattacttgagacaattaagggatagattgctttaaagtatggtccagtacctcctgcaactctagctcaaataagtagaaagaaacttctcaatatgtgagcaggaaccaaaaaggctggttctttttgctgtttatctcccttttttccctaaatgtttattgcttccactgtgtttgttcactaaagatcattactttaaccttcccatcgtatcagctcccattctaaagagatgttaaaagtaatacagccaagtatgatttctaacgtacgcctcttccttccatatcacatttctcagtcatccgtgaaggaatggaaagagatttgccatgtccattccagttcagaaatattataatttccataattcatcatgtattttatactaaggattctagagatgccatctcagctccctgtgtgaggctctttcccataatatgttctattttaaaaagccctaggcaagttatttaccatttgccatctgttctaatattctttcttgaaatttccctttcaaacttaaaattgcttgtattttagttttgtgcaaaattatatctatataacacctcgatctctttccctatgggatcatgtgtagcagatgttaacatattataaactggaatgccattggttgttccaaaactaggatgtttcttaatttagaacatgacagcctggcgcggtggctcacacctgtaatcccagcactttgggaggccgaggtgggmgtatcacgatgtcaggagtttgagaccagcctggccaacatagtgaaaccccatctctactaaaaatacaaaaattagcccggcatggtggcttgtgcctgtagtcccagctactcgggaggctgatgagggagaatcgcttgaacccaggaggcagaggttgcaatgagccgagaccgtgccattggactccagcctgggtgacagagggagactccgtctcaaaaaacaaacaaacaaaaaacaatatgacaaatagagaatttatatgcttctgtgaagaacagaattcctattttacagatgtctagaggtatcctaacctgccagtaatgttgctttagaatttagcagaatttgaaaaatctaaatatggtagaaaattaattatatatctcatgttaaaatttataaaataaattattacagcgttaacttaccaataagcagcttttaaattctaggctttaaaagtatcctgcttacataataaacataataaagtttcaaagatgagcaaattaacttttcagcaaaagctttacttgagtgtatcttggcttcttttttgacagttgtaaccttaatgttacagtaatgttttctttttctgggaatcagataatcttctgtttggaaaaatatttttggtgaacattttattttttaatggaaacttgtattatgtgatacgcaagtgttcaaacaatttataagagctaaccatcaccacccacatataagattatacaggaatggaggaattttggctgacttactgtatataattattgagccaacgtagatggcagactctaccacttatgatttagggttttgaaacagtattttaaagtacaaataatctcaaaattggtaatctataaagcatattaattattgtattgacgaactaaaaatagatttaaccttcctccatttataaggatgcatccattatataggttctgtacaaaattgccaagcttacttttctctttttctttttttacaacaaaatgtatttmaattttttgataggaaaagccattagctttcsgtaaactgttgcacaatcactggaaatgctgagtgagagtctttctgaaaactgtagaaggctaaagataatgaaaagtgtatctcttcattgtcaagtcctttgagaatctgataggctctatctagctgcaccctgaagagacaagattaagttccaggcgctggacacagaggaacaggctcctaactggagggctttccacggacaacagagcgcctggcagtctcttcgagattaaatctaggctgtgtgggagggtgggccccccagagcttcattccactttgtgtgggtcctgagagtagggtgtttgcttaaatggcaagaaaatggccctttttcctgataattactaatatctgccatgtaaatttctttataaatccctgaaagaaaacaacctatattagaaatcagctcttacttctgacaagcaatggagctttctctagagcgctttacaggaaatatctcagctgactttctgaactggtactctctgagagccagccggcccttgactgatagccctggataaggaaggccagataagattctttgaagactctcagctaaattcagagccccaaatcctacatacatttggctactctgtagtagtggattggtggccttattttacaggctagtcagttaaggtttgagatgcgcttagttgctctgcttgtgtggaatagaaaagggggattgtaacattaatacagggccggtcgggattttagggtgcaggtaaggataggtcatagggagaatgaagattctagcaggttggttttttgttctctctacagtgggaataatgtaagaagcagatagtttgttgcccccaactctttttccatgttctcttctatcaaaatgatctgtacaaaaaagttctgtttataaaaattttagtctttcatctttgcagtctgttatmatctttatgaattttttgactcttccaccttcctggcaccacaaggctagcattgctatatttattaaagattcagatttggaattttgtcctcttatcactacttcctctgccatttgttagctctggttcttattgtatcttacrtttgaaaacctttgaagcttatggggtatatcaattctttattttctcaactttttattatctaagtaccctcaattatcaagttgtttaaaaaataaataaaatacataacagaaattgttctgttacgcactaataaattgatcatttataaaagtagatccaaccccaaatccctctccttttaacacagaccatctgttattatccaccatcctttagtttggcagggtcagtttatcaatgatttttggatgttttaaaccacatgacacaaatgcagcataaagtgaacttgttaatcatgcagaagttggagggtttcttgaagtcagagaaggtgatggtggagaacttgaattgcatgaactgtaattgatttgtgagcacctcgtggagttagctaatacagtaagaatgatgatgtgacagatgtatttaaaaaatgaatttgcatattaggattgtcagaggcctttggggaaattaatgaggttctcaaatactmcaaaaaaggaccatcttttcataaaaggtgatatgatgtcatatatcatggcaccatatatttttgttaaaaattagcactgaaaataattttaattttaataatttgtgcatctttccattatgataaaaattgttttaaattaaaatgacacccttacttaatttttaatttcttttttatggaaaaaaagtgaatctttttttcataatttattctgaagtattggtacctsggtatatcagtcagaccttttgcaggaactggaaactatgctaggtgcatgaaacagaagtgtttactataaaatcaggtgttttatgggaagtttggaaggtttgaagcatctgtgtctaaggtgacacttttcaaagaaatcaaatacaactggattatcaggggagttaaaacttttgaggccaccattgcaatttgtagagtggacatttgaatgttgttgtagagaagctttgttttcagaccttaactgctaacagagcagtccagacacgggaatatgatccttacctcattcgactttctaaatctttgtgtggttgcatctaattggatgaatctagctgcaagggagtctgcaaatgtagtttttctttgtatttctgtaaacgggaaggggaggatggagattgcgagagccaatccaaggtaaccaaaagaaaatttaagtggattctacttaagagatctttttctggtactgggtatcatgtgtaatgatgcagttacatttttgactggctatgtaaattagaaaggttaaaaaaartcccaggaatcttcacagtcactagtattatgacctctgttaccactaacttgggtgccatgtggaactagctggcctgtgatgtggggcagaaatccatgtagaaagaggtgtaataattgttactatgctaggccattattaggatcattttctttttattactattgttgttttttatatttttagaggcagagtctcactctgtctcccaggctggactcctgggctcaagtgctcctccagtctcagcctcccaagtagctaggactacaggcacacaccaccacacctggctatttattttccatttttgttgagatgaagtcttgttatgttgcccatgctggtctcgaactcctggcttcaagtgatcctcccacttcagcctcggaaagtgctgggattacaggcatgaccactgtgcctcatcagaatcactttttcctctgtgtgtgtatgtgtttatataataatatcctttaattttatgctattttcattatattcaaatttatgatgaaacagagctggcataggcaataacatttacaaactgagttttggaaaactcctccagaatctacttcttacatgctatttatcaactaacctttttatataatcatagttcatgaaaaaagaaaaccctagttatgtaccagcataactcaagaaataccttttaatgattaaaggtcacctttaagagtatgctggaaaaacgaaaatgatctgtgcattttactaatccagtcagaaatactaattgtactccttattaagataaatttgggtgctggttttttggcttctggtttcttcttgtacttactatcatcatacaattggagaatggaattatgtatagtggccatacaggatgttaaaaatggttatgttccattgtgaaagacagtgtggcaattcctagacctagaaccagaaatagcatttgacccagcaaccccattactggatatgtacccaaaggagtatacatcattctgttacaaagatacattcacacatatgttcattgcagcactagtcataatagcaaagacgtggagtcaacccagttgcccatcaatgataaactggataaggaaaatgtggatatatacaccatggaatactatgcagacacaaaaaggaatgmgatcatgtcctttgcagsgacatggatggagctggaagccgttatcctcagcaaactaacacaggaacagaaaatcaaacaccacatgttctcacttataagtggaagctgaacagtgagaayacatagacacaggtggggaacaaggcacactggggccttttaggaggagtatggggagggagagcatcaggataagcagctaatgcatgctgggcataatacctaggtgatgggttgatgggtgcagcaaaccaccatggcccacgttgacctatggaacaaacctgcatgtcctgcacatgtatcccaggacttaaaataaaattaaataataaaaaaaggttattttttttcccactatgggctacttaaaaactacatggcaatatagtttttccccacaaaatacataacacaaaatacacaaaatacaaactgtgcattacaaatactttagtcttttgtgtagatgttggtgaaaaataatgagcttttaaggggagagtgtgtatgtgtgtgtatatatgcctgaataacatataaattctcaaaaatcttgcctatgaaagtgtgttacattcctttattagttgaaaagtcaattatttttcagtttcctttcatagtaagggctacttcttttttttttaacaatagaaaattaaggaaatcaaccctttgtaggggttgtgtttctaaattactggttgtcttcagctgtcagcaaacatcatgattgaccttcagcaagttaaatgttgtagcaaaagatatagtttccagggaagaagtaacagaggttaggattaagactactaaatttagcagggtgcagtggtgtgtgcctatagtcctagctacttgggttgctgagctgggagggtggcttaagcccaggagttcgaggccagcctgggcaatgtagcaagactctgttgtggaaaaaaggaaggactattaagtttacatttctagaccatgtgcggtggctcacgcctgtaatcccagcactttgggaggccgaggtgcgtggatcacctgaggtcaggagtttgaggccagcctggccaacgtgctgaaaccctgtctttactaaaaatacaaaaattagccgggcgtggtggcacatgcctgtagccccagctacgcaggaggctgaggcagtagaattgcatgaacccgcgaggcagaggttgcagtgagctcagatcacgctattgcactccagcctgggcgacaagagcgaaactccgtcgcaaaaaaaaaagtttacatttccttcatagagatggggggaaaaaggtgccctaaagatttttatcacatctatcatagcacccaaaaatgcctcatttgtagtaaataccctttctgtcttgtccatctgcattttttccactgcaaatgggttggatgtctgttcagatttaataaagaagatgtttgcttttcactttgtggagatatttcttggatccagagtttaaccttagcaagcagggtaagagtttagttttatacttaatattatctttatattacctgttaattattcttccacaatatgtaaaaatcaagtctggagtataagtgtcagcctcccaggtgggtaagaagcgtgtgcatgtggacctatggctgtttaccgtggcctatggggatcatctggaacactctggaacactctgtagtgttgcaggaaaccctggaacactgaagaaatagttctcaacacaagaagtctctcatcctctctttcccttttattccagcctttagtgagcaaatccacatctgtatgagcagtaattaaagtacgattgacactgcagtttccacaaaagtgggagttgtcttcctatgtttgtttgtcttcctttctctctatcaattccttcttcctctcttttcatctgttattcatattaaataatttacccttaagaaggcaatgctctttcctttttttttttttttttttttttgagacggagtctcgctctgtcacccaggctggagtgcagtggcgcaatctcagctcactgcaagctccgcctcccaggttcatgccattctcctgcctcagcctcctgagtagctgggactacaggcacccgccaccacgcccggctaattttttgtatttttagtagagacggggtttcactgtgttagccaggattgcctcgatctcctgacctcgtgatccacccgcctcggcctcccaaagtgctgggattacaggcatgagccaccacgcccggccaatgcccttctttctactcaaaacgttttttttttcttgaagggttcctggttgattgtgagttttaggaaaggaagacaccacttatatgtcagagtgccccatatgttggccagttgttatcagccatcttttttttttttttttttttttgagacagtgtctcactctgtttcccaggcgggagtgcagtgcagtggcctgtgatcatagattgctgcaacctcaaactccagggctcaagctgtccttccgcctcagcctcccaagtagctgggactacaggcgtgtgccaccgtgctcagctaatttttttaatttttaggagagatgcagtcttgctatgttgctcaggctggtcttgaactcctgatctcaagtgatcctcccacctcagcctcccaaagtgctgggattacaggtgtgaaccaccatgtctggccatcagccgtctttataaattgtggagaactgtcagttatcactttctgaaataccctaggtaaaatattaaagttctagtaaacatgatataagcggtatggcacatgctcataatgcatttgtcttgcccatatggatatcaaaaatattttatatattattattgaacactcattcagtgatcacttttaaaaagcagtgactacctttaaaattcgggattacctttaaaatgttttcagggaacatcctaaaaaccagtgttcctaggctggaaagaaggctatcttagaaataaactggtttatcactcagagctttcttccctgttctcagtggtctatttgtcctcaatggtatcatttgaaaatgagacagatgtggacttaagattctgtggtaagtcacgtgtgttaaccactttgaaatctcagggtgcaagccaggggacacatagaaatattaataccatctttctgtcaaggagtccttctggaagtatgacaacaaacagatataattttgcttaattttttgctatttgcatttttccttatttcataactaactgtgtctgtccttgtcgcccttcaggaagttgttgacatgaagtctgagggacaggccactgtaattcagcagctggaacagactattgaggatctgagaaccaaaatagctgaactagagaggcagtatcctgccctggacacagaggtggccagtggtcatcaagggcttgagaatggagtgacagcctcaggcgatgtctgtctcgaagctctcaggttagaagaaaaggaagtacggcatcataggattttagaggcgaaatcgatacagacttcccccacggaagagggcggggtgctgacactgcctcctgtggatgggctgccagggcgtcctccatgcccccctggggctgaaagtggacctcagacaaagttctgttcagagatttctttgattgtgtctccaaggcgaatatcagtccagctcgacagccatcagcccacacagagcatctcacagcctccaccacctccatcccttctgtggtctgctgggcaaggacagcctgggtcacagccgccccattctatttctaccgagtttcaaaccagccacgaacactctgtttcctctgcctttaaaaacagctgtaacatcccatctccaccacctctgccttgcacagagtcctccagctccatgcctggcctgggcatggtgcctcccccacctccccctctccctggcatgacagtgcctactctgcccagtacagccattccccaacctcctcctctgcagggtacagaaatgctgccaccccctccccctcctcttcccggagcgggcatacctcctccgccgcctctacccggagcaggcatactccctctgccccctctacccggagcgggaataccycctccgccccctctacccggagcggcaataccccctccgccccctcttcccggggcaggcataccccttcctccccctcttcccggagcaggaatacctcctccaccccctctacccggagcgggcataccccctcctcccccacttcccggagcgggcataccccctccgcccccacttcccggagcgggcataccccctcctccccctcttcccggagcgggcatacctcctccaccccctctacccagagtgggcataccccctccgcccccacttcccggagcgggcatacccccacctccccctctacccggagcgggcataccccctccgccccctctacctggagtgggaatacctcctccgccccctctacctggagtgggaatacctcctccgccccctctacctggtgctgggattcccccacctcctcccttgccaggtatggggattccacctgctccagctcccccactccctccacctgggacaggaatcccaccgccccctctgcttcctgtatcaggccctccactcctcccacaagttgggagtagcactttaccaaccccacaggtgtgtggatttcttcctcctccattgccaagtggcttgtttggattagggatgaatcaggacaaagggagtaggaagcagcccatagagccttgtcgaccaatgaagcctctttactggaccaggattcaactacatagtaaaaggtaacatgaaagtgagctcgtctttgcacagtgtgtgtcagtattagggaagtgtttaccttcaaactcgggaaaattactgttgaatgtatttttaagcacaactctaaaactcgwctagatttttacatcaatatatagtgcagcagtttgctatttaaagctttaagcttttctccagaagtaccaaagatgtaaaataaatacatatacgtatcaatgtataagatgtaggtatacccatctatgtagttattgatatatctcttaaagattgagggatatatttttcttaaaatacatgctctgttatctagttgtaagactgctacttatttatgcctaaattccagtgaaagtatgcttatatgccctttggaaaatgaatgagggcaggtaagcagagacatttgtagcgaaattattttccatgtaagaatctactctttgcttttactacttcaagtttccatttctgacaaacagcttaaaaatgtaaatcaaattcttaaatcctttttttttttttggaggggggacggagtctcgctctgtcacccaggctggagtgcagcggtgcagcctcggcccactgcaagctccgcctcccgggttcaccccattctcctgcctcagcctcccgagtagctgggactacaggcgcccgccaccacgcccggttaatttttttttgtattttcagtagagacggggtttcaccgtgttagccaggatggtttcccatctcctgacctcgtgatccgcccgcctcggcttcccaaaatgctgggatgacaggcgtgagccaccgggcacggccgcaaatcaaattcttaggtaaactgactctggagcatgatttagtgcacactttaaaatgcacagccctgtccgggtgcggtggctcacgcctgtcatcccagcactttgggaggccgaggcgggtggatcacaaggtcaggagattgagaccatcctggctaacacggtgaaacctcgtctctactaaaaatacaaaaaattagccgggcgaggtggcgggcgccggtagttccagctactcgggaggctgaggcaggagaatggcatgaacccgggaggcggagcttgcagtgagccgagatcgcgccactgcactccagcctgggcgacagagcgagagtccgtctcaaaaataagtaagtaagtaaataaataaataaataaaatgcacagccctggtttacagtcccatcttgtgggctttcttcagaaacatgcttcacaaaaatacacatatccataccccaagtgtgaaataatttagttttgaaaatttcatggcacttctgtccctcattggcaacacagcacaaagtcatacaatcatagctgggactgatcatcataaaagaatactttccaccaggtattctggtggtactttatacatttatgtgtcatctatagcccgtgttgcctagtcattgagacaatgctgtgatacttggctgtggaatgtgtaggtggcagggaaaaacgcacactgtaaacctyactggggcttccttgttctaatgtttcatgattccttgaatttcctttgtgtgaatttcctttgtgtgatgtggcatgcatttagaaacagggtatttgccaggttcgttttcatttcttatatggatttttctactcactacaccatatcgggggcaagaatctgtatattctgatgacttttaatttttcagttcatcttctgtgttgttaccacgccacttatgtatgtgggtgattcattttaaactgtgccccaaagtcattttctctagatatgacaggggaagttcttgtgttttgttgttggtttgctttttaaaaagatgtgtttaccctttttaggtggtactacacgaatctgcagtcactgagaagacaaataacaatggggtgatgggaggcagtaggagggagaggatgccatcctgtaaatatgtattttttaacccatgaataatctgcaaagttgttaagtcaagttgggattttgagagatcagacatttcttgcctccctagcccacactgagataagttttctttttacatttttatacagtggcctgatgactgaggcttcctggaaattatttctggggaaaaatttcattcatggatggtatttcaactttcccattaagttgatcaaacaaatggtggtcttaaagaaaaagaatattttttccttcttatctctcttctttttccctccttccctcctgctggccttcctccctccccttcttcctttctatttatgcttgctgtgatgtaagttcagtttgatggctgttttattgttcttttgcttaattttagagactccagtacttcacttatttgggaaaaaattgaagagccatccatagattgtcatgaatttgaggaattattttctaaaactgctgtaaaggagagaaagaaacctatctctgatactatctcaaagacgaaggctaaacaagtgagtatttttgtgctttatgaaattggacagtgtttctggcataagtgtgaactgtcattagagaaaactttgaaatagtttttgggctgtgtaaacctccatggatcttaggcagacagcaagggttagaactttagaacatgtggttaagtaagactagcccaaatagaacaacacataattatctccatccagtgataatgtcccaacttttatttgtaacatcataatacatatttccaaaatatccgccattgtttctttccagaattagttgcctagaaataaattttcatttgatttatgtccatctgagtgctcctatggatggaaagaaaggaaagagtgggcaaaggaaaacaatcaagaaatccaatccttagtaactgataatgtgtttggtattttgttgcattatatctgaagtggatgccattagaatccagttaaacagtcacactgtacttgaaatgtggaagagaaatcttgtatccatttctaacctctctattttatgttagatcctttgatctaacctgtgacatttttgagtcataaaaagaaagattggtgcatttcaagaaaaacatttccaagcaatttttttctactgatatatccattggacttgtcataaagggatattgttataaatttctcaggggtgtcatttggaaagtagagtaaaacctcatgataatgaactccagatagaaagaattgctaatggtgcccgtctttaccctgaaatggagagtggctacatttcttaacttttgcagggtggcaggaaagaggtcttggaagcaaaggaatggcaagcagctcagtcttgggaagcaaagagggaaaaatgaggctgatatccccagtgttctccttgcccagtagccccataggagttccagctaatggggtgattcctcgaatttgtgcctctgacctggaagtaatagctaggcacatgacctggagttgtttccattgatatttatttcagagcagacaattttcattagatggacattgccaaatccagccaggagaagatggatttcaatgggacagctagacccctgtgacccgtagttggctgggtgagcaggctcaccccaggcattttattaatctgagaataatgtaaacccaaacattatgcagttgaattcttttagaaatgcttgttgcattatcactggttgctggtgacctcaggtcagtaacatagtaaatgagatggcacctggcacattgtaggcactcaataaatatttattaaattaatcagctgactaagggatgaagactttataaatatcagtggctatgtccagtagtgattaaaaaccagaaggttactcatttcataataatcagtaagtccagggtgacaatgttaaaaggagtaatggaaaatcatattttctctggcagagataaatatttaaaaaatccttggtatatttgcatatagtacactgaggctgaatcatcgtatctcctcttttgggttgtgtcagagatgtaaaatctgtctgggcgaggaatatgggtggggcttacattgagaagagtcaggcagccggaactgtcacatgacaaacgtgtagatgtggcatggagcctctctcgtccagggaccaaatactcagaaaattgagccatgctctccttacttccagcaccccttttgtttttttgtgtttttttgtttgtttgtttttgtttgtttgtttttttggctaagggaatacagataaggaagaagtctcccaggttgcccaagactgtaggatttcattctctgtttgacatagtattaagttttagcttactgaaatatgatttacatgtaaatcatcaaacttcacattaaactagttggcatgaaggggtctcagcatataaacagtgcctctgtgttgagcatcatcatcttaagataatctcctcattctgtcattaaggcatttcataaattgtcggtaagagrctttgccaatatcctcatttgtgtttattgatagtgacgctactgttgaccttcagcttcaaacagggtttatgggacagtctccatcatgactccagataaacctattcagcaactccttggcctgggtcttggtgctgagctctgcacttcagatctgtttttggagggacaaaagatttttttaaatgtatgttagagaaaaatcactacaaagtgatggattgctgaagaaacatagttttatttaacttcattgtatttggaagaaaaatctgtccattccatttacttgagacatttaaaattttgtttaaggaaagtgtattttcaggatgcatgcaaattgttcccctttttatgggaaatgtgcactgattgtatgtgcagacattttggtaccttatgattcatttccagtaaaattaatagcctttaatgccgtggcatatgtttatggaggtatttcaagcaattcttcttatatacaatggaagctggaagttctgtttttgtttaaatatttaaaaatagccaaataatttttctgtgatctctgttctccttgaaagtaagactgtggttgaatgcactggtgtttaacgaggtgcctgtgctgtttttaccgtcatggcagagacgttttcagtgtgataatagaagattcctcagctgggcacattgccgtttggcataaggagaaagagggttattttctctggatgctcagactgatagaaatgaagaatatcttgtatttccaaatccttttttctccaaagagcttaagacaaagcattttatacttttctcatggagcatggatttaagtttgttctatgatgatttcttcatttctccttctttactttgaagcattacacaaaagattagctgagaaggtacatagaagtttatcagaatatagtttgacatagtttttcataaccaaatgagtgtgacactttgacattagaattgtctgatgtagaaccccgtctcttaaggaataaagaggaaaatagaaaaagtgatcttggccgggtgtggtggctcacgcctgtaatcccagcactttcagaggccgaggcgggcggatcacgaggtcaggagatggagaccatcctggctaacatgtagaaaccccgtctctactaaaaatacaaaaaattagccgggcgtggcagcaggtgcccgtagtctcagctactcgggaggctgaggcaggagaatggcgtgaacccgggaagcagaggttgcagtgagccgagatcgcaccactgcactccagcctgggcaatagagtgagactccatctcaaaaaaaaaaaaaaaagaaaaagaaaaagaaaaagtgatctcttatgatgttcatgctttagcattcacacacattcacacttgcccaattttaaggaaggctttagagccagtaagtgtttagtccaatctcctccctaattccagggtagttcagtgatttttaatgtttgtaatgaccctaagtcacctcaggatctttggtgatcaaataaggattaaaaagtttaacccactgggtatggtggctcacacctgtaatcctagcactttgggaggccaaggcaggtggatggcttgagcccaggatttcgagaccagcctggggaacatggggaaattctgaatctataaaaaatataaaaattagctgggtgcagtggtgcatgtctgtcatcccagctacttgggaagctgagatgggaagatcatctgagcccagggaggttgaggctgcagtgagttgtgagagtaccactgcactccagccagggtgacagattaagaccctctctcagggaaaaaaaaattcatccgcactcattagcaggaaagtgagagaatttacttgggagtgattttgataataagggttgcatagtttttggttaatcttctatcaaataatgtcataaggaaatatattttggtaagtgcagtagtagtagtaatagtagtaattattacagcaataataaccatggaaaccacaagtcatattgtgtccattatttaccatgtaccagttactgttcttagcacttatatcagctcatataatgctcctacccctgtgagacaggcaccrttagcctcagttcatagtacagaaacctcaggtacagagatatagcggaattcaatgtttccaagctggtaaggggctgagctcgggttcagactccagccttctggcttcaaagcctctgctcttcctaattaagtgataattatggatgtggaatattttatatgagtgtaagtacagtattttatatggagaccagaatatatacttttaaaaatgaattaaatactttaaaaaaagaatttgaatgtrtattggtttttcatatatgtttggtatttaaatgactgtggttataaataaaattgtatgtgagacacttttaaaacctttaccatgttttagcagatttctttctttcttttttttaratggagtctcactctgttgcccaagttggtgtgcagtggcatgatcttggctcactgcaacctccccctcccgggttcaagcgattctcctgcctcagcctcccaagtagctgggattacaggtgcgggccaccgtgaccagctaatttttgtatttttagtagagacgtggtttcgccatgttgatcaggctggtctcaaactcctgacctcaggtgatccgtctaccttggcctcccaaagtgctgggattacaggcatgaaccactgcgcctggccaatattttagcagattttgacaagtatataaactgtggtttcaccaacatgacatttgcacagttaaataaaagtttgagtggtatgagatttaaatacataagcttccgtaagcagtaaaagtaagagccacttgcttgtgtggcatataaatagtggttagaggcagacagccattgtggttaaaccttgccaaatgtgaaatgatgctacatttcatttatcccatggtaaaaaaaagaatcatctttgtaaaataagccataggtaaataatgtctaatcatgtttaaaggatctgtaaaggaacatgatacccagaatgtaaatttgcacatagaagtcagcaagagtgtaaaagaagaatctgatattttttaaaaagtacataacttgacattggtctaaccatttaatgcaacacaatgaatctctttgtgggtttcttctatgtaatctatcagattaaaattctttgcccagagaatgggagaaaaagtatgacagttaaatatttgttggactttagcctctggaaatctgatcagaaaaaaaatacatagttaaatgtgctacttattataagggcaggtaataaaaggatttgttagaattcacatttattacagatactaactttaaggattagatatttggtatcatgtttagtctttccgctgtgcttgatgacctaatccctaaaaaagactttttaaaaatgttcgaggtcaggagtttgagaccagcctgacaacatggtgaaaccctgtctctactaaaaatacaaaaaaattagccrggagtggtggtggatgcctgtaatcccagctactcaggaggctgaggcaggagaattgcttgaacccgggaggcggaggttgcagtgagccgagatcgcgccactacactccagcctgggcaacagagcgagactccgtctcaaaaaaaaaaaaagttataaaaatgtgtaataacgacaggaaaagaagtattcatcattcagctgctcttatatgggagtacataacgtaatacctgtaagtgttcttacgggaagcagtaattgccaataaaaggctgcttcttactatgttgaggaatctgggagaacaagagtggcacacttcaggtattgcctgccactgtattattggctgctatgaaaaggaaaaagagattacatattttatctttgatctttgctgcagttttatttattgcagatattcatttttagattgaaaactatgttttattgtaattagtagatatttcagtgcttgcagagtgacagactgaatgataatttgtgttatagaagacatgttttgtattggtgttaattgttccagttgtagttggcaagggtgtgttttggttgatttggacagttatatttgtcttttgaccaaagacataaaataatgtctgaaacactaaatatcttataataaaacaatttaaatttgttttggggatacataataaacatttggtactttgtaacttttaacatctgcttttaatagaatacattcctattgcaagccttaaaaatgtatttacatagaaaaccacatcaaaattcaaaactataattagacaagcataggttttgtggaatctggatttgtttaagatgttgaaagatttattttttttttgaagatgctattcctataactatttgtagagcatacccaatcaattcaaggaatgcaataatattaacctctgcttttaaattttcttttagccagtaagattgtttttatacttctaagtaaatggctaaaaataaaaaaaaaaacacgaatacaccagcataatataaaggaaatgtaatgaagctaattatccttcaccttgctagattatatattagggaaattatatttaggtaatcgtgctttggaattgcatacaatttaatcatagtgtagatagttaattcttttggattttatatttatataccacggtattaagattctgggctgggcgcagtggctcacgcctgtaatcccagcactttgggaggcctaggtgggcggatcacaaggtcaagagatcgagaccatcctggccaacatggtgaaaccccatctctactaaaaatacaaaaattagctgggcgtgatgrcatgcgcctgtagtcccagatactcaggaggctgatgcaggaggattgcttgaacccaggaggtggatgttgcagtgagtcaagattgcaccattgcactccagcctggcgacagagcgagactctgtctcaaaaaaaaaaaaaaaaaaaaaaaagattctgttggactaaatgtacaagaaaggggtattaatttttaatggctagaatgttctgtgtataattcataggaattgaagaaagattatagaatagagtataagtgctctttggaatgccagacgcagtggcatgtacctgtagacccacctacaaggtgggctgttgtgggctgtagtgtgctgtgattttgcctgtgatacccactgccctccagcctaggcaacatagtgagaccccatctcatctctaaaaaaaaaaaaattttatttctatctggagcagatgatgggagagtgttttctcagcacagccaatttagagtggagccactattgcggagagccctctttagtttcactggaaaaactaaacagtgaacactttcactgttgcccccttttttgatccgatgrcagcacagttgatccatttcagcagggactgcagcagaggaaatgagctaaaataccagaaagggcacagaggttctctggagggctaatttattgtggaacaacccaagagagacagttttgagtaattcaagtgactatacttgaattatccttcaggttccatgctatatactaaagatagtgcaaactgtgggtggtcagaagtagaacagagtatataggctggacttgggataaaggctgtgtggaggagatatgatttgaaatgggccttgaagaatttatttggtttaaatatgtagagaggattaagggatgatttttgagaatagcaccacaagcaaaggtttccgtgcagctcatttagcagacctggcttgcgtgcttctgtctgggagttttaggaatgtgaatgtagatcatttatattcatttctcttagctgaatgtgtttccttctcatccttctacccagcctcgggtttgtcatactagaaataagtgtgaggactgaatttagattaattggacctgaagcttattttggtgtcacggtatgaaacagcaggatgtatccttctttaccatggacagcaacaggatttgggatgatctcagggcaaaggaggattttattcgtcatttgacctacatagtcacaattatgataggtcctaccttttgtctaccagaagggatgctggtgacgacactagtcagattattcacaaccaaacttcgtgtgacctaaactgaaaaagagttcctgttatttgagggcataagtttaagatttagaaaaaaaataataaagttcttatttgtgtctttagtttctttaatttaaaactttttataaatggaaaataaactgtttcttttttaaagccataaccatttgcaaaatggaggttttaaaattttttgtatttatttttttttgagacggggtctcactctgtctcccaggctggagtactgtggtatgatcatggctcactgcagcctcgacttccctggctcgagcaatcctctcacctcagcctcccacgtagctgggactctaggtgtgggccaccgagcctggctaactttttaatttttattttgtagggacggggagtcgccatgttgcccatgctggtcttgtactcctgggctcaggcaatcttcctgcctccgcttcccaaagtgctgggattagaagcgtgagccaccatgcccagacaacgaaatggaagatgtttagtatttcacctttagtttttgttaatttatgaatctttaaaattactttgggacckgaaactgtctgaagtattactttagcaagctgtctggaggagagtcttctcgagatagtgaggaacttggtgaatcctctccccagtaaaacaacaacttaactggtgagaattataacaaaaaattgtgtaaaatctctgaaaattgtcctaagggcacacaggaaacggagaaacagtcattcaagaaaatctcctaaaactcataacagcaagagtctctgacagttgagccacaacccactctgttaccagccacccccagctctgctctactctagacatgtgtggccaagaagaccatagttctctgtctttctctacaactatgtctatggctatgattttggtctgggagaggcaggatgctggcatttctaatttcttcagtctcctgttagagaagctttataacaggcaagcatggagaaccacgggagacctttgagaagggccctttaaggatcaccatcatcgatggaagtagggagggtgtgaatacacacctgccaggctgcagccatccaagcaagagcaatcagagcaagatgtggtgtccccaggaaagcattcgctaacctcatacagacccaccaaaaccaagcggaagcttcactggcatgagtctgtgtttgtgtgtgtgtgtgtgtgtgtgtgtgtgttattaatcccattttatttatttattttcttttattatactttaagttctgggatacatgtgcagaacatgcaggtttgttacataggtatacacgtgccatggtggtttgctgcacccatcaacccgtcatctacatgaggtatttctcctaatgctatccctcctccagcccccccaccccacgacaggccccggtgtgtgatgttctgctccatgtgtccatgtgttctcattgttcaactctcacttatgagtgagaacatgcagtatttggttttctgtttgtgtgttagtttgctgagaatgatggtttccagcttcatcsatgtctctgcaaaggacaygaactcatccttttttatggctgcattgtattccatggtgtatatgtgccacattttctttatccagcctatcattgatgggcattttgggtggttccaagtctttgctattgtgaatagtgctgcaataaacatatgtgtgcatgcgtctttatagtagaatgatttataatcctttgagtatatacccagtaatgggattgctgggtcaaatggtatttctggttctagatccttgaggaatcaccacactgtcttccacaatggttgaactaatttacactcccaccaacagtgtaaaagygttcctatttctccacatcctctccagcatctgttatttcccaactttttaatgatcgccattctgactggcatgagatggtatctcattgtgtttttgatttgcatttctctaatgaccagtgatgatgagctttttttcatatgtttattggccacataaatgtcttcttttgagaagtrtctgttcatatcctttgcccactttttgatgggattgtttgtttgttttttttcttgtaaatttgtttaagttctttgtagattctggtagattctggatrttagcccttttgtcagatggatagattgcaaaaattttctcccattctgtcggttgcctgttcactctgatgatagtttgttttgctgtgcagatgctctttaattagatcccgtttgtcaattttggcttttgttgccattgcttttggtgttttaatcatgaagactttgcccatgcctatgtcctgaatggtattgcctaggttttcttctagggacttttttttttttttttttaatgaagtcttgctctgtcacccaggttggagtgcagtggcgcaatctcagctcactacaagctctgcctcctgggttcaagcaattctcctgcctcaacttcccaagtagctgggattatargtgcccaccaacacacccagctaattttttttttttttttgtatttttagtagagatggggtttcactatgatggccaggctggtctcgaactcctggcctcaagtcayccacctgcctcggcaggttttaggtcttgtgtttaagtctttaatccatcttgagttaattttcatataggatgtaaggaaaggggttcagtttcagttttctgcatatggctgccagttttcccaacaccatttattaaatagggactcctttccccattgcttgtttttgtcaggtttgtcaaaggtcagatggttgtagatgtgtaacattatttctgaggcctctgctctgttccattggtctatatatctgttttggtaccagtaccatgctgttttggttactrtagccttgtagtagagtttgaagtcaggtggtgtgatgcttccagctttgttctttttgcttaggatgacttggctatatgggctcttttatggttctatatgaaatttaaagtagttttttttttaaattctgtgaaggaagtcaatggtagcttgatgggggtagcattgaacctataaattactttgtgcactatggccattttcacaatattgattcttcctatccatgagcatggaatgtttttccatttgtttgtgacctctcttgtttccttgagcagtggtttgcagttctccttgaagaggttcttcacatcccttgtaagttttattcctaggtattttattctctttgtagcaattgtgaatgggagttcactcatgatttggctctctgtttgtctattattggtgtataggaatgtttgtgatttttgcacattgattttgtatcctgagactttgctgaagttgcttatcagcttaaggagatttggggctgagacgatgggattttctaaatatacaatcatgtcatctgcaaacggagacaatttgacttcctatttgaataccctttatttctttcttttgcctgattgccctggccagaacttttaatactgtgttgaataggagtggtgagagagggcatccttgtcttgtgccagttttcaaaaggaatgcttccatcttctgcccattcagtatgatattggctgtgggtttgtcataaatagcttttattattttgagatacattccatcaatacctagtttattgagagcttttagcataaagcggtgctgaattttattgaaggccttttctgcatctgttgagataatcatctggttttttgcactggttctgtttatgtgatgggttacgtttttgatttatgtatgttgaaccagccttgcatcccagggattaagcaaatttgatcatggtggataagctttttgatttgctgctggattcggtttgccattattttattgaggattttcgcatcgatgttcattagggatattggcctgaaatttttttgttttgttttgtctctgccaggttttggtatcaggatgatgctggcctcacaaaatgagttagggcagagtccctctttttctactgtttggaaccgtttcggaaggaatggtaccagctggtctttgtacctctggtaaaattcggctgtgaatctgtctagtcctgggctttttttggttggtaggctagcaattactgcctcgttttcagaacttgttattggtttattcagggatatgacttcttccttgtttggacttgagagggtgtatgtgtccaagaatttatccatttcttctagattttctagtttatttgggtagaggtgtttatagtattctctgatggtagtttgtatttctgtgggatcagtggtgatatcccctttatcattttttattgtgtctatttgtttcttatctcttttcttctttattagtctggctagtggtctattttgttaatcttttaaaaaacaccagctcctggattcgttgatttttttgaagggctttccatgtctctatctccttcagttctgctctgrtcttagttatttcttatcttctgctagcttttgggtttgttggctcttgcttctctagttcttttaattttgatgttagagtgttgattttagatctttcctgctttctcctgtagacatttagtgctataaatttccctcttaattactgctttagctgtgtcccagagattctggtacgttgtatctttgttctcattggtttcaaagaacttatttatttctggcttgatttcgttatttacccagtagtcgttcaggagcaggttgttcagtttctatgtagttatgtggctttgactgagattcttaatcctgagttgtaatttgattgtactgtggtctgagagactgtttgttatgatttccattcttttgcattkgctgaggagtgttttacttccagttatgtgttcaattttagaataagtgcgatgtggtgctgagaagaatgtatattctgttgatttggggtggagagttctgtagatgtctattaggtccacttggtcctaatargaccaaagatttcaagttctgaatatccttgttaattttctgtctcgttgatctgtcaaatgttgacagtggggtgttaaaatctcccactattattgtgtgggagtctaagtcttggcatgagtcttaaacatactcttactgaaacaccaggggttcagtctagttcgtgctgctcgccgcacagaaagccaatcactgagatgacaagtattgccaaggaagaaggctttaatcatttgctgcagccaaggagatgggagctcagtctcaaatccatctccctggctgactaaaattagaggtctatatagtgggggagaaatgtagcaatgtgtaagaaaacaagaactagcatgcagcaaggagtcaatcatggtgaatgaggggtctggtgtggtgagctggtgagttttagttctttgatacttatttagaggcctgaaggtgctttttggaggaaggaactcagataaaacaaatataagtttcaagcattaagaccaaatgatcaatttctatgttcatcaaaaagatctgtctatgggactattgggtcagtttcaatacctctgttaaaacactgagcaaacaataagctattctgacacaggggcaattcctaagaaacgaggcttaaaaataatattgcagtcatckctggcagtctgaaagctgtgtacatacccaaggctgtaccctcacaggagcaactggagagggaaaagcccagtggctagtttccagatgaacatggtagaaaaaattggtaaattccctgaatgtgatagcagactccaaggcacccctcagccccagtggttaagggtaaaaccctaagggcccaggggccttaagaataatctttcactgataaatggctcatgcccattcaggggtgacccataggtagccaggctgaaagattaaaaacgtgaaggaaaaatgtgtgcaggaatgtcaggctgctcactgagccagaaacagatttcactgaatgagcctagtgaagtaaccaagtaaataaataggcaaaccagaaacacaagaagctctggggcagggaagggaaaaatcaatatctggaattgataaaatataatgcgtgaaatgtctagttttcaacaacaaattcaagtcatgtaaagaacaggaaagagtggcctatacacaggaaaacamacaggcaacagaaacattattcaaaaggacccagatgttagacttaacaaagaactcaacgcacccattaaaaatatcttcaaagaactccaggcaactatttgtaagaaatcaaagaaggtatggggacactgtcaagtagggaatatcaataaatagattgacattataaaataattctagagttaaaagtacaataaccaaaatgggaaaaaattactagatgatttaacgatcgattagtggtgacagaagaaaataatcagcagacttgaacatagatcaatagagatggcacaatctgaagaacatacacagaaaagaatgaaaaaaactgacagcctcagaaaaatgggggtacaccactaagggaccagtgtatgtgaactatatccaaaggagaggagagagaaaaggggcagaaaaataattgaatgtatgtggctgaaaacttctcaactttatgaaaaacattaatacacacatccaagaagttcaatgaattcctcatagataaacataaagagatccacaccccctatatcatagtcaaattgttgaaagctaacaattaaaaagtatgaatgcagtgaaagaaaaacaacacatctcatacaagggaaccccaataatactaacagcagacttatcagaattaatgaagaccagaaggcagtaggatgacattcaaagtactgaaagcgaaatgttcaaccagtcatcttacatccagtgagagtttttctaaaatggagacaaaagacagacatttccagataaacaaaaactgagagaatttgttgctaaaagacctggctttcaagaaacagtaaagaaagttcaagttgaacgaaaatgatatggtaatttgagatcacatatacaaaaacaaggagcactggtaaacattttttatctgcacaaaacatagtataattacatagttctcttaagtgatagtttgtggctgcagtgagctatgatcgtgccactgtactcctgcctgggtggtagaatgagaccttgtctctaaaaaagaaaaaagacaaaagtccrtgaacatctcaatagctgyagaatccgcagttaccaaatcgtatacactttagtgacacacacacacacacacacacacatacacacacacacacaaatgggactagaagggaacttcctcagcctgatagcatctgtgaaaaacccagggctcacattgaagactggatgtttttcaggaaaaagacaaggatgttcattcttgttacttctgtttagcaatgtgctagaagttctagtcaaggcaattaggcaagggaaagaaataaatggtctcctgattggaatggaagcagcaaaacattttgcagatgacatgatcttgtatgtaagaagtcctaaggaattcattagaagaaactattagaygtaacaaggaatctaattgtatttctagacattagcaattatcattgtgaaaatgtaattaggaaaacaactccctttgcagtattattaaaaagaataagatactgaagtatggattttaaaaaagaattttacactgaatctagaaagcattgttgaaagaagttaaggaggatctaaataaagggaacatgccatggttatggatgggaagacttgatattgttaagatgatgatacttgccaagttgtcctacagattcaacacagtgtctagcaacatcccaaccatttctccaaactcatttttttttagcaaaatagacaagctaatttaaaaattcacgtgaaaaatgaaggatctcagaatagccaaaacaatctagcaaaagaacaaagttggaagcctcctgatttcaaaagttattacaaaactatagtaattaagacaatatagtactggcatactaatacacatattggtcaatggaatatatttgagagtccagaaatcagttcttacatttatggtctgttgatttttgacaatggtactaagacatttcaagggtgaaagaatggtcttttcaacaaatggtgttgggacaactgtatatccacatgcaaaagaatgagattaggcaatggtttcttagatctatgactctaaaagcacatatgacaaaagaaaaaatagattattctacatcaaagttaacaattttgaatctacaaacaataccatcaaaaaacttaaaaagacaaccaacccacaaaatgggaggaaatgtttgcaagtcacaaatctgataagtggttaacatcctgaatatctaaataactcctacaactcaataacaacaataattttaaaaaaatctaatttcaaaatgggcaaggccgagcgcagtgactcacacctgtaatcccagcactttgggagaccgaggcgggtggatcacctgaggtcgggagtttgagaccagcctgaccaacatggagaaaccccatctctactaaaaatacaaaattagctaggtgtggtggcacatgcctataatcccagctactcgggagtctgaagcaggagaatcgcttgaacccaggaggcagaggttgtggtgagccgagactgtgccattgcactccagcctgggcaacaagagtgaaactctgtctcaaaaaaaaaaaaaaaaaaaaaaaaaaaagaaaaagaaaaagaaaaagaaagaaaaaaaatgggcaaaaggtttcagtagggatttctccagaaaagtataccactctcaaataagcacataaaaggatactattcaacactattagcattagggaaatgaaaatcaaaaccacaatgcaacaccacctcacatgtgcaaggatggctataatcaaagagaaaggccatagctagcatgataaggatgcggagaaactggaaccctcatacaccgctggtggaaatgaaaaaaggtgcagccatttgaatttcaataagaatttcaagtcttagcctatttatgcaagtatttgctagtaagtattttttatgagaaggtaaataattttgctggtagcacttgttacccatagaatgatcatgatatcagactataattttctggataaataatatatttttcaacctcaaaaaaccttaagataaacttttttttccctaaaaataaatggtcaaaagtttaagctgtttttaacttaaagcataatatagttttataggcaagagttcattaatctcagaaggagaaatttataacttttttctttgcttttgatgaagagactaaagatatatggactgtgatttttctcttgaggagtctgggctctgggaatataattaaaacccctttggaaaatcctttctggccttctgggggattctggtgactttcggacacagtcaccagaatcccccagagacagatttgctgtgtttatgaagattacctccactgttgttttaatatttgacagtaaactggttttattgcctattttcataaaagttttgaagactctttcttccatcaagtcttcatggaggaaggaggattgaaagcaaaatctaaagacttctgtgtttttaacttacacgttgaacagacctatgtggaaatagagatttgcattattgaacctaaatttgaatgcacaaattaaaattagcccataccccaccattcttccccctcttcctcaccttatccatctccctccctctctctttctttcacgtgctgtgatgtttgatcttctcttggtaatcaacataccttaccctttatgctcatatacagagtgaagatcaaaaagtattgatttattggtgacagttaatgatgcctccctagaagagtcaggacttaatatgctgctatgatagtaccaatgtactgtttataaaaaatgactatgtttggtggttctgtggaattgtttcatgtgatgatgcgccaggtttaaaagtgaatgaaatgtctgtgctatccttccatagctgactttttttttatttttatttttttaagagacagagtctcagactggagtgccagtggcatgatctcagctcactgcagcctctgcctccccggttccagcgattctcctgcctcagcctcctgggtagctgggattacaggcatgcaccaccatgcccagctaatttttgtattttagtagagacagggtttcaccatgttggtcaggctggtctcgaactgctgacctcaggtaatccactcacctcagcctcccaaagtgctaggattacaggtatgagccaccgtgcccagcagaaaagtatctttgaaatatcaagttttagtaaacacattttaagaaactgtagtataaaccttgctaaccaaaaatttatagaagagaggccggcgcagtggttcatgcctataatcccagccttttgggaggctgaggtggcaggatcacttgaacccagaagtttgagaccagcctgggaaacacaatgagaccacgtctctacaaaaaaatacaaaaattagttgggcatggtggcatgtgcctgtagccccacctactcccagctgcttgagaggctgaggcaggaggatcgcttaagcccaggaggtcaaggctgcagtgagccgagatcaagccactgcactccagcctgggcaagagagtcagaccctgtctgaaaaacaacaacaacaacaaaaaaactaacccaatagcttatagaaaagaaagagaatagtgtaaatgaagttaaaatgagagcaggaagagctgacgtcccctaaagctttgatgccacctaaagtatttctgttttttcctattttttctcagagagccataaaaaaattttgttttgaggtgtgtattagtaggaatgtaggcaaggcttttctttaattgatccatgtgttaatctttatgtatagttctgtgtatttttctatatggattgtaatgttgccattaaaactttttacaaaacatgtataggtcactctttaaatttccttagctgtaaatatagtacagaatgactccttttctcttttaatactctcctgtataatgttgttggtgtttttacttgcagctccttttactaacattttgtgtacttaattacccctgtaagtaaagcttttcataattaggatggaattttgcctgcttttttctagtgccaacaaaagaaactagcatgttcttcatgctagaagctagaatctgagttgaaatccacttgcagctgagtgctttttaaatgatcagcttttcttcaatggcctagatcggcacaaggctccatagaaattggctttgagttggtctccatcctttgaactggcaaggaaagacacagtaacttgttttgttttgaaagctagattgcagtattcccccagtgatgccagactgacttggctgttgtkttgtaagtaaaaactttcctattccagtaatgccagccttcttctcaatactgccacacacgaagcaggtagacacacagctattccaaaaacaagaaaacaaaacaaaaaactctctaatttgaccatctctttgcgttccacattaagccttccaaaaaataaaacaatacaaacttgccaaatataagaccaaaacaaagctttttctttttaaaatgattgaaaatgtatttcgctatgtttctaccaatgtgaacaaagcttgactgtattaaaaaatctgatcattataaaatgcagatgaagaagatcaaatggcaaggtggtttcagtttattctgaatattttagtgacagaaagttgaacaggaaggaaacaggtgttagtgtaaaatacacagtttaaaagcaaattataccatcggctaaattagaatcatttatttaactaggaggaaaagcacagcttctgaatagtgatttgaaggcatagaartttgagggcctgaggtgtttaatctggcatgatttgtgaggggcttgtagtaggtacagtggtgacttgaaataataattaggtttgaactgattcagtagttttgcattttcaaacttggatttagtttgcgagattttttctacccaaacagcataaagagcttatgtaaggcaagcttctttgggtttatgttatttaataaatgtcttcaagcactagaaatagtggttttgaagaagtcctcttgtcacatctatccgrtcttatcatcctctgagtttatcccttttaaaaatccctctgttctccaaagcgtttgtaggcacttcttgaattcattgatcctcattgcttggtttccttcctggtaacatcttccatatgttttcttcactttttcagataagagtattacttatattctctaccatgagcatcttaacatttatgttgttgaatctcttccatttgctcattctttttctttttcttttttaattttttttgagatggagtcttgctctgtcaccaggctggagtgcaatgatgcgatctcagctcactgcaacctccgcctcctgggttcaagggattctcctgcctcagcctcccaagtagctggaactacaggcaccaggcacacaccaaccaccaggcccagctaatctttttttttttttttttttttwagtagagacagggtttcacaatgttggccaggatggtctcgatctcctgacctcgtgatccacccacattggcctcccaaagtgctggcattacaggcgtgagccactgcactcagcctctttttcttaatttgaaattatgcaacactatggagttgaaaacctacttaaaaatatctttttcatacacgtatactttaacaaatccagaccatgtcagcttctgatgtttctaacaggaaagaatacatccctcttaactacacttaacattttagattgttcaagaatctctactcttttctgtattcatgttgagatacaattagcatctcatgtatggcaaccaggattgcatgcaaaattctagaaagaatctataacatatgactcataccaaacagtaatttgtttgttttcagtttgccctctttttttcttaatccaacttaataagtcatgtttgccattcttgaggttactaatatggtttcacagatttcagtaccctgttttaataaccacggcattccttccttataatagtctactatacattttttttccccgctaggccacccaggactttgttgaatctgtcacatccttactgtttttcttactcatcttactgtggccttgctgttttgctcagatatttattttatcttttctgtgtgtttactcacatcaacatcgtagttttaaaatgtaagctgttgtaaatttctagtggtttattgttgcccacgcttttaaaaaattcattcattcactgtaacagccacttaataaattcagattattagaaaactactgtgtatgatggccgggcttggtggctcactcctgtaatcccagcactttgggaggccaaggcaggtggatcacctgagctcaggagttcaataccagcctgaccaacatggtgaaaccccgtctttactaaaaagacaaaaattatccgggcttggtggcgggcacctgtaatcccagctactcaggaggctgaggcaggagaatcgctcaaaccctggaggtgaacagaagttgcagtgagccgagatcgcaccactgcactccagcctgggtgacagagcgagacttcatctcaaaaaagaaaaaaaaaaaaaaagactgtgtatgggtctatcttccttttaaatttctttctcaaagcatgtaaaaccatctctcttgctaagactattctactgagttttaaatttaattccacagaagtcatctagaggaagtgacatactattgtkctgaagactcatgctgagtttaagagaaaaattcacatttgaaagatgttgcttattctgaaaaactcaatatataaatcttacaaagaataggaccacctcattaattaattagtaggaccttacaaagaataggaccacttcattaattaattagtaggaccttacaaagaataggaccacctcattaattcattagggataaaaccagcctatgatattcctcctctttctgtatgcgcataaaaagaactagaagcaagaggcaggcggactcacacattgcacattggccccctccctccttaacaagcaaaatagcccattttagtgatccagaaaccctggaaatggattctttacaactattgacgatacccactggcaatgatggtctatatttcatagttactttaaagtcccaggcagatgtgattcagcctttcagatggatgaaagggatgttggaaggatagaatttttgcagggcatgaattcattatttcttggatctttttaactgataaggtattttaaactcatagacagccgtgagtttaaattcattcctttccatctattccagtcagacttcccttgagctcatagtgccagctggtttttctagggggacaaagcggaaaagaaaaagaggcagaaaaaattcgaagaaattattgaatttttttgcattaacaacctcctcaggtgacactcatcccccctaccctcgccatgattcttaccttcttcccgatgacccctgaaaagaggagaaaaaggtgagaagggccaaagaaattttacacaatgggcagaacttctgtcggagaagatatcaagggtgtagagatcttccagaaaagggaaaacccattgtagaagaaagggaaacaggccttggaagggtgagtgcacctgagcattgtatgtgaagatgctgatttgtctctttagcccaaatccagtctgagtttgcatgtctgtatcttttccaccacaaagagacatatatcttgcttgccataattgtgatgttggacaataaccacatgatttctgctttaggagatgtgtaaaaaactttctgtcatcaccaccaacccccccactacaaatgtgtgtatcagcctccccacagattagctataattagaaaaccatgttgaatcacgttgagtcagatgaggataacttcctgtattccctgtatccctgaggaaactaaggtttattctcttcatgacaagctagtttccttactttatttctccagttatgttttagcaaagcaattatataaaaatatttttttcatatacttataaacttttaaaaatcctggccatgtcagcttctaatgtttgtaagaggaatgagtacatccctcttaactacacttacaatttcagattgttcaaggatctgtattcttttctgtattccatgttgagctacaattagcatcctgtgtatggcaaccagtattgcatgcaaaattcttcaaagaatctataacacatgactcatactaaagagtaatttggtatttatacaaactaaaattattctctttcctgcctctactttagttttttggcttctaattcaaaaatgagaaagggggaaaagatgaagtctaagatattgcgataaatcaagagtgacttctttctgtccagggtatcctcatatacaagttgagaaagagtgcatggacgtcatctttgcacgattaaatagaaagacttctaagccaagatatcagtctatggtgaagttaatattgctatgatattcatttgcttttcattttaaacgctccttttatttggatcagattttgatttttaaataatttaattaattttttgttttttttttcagagatgagggtctctctctgttttccaggctggagtgcagtggtgtgatcatcgctcacgacagcttcaaactcctgggcttaggtgattcttctgcctcagcctcccaagtatctgggattataggtgcatgacaccatgcctggctaattaaaaatttttwattattttttttagaaatgggttctcactatgttgcccaggctggtttcaaaatcctgggctcragtgatccacccacctcggcctcccaagttgctggcattacaggcatgagccactgtgtccagaccccagattagttagttgtgtaatcttgcatcagtgaagggcataaacctcaagcttttcctgtcttctggtgaagtcaaccagtacctttgagaataaggagccatctcccctcttcttcctctgccccatatcaaagttggcctggcagaaaaaaatcccacccagaatgtctggtaatgtattcattagtcactcctgatcattcagatgtttcttttttaagtttctagttttttaatatcttaggttattcatgtctattgtatcatgtgtgagggtttcttcttccccaggagagtgtttttggtgtggaattaccttgtacccgtttggagatagacacaaaggaggtgggtgtgtgattcatgcttgagcaaatttactccatgcatgatctgcggtgaaagttgaagcctaggattctgctgatcattatggcgttttttgcatgacttcagctctttgcactcattcagttctattggtagaaaggtgatttcctttcaggtgtgacctgaaaatggaattttttctcatctccctagcaccatccatactgttcagaatggaagcttttagctttagtgactctcactctcgccatgcctttaactacatacttcaggcccctaatacagtgggacaccccatggtatttcctcgtcgccagcattaaagattatgtgttccagaatcattagactttttgaaaagacccctgtgttagttttgcactgttataaagaaatacctgggactgggtattttacaaagaaaagaggtttatttggctcatggttctgtagrccacacaagcaaggcacccacatctgctcagcttctgaggaggcctcatcaccttctgccatgaaggttttactcasggcagaaggtgaagaggggagcagggatgtcacatggtgagagaggaagcaagagaaagaggaggaagtgccagcctctttttaacaatcacatctcgtgggaactaatagagtgataactcactcattcccatgaggagggcacaaagccattcatgagcgatcctctcccatgacccagtcacctctcgctaggactcacctttaacagtggagaatcacatttcagtrtgagatttggaggggacaaacatccaaactatatcagccatataaaaattaaactcttccagggatttctttcagggattttgttttcctttttgctactttgggtttaactttttatggaagtgcctttacaaagttaagtgacttattctttatgtcttcagcaaagtcaatattgcttccactaatggtagctaaggacaggaaggatgtgagtttttgttgttgtttttcacatagctgggaatagtcatggagtaggctaggatttggatcttagtttcttaagccacatttctacctcttatctcatgaaacaaaacaatgatttaaagactgggctaacagttctgtctttctaagagtttgtttgattgctgactgtccctgttgatggttcttgtgcggataattaacaggtatagtcggataagttgccaccaacttagaaaacagtcagggatctttttttaagagctgcttacagttgttcaagtcagccttgactcagctctgcataccagctgctggtgaccccagcttgcccctttgcacagaccatgtgattttaagtgtcaaggtcttgtccgttatcagtttcctaccctgtagaactgctgttatgcattttgtttactgatatgcattttcagtatctttcccttctctggatttttcgaaatagactaattaaataccgcagctggtctttttatcttgggatggaatcacttacagaatgggacaygtcttcctctcagattgagtcatggtgtggtgacagaagggaatttcattggagcattaagataatcagagactccatgtggcattaattcactccattactgtttattgaagaataactgtgtgccaagcactgggcttagtactttatcttgggaggggtgggcagggtagggggcaaattgcagaataagactgggctttgagagagattggagttgagttatacatgcagaattctagaggatacttgagtttctttgcctacttgctgccttaaatttaagagaattacactaggcttgggaaaacaaactttcataatcccaaatagcatctgattctaaaattgcttttatttgacttctcaatgagtcttttaaaagatgatttccttcctcagggttttgatctggctgtgtttgtttctatgaacacattgtctacagattctaggcattaagcagaatgaactagctggaaaaatccaacccagaaataaacattcrcctgtagtcatttccagcaaatgcttgtatacttatcgaaaattcaaatttacttttaactaaatacctttatgcagctgactgtagtgctttggggaagataatggtgttaaaataaggtaatgatgattgagaagaaaggactgattcgaggaacatttaggagttagaatgacatcatttagctatctattagatattcaatagagatatttatgaaaacttgaaatatgtttaacattgtgtatccttataaccactgcttctgaatgttcagccagtgatcttgggtaaagacattaaaacttatttggtgaatacctaacagtgtatctcttcatcatgtgtatgtatctgtagatgtggtattagaaaccactgacacatataatgacttttcaagatatttaactagtttataggctcctgcgtgacttatttaatcttgtgattttgttctgaggtagctaataattttatcataacaagataaatttttaagaaaattattggaaagtatgaagtttttatttgttcatttcattagttgctctgctagagttacaaacaagtacaattacgttggaaatctacttcatagtaaatactcaggttcaaatacatttaccctaggacccagtagtcataggagtagcattacttgaaaaaccctaaactgcaaaccttctaaatatctatcaatattagatacacggtggaatagtaacaatgaaaaatagcaatctgttatactcaacaacaatatggattttacaggcaaaagccattataaacaaagtgtttccatttatgatgctcaagaacaggcagaagttatctgtgacgatagaagttagaaggagacttttgtgtgggggagtattraaggaggtataaatggagccttcaggagtgctgataatgtcctatacaatgatctgagtgatagttacaatgatgcatttgtaagcaataattaaatgaactctatacttgagtttygttcactttactatagaataacaatattttaaaaactaaaatttcttaatagtggccactttagaaaaactttttattgaacagcaaaacgctaatttgagactctgggacaatagagttgaagatgtcttcagggataggaataatgaatgatttggctattgttggacgaggatgtgatagaattgtttgacacaatatgataaatttcttcaaatggatttgttaaagaaaggaaaaatgctaaatatatgatcyctgaaaatgatgccatcagaaagaagactatttggtctgtaaaggcttaaaatcacatgttgaaatttttattctctgaaaatgagyatcataaattaactcactgacatgccactgtttatctctctttaacttccaaactctaggaggtctttgaagaatcagccacttgcttattcagtatgtcatttctaggaataaagattgtagacttkcaaggaagctggacatgtcttcctccataggatagggtcaaatccagttttcatctttgtgtcttcacagtgctaaaagcaccagcatactctatggatggagcaagaaatcaaatcttgtccctataaaagggccagaaagaaacatcatgccattggccaaagagcaggaagtgaagcaaaacgcctgaataccgaatgaccatttactaaatcattaaaagtttattatgtgattctagtcaataaacatatgctcagtgattcatttgttttctgaatatttaacattttctctatcaaacttttcatctaaatttmtcataggcattttgttgttgttataactacaaaggaagggaactattttggttgttatttgtttttcataatttccctgaaattgagcaatacataagacagaatattcagatggaccttaccgtctaaggtttgctttctagttaacaatttgaaaactaatttattctctttatgttccgtctgcccatattaattatatttgataacacagggcgttaaggaaatagtggggaaaatgaggcatcgtgtgtctcattccttggyaggagtgtgctctccatatggctgaggggtagtgtggaatagtggtcaagggggtagagcctggaaccagactgcctggctcatttcctagctctgccactttatggatatgtgaccttgaacagccacttctgctgtaaaatgtggaccgtagtggtacctgtttcactggattttggcagtgattacaaggaagaataaactaaagccctttattatgcaccaaataatgttctctgaatacatacttgctacaacataataataaatatgcacatggtctcaataagagtcttttattcctttgtggttgtcattaaccttattatctgcatcacgtcttttatttgtgatgattaatatctctcattgaggtaacgaagtacaaagtgagatgctgatgcctgtattttgtagacacatacttgatatccaaatatttttggcaatatcatgaaacatttagatatggtactcacaatgtattggttttcttatattttaatttttattgtaaactttgatgcttctaactgaattctaagtgctgaaaacataatatgaaaattatagataggatacatatctaaaaccagatttttagagggaattctgaagggaaaaatatagctcagcagacttgtatgcaaccagataggtgaaacattgttttctcctttccaagatatttgaaatagcaaaggtccaaattatatcttgcaaatgtttttcatgccaaaattggctagactggcaaaaagatatgttcaaagaataaaagattgtaatgttattttaatttcaaggagtttaaacatctgtgcatattttctttttgctttaaagagtggagacttaggatagttggtttaaattagaaaggcattttgttttaagagcctgctgatactgcagcattatagtgcatgttactgtgatatttttaaacaaactgtgaaatttagaaatgcaacctgctagaataaaaactttaataaaatatatacctaatgccattttgtttcttcatcggtttgtttggaatcactttggtgtattttcaactctggattttttttttaattgtatttttttttttttkgtcaaggtcatcctaaatgtttcarctttttctaagaaaggaaaagttaatataaataagaaattgagtttctaattcttttaaacttatccctttaaagaaaaatatcaaaaagcctaagaagttcccttggttttttgttagcaaattcctgtgctgtatttagtgttgtgttatggcagaggtgtgtgtgcacatggctctcagggactgcctacagcagaggacaagtgaactttggagtcggacttagctgacaggaaatcccagcctgcctctctggctttggtctttcagccatttttcatactgaacatcattcatttctgtgactcaatacataatagttattatttttacagatgtgatttatgcgtgtcacgctgctgggacatttaattactctattcaacttgactgtatttagaaaaggctatggcgctactcctcttgtttaacagcttctattctaagagaagaatctaaccattgattgggttggatcataagtgtggctaatcttgtaggctaggtaggtatcattttctttattttagtgtgccttgctttttttttttttttttttttttttttttgagacggagtctcgctctgtcgcccaggctggatctcgcctcactgcaagctccgatctcggctcactgcaagctccgcctcccgggttcacgccattctcctgcctcagcctcccgagtaactgggactacaggtgcccgccaccacgcccggctaattttttgtatttttagtagagacggggtttcaccgtgttagccaggatggtctcgatctcctgacctcgtgatccgcctgcctcggcctcccaaagtgctgggatgacaggcgtgagccaccgcgcccggctagtgtgcctttcttaaaatcaactggaacacgtatgtcttagagtttaccaaatcgcttttatataacatgcatttgcttctttttaaaatgacacatctttcatgtctgacttgatttctggtttaacagtgatttataatggtatattgaatggcaaaagatagtcgagggagatattgttatcaagaaacaatggagaagtcagatggacactagtttttacttggtgggaagatgtcctgcagacttacttgcacatatttgaaattctcgcttctagtttgttagaacaacccgagggatgggaccaggagaccggtatcaggatcatagactaaataagaatgaaagcaggaaccaagaagatggtgtcaggagagattgaaacaacctactcagttgaggaacaacatccagatgatgttacaaccaggagacacagctctccaaactgaagtctaaaatatacatcaagacaaccaaatgagagagacaggctaggagagcacaagaggctcttcttggtaaccttaccaaattccacagctgtcagtctccttctgaggctgactcagacccaaaggcaggacaaacaaagcaagacgctttcacccacactatagcttgatcctctgccaagaggcacatctgggaccaagttcagaagcaggcttctagattcttaatcagtgagaggtgtcaaatgtcacctcaccaattagcaaactgtaattctgctttgcttctgagattgaatctaggctgcccgagtaaagaggattgtctggtgccaaccagatagtctggagataccacttgtgggcatggtcagtgtcagtgccttctgtggtctgcagtgccttggaatgctgttggatgcctgtgagatcagccaccctcccctgaggcttaccattaatctgagtaggagaatacggtagtgtaagtaagactgcagtcttccttggttgcgggagtagaccgaaaaaaaaaamcaaaaaacaaaaaaccctgataacctcttgctctgcaaaatctcatgcaagcattcttcacttttgagtgtagactagttaagatttaaaatgactgctgttttcatgaaatagtatcagacagttcagaaaaggctcatggttcctgattctcattgggtcaaaaatctagagatgaatttatctttccaaagtaagaaaactgaatccaaatcaaggttatgagatagccaacaacagtatgtctaaagagttcttggagaaatcacactttgtaaattcccaaggggcaggagttggccaatgtatgggttgttctccttcttaattttagatgtttatttcttatcgccttctattgtctctgctgttcctcttgttggaataaactcaagtgattttacaacatcataaatataactgccggttattggattacaaaataaaacactagcacctggcatttgcaagacattttatgctttgaaaatattttatactttaccgaatttgtttatctcaagttatgggaatattgcatrtggattattaactgtattctacaggtaggaaaatttagatcttgaggccaaggagcttgtccaaagttacatggatgctaatttaggcaaagacatgtcctgaaatatggatctcctactctgatacagatcaaatcattggaaatcttgagtttgggaattgttctctttgcctttccytctattcttacatctcttgttcactttggatttactatttcrtatttacttatattctcctggtcattagggtattcttgggtgcatttgatagctcttattccttgaatacattgcatacctctggatataccaccttgtgcyctaatgtcgtttgagaaacaacagttttcacawtctgaggttctgctttgaaatttaccttaattcatctctatcgttgagtaatcttatctttttctcttcagagaaagatttgccttattggatctggccatttatcccttatttaatgtccacttttcagcaaggtcatgacatgccatttcagaagaaagcaatatgctcttttaactaggaatcaggaaactaaaacttttgttgtggctctacatttagactgtgtgcaaattatttactagcttgtaaaaaattgtgagattttactagcttataagaaattgtaagattttactagcttgtaagaaattgcaagaaacttcaagttatctctattggatatttaatgtggagctctttgatgtcatcttaattagctaatattccatgtgacacatataaaatgcatactatgtttaaacttccgaattagcaataaacaccatgttgactgatcaaataattatttaaatgtggttttggctacttgtgtaataaatatagttcacataaactttctactatgtcttgatatgattctaagttacagaagatattatcttgcagttcttgaatttaatagtagaatcacagttcaaccattattcaaatacttccttttcaaaagaagtattcagtggttcccaaatctgcaccagcatcagctgtggtatttttttaaaacatacatattccagggccctactctagagaaaattgacttttcagaaggttgagcaggatcctttatttaagaaggtacctaagtaattctgatgtctagccaaggttggttgtctaaccatttttccaagtttattgtgggacatctaagctgggcatagcagtttaaacaaggtttacttattcagcggacatttttggatgcttacaatatatcaatcattgtgctgagtactacagtaagcaatatgacacagagtttgtctagaggtaattatactttagtgaaaattgcccccaaatcactttatcatgtatrtgttgcagtaggagagtatatagtctcaaaagagtaaagaagtggctcctaagtcagctcctgtaagagttctgtgggaagtacagggatgttcaggagaagcatcacagyggaatgagacttgaacattcctgtccactgaatagtcagagtttgtcattttgaaaatagaaaatagaagagaaatacattatcaggggccactaaatatctgttaaaaggggastgacaggatgaaggcagtacagaatgctgggctgagagcaggactgagatcctagaggcagaatcccagtctacccgtactctctgggaggaagtgatgagaacttgcagcagggtggtggtagtgaaagagaagaatgaaagacaaggaagcatcagtggaacttgatgtgtggctggataccagaaatgcagaggaagttagtcaaaggttcccrtcctgatgactggagatcatggtatcactgactgagctctaggggttgtgaaatagagctcattaggcagaggatggtaagtgtctggtttttttatggttttccgtgcatttaccctactgcctagcacaatgcctgatgtgtagtaggggtattagttaaaatactggtttggtggtctctgttgtgacttgtaaaagatgaaaagttaattttatctttctcatggagaaatctaggcaggtaagtgcccagggaggtgcagtgcctgtgttccatcaggttgtccagagattcattccccaggccttctgttgcttcaccctcagggcatagtataactgatgatggctcacttccataattctgcctcagcctgagaggaaaaggatagagaaagtagagggccagccaggcacagtggcttacgcctgtaatccaggcacttggggaggccgtggcgggcggatcacgaggtcaggggatcgagaccatcctggctaacatggtgaaaccctgtctctactaaaaatacaaaaaattagccgggcatggtggcggatgcctgtagtcccagctactcgggagactgaggcaggagaatcacgtgaacccaggaggcggaggttgcagtgagctgagatcgcaccactgcactccagcctgggcgacagagcgagactccctctcaaaaaataaaaataaaaataaataaaaaaagtagagggccagccagccttttgaaggctgcgcttttatcgctctccgcattctgttgtccgtaacttagtcatatggctatmcctggataaaagtaggatgtaggctggygctgtggaacatggctgtaatcccagccacttaggaggctgaggtgggagggatcacttgagcctgggagttagaggctacaatcagctataaccatgccactaagagtacctcactgaatatccactgcagtctttggaatttgatactgttttaatcatttttctaggggaggtaactgaggctttaggatgttggggtagcttttctccaacacattagaaagcaagtaggagaacctcacaatctgtgcaccagaagaactggcatcacccgaaagctygttagaaacaaagaacctcagtcccacccagatttagggatcagaatctgcattttaaaggatcccagatgattcaagtacacatgaagtttgagaaatactgctttattttacagagaccgtgttcataatctctacacagtcctgccttctagggaagcctgagatgataactttattaagagaattattaagagacgtgacattaaagcagattcaagataattcttttttctgattataagttctaattttatagatttcaaatgtgttaattctgcattttctgcgttttgcctcagttctgagatcatcttagaagagtgtactctcctcttcattgtattgtggtcactgaattctaagaatgttctaactttaggttcttcttctccaaggtgttggaaaaaaaggtcagatcatagcagtggttcgtaatgcaaagtttgggttacttaaggacactgtggaatccatccttttagacatctgtcctcttctgaatgtctgccttctgaaaggtggtagatgattattgttcctatgtaaaatcttaggcatttaaatgtaaaatccagtttgtgatcaagtgtgtttgaattataatagaaaaagcaggctgggagtggtggctcaagcttgtaatctcatcactgtgggaggcccaggcaggcagatcacctgaggttgggagtttgagaccagcctgaccaacatggagaaaccccatctctgctgtaaatacaaaattggctgggcatggtcccgcatgcctgtaacctcagctcctcaggaggctgaggcaggagaatcgcttgaacctgggaggcggagattgcagtgagctgagatcgtgccattgcactccagcctgggcaacaagagcaaaactccatttcaaaaaaaaaaaaaaagcaaattccatatatgaaatgtgaaagattctataagactttttaaaggactaacccttaaacatgagccaattgggtttaaaacctatgattaaaaagcaacatgcagatatcagcatttttagagagggtacttgggtatcagtttggagaatggacaggaagggatgagatgaaacgggtggctttggaattacttggaaggctttcaaaattcagagtgatggttcctactctcatgttctgattagtaggtttgtgatgaggcctgagaacttgcatgttcaatgtttattattgatacataatatttatacatatttatgatacatcatatttatacatatttatgatgttacatgcatagaatgcgtggtgatgaagtctggatatttagtatccatcattttgagcatatatcatttctgtgagttaggaacatttcaagtcctttcttctagctatgttgtaatatataatacattgttgttaactatgctcaccctcctctatcattagaacgtatttcttctatctaatgcttgtacccattaatcaatctctcctcatcacctccccctccaccacccaccctacgcagcctctgatatcttttgttctactttctacctccatgagattaacatttttcactcccacatatgagtgagagtgtacaatacttgtctttctttacctggcttatctcacttaaggcttttctcactttctttacctggcttatctcacttagaacctcctgttctatccgtgttgctgcaaatgacatgattttattctttttttatgcctggataatattctgttgtgtatgtatgtatatgttttatggattatatatatatatataacatacatgttattggatacattatagtacatacatgtgattggatatatatatatatatatatatatataacatacatgttatatatatttaaaaatattttttctttatttgtccattgatggacacaggttgatttcatatctttgctattgtgaacagtactgcagtaaacgtagggtgaagatatccttttaatatttattttccctttgggtacatacccaggagtgggattgctggatcayatggtagttctatttttagttttttgaaatatttccatattgttttccatagtgactgtactaatttaaatccccttttattcacatccttgccagaatctatttttttaaataatagtcattttaactgggtaagataatatctcattgtgtttgatttgcattttcctgatggttagtgatgttgagcagtttttttcatatacctgttggccattcgtatgttgtcttttgagaaatgtctactcatatcctccttaaaaagtgggcaaaggagatgaattatttatttatttatttacttacttattcatttttttatgtactgttgagttgtttgagttcctcatatatggatattagtcccatgttgaatgaatagtttacaaatattttctcccattaaacaggcaatgtctttactctgttgattgtttttttgctgtccagaagctttttagctcaaaatagtcccatttgtctatttttgttttagttgtctgtgcttttgaggtcttagccataaaatctttgcctagaccaatttcctgaagtattttccctctgtttacttctagtagatttatagtttcgagtcttgcctttaagttgttaatccgtcttgcactgattttgtatatggtgagagataagggtcaagtttcattgttctgcatatagatatccaatttttccagcacaatttattgaagagggtgtcttttccctcatgtatgttcttggtgtctttgttgaaaatcagttgcctgtaaatatgtggatttatatctgggttctctattcttttccattggtctatgtgtttgtttttatatcaataccatacagttttgattactataaccttgtaatatattttgaggtcaggcagtgtgatacctccagctttgtttgtttattcgttttgctccggattgctttgtctattcaggtttgtttttggctccataagaattttacggttgcttttgtatttctgtgaaaaatgtcattgttttgataaggattgcactggatctggagattgttttggggagtagggtcacttcaacaatatttattcttcctgtccatgagcatggaatgtctattcgtttctgtcctcttcaatttctttcatcaatgtgttgtagtttttcttacagaggtcttctgtcttcttggttaaatttattcctaagttatttattttttgtagctatttgagattggattgccttcatttctttctcagctagttcattattgttctgtaggaactagtgatttttgtatgttgattttgtatactgcaactttactgagttcatcagaactaatggttttttggtggcatcttatattttctagataaaagcttatgtcatttgtaaagagaaacagtttgacttcctgtctttcagtttggaatccttttatttctttctcttgcctgatttctctggctaggaattctagcactatgttatgttaagtaggagtggtgaaagtgagcatccttgtcttgttccaattattagaggaaaggctttcatcttttccccattcagtatgatgttagctgtgggtttgccatatatgcctttattaagttgaggtatgttcctactatacctagattattgagaatttttatcgtgaagggatgttgaattttatcaaatgctttttctgtgtccattgagatgatcatatggcttttgtttttcactcttgatttgatatatcacatttattgatttgcatatgtacaaccatttttgcatccctgggataaatcccacttgattatggtattttctttagatgtgctgttgaacttaacttgttagtgttttgttaaggatttttgcatctctgttcatcaggatattggcctgtagttttcttttttgttgtattcttgtctggttttggtatcagggtaatgctgacctggtggaataagttagggagcattcccttctcttctattttttttggggggtgggaagagtttgaggaaaattagtgttctttgtacgttttgtagaatttggcagtgacaccatctggtcctggacttttctttgttgggagactttttattactgattcaatctcacaactcattgttagtctgttcaggtttgctatttcttcctgattcaatcttggtagattgtatgtgtccaggaatttattcatttcctctagattttccagtatattattgtatagttgttcataatagtctctgatgatcttttatatttctgtggtatcagttgtaatgtctcatttttaatttctgattttgttcatttgggtcttctctcattttcttggttagtctagctagcagtttatcaattttgtttattttttcataaaactaactttattttgttgattctttgtgggtttttttagtctttattttgtttagttctgttctaatcttcattacttatttcttcctactgattttgttcttgcttttctggttccttgatatacactgttagattgtttatttgagatctttctacttttttgatgtaggcgtttattattttaagctttccttttagtactagttttgttgtatctcataggttttggtgttttgtgtttccaatttcatttgcttctaggattttttttatttcttccttaatttcttcctggtctcagtagtcattgaggagcaggttgtttaatttccatgtatttgtgcagtttctaaagttcctcttgttgctgatttctacttttatttcattgagatctgagaagatacttgatatgatttcgatatttaaaatgtgttgatatttttgtgtcctaacacattatctactctgaagaatgttccatgtgatgatgagaagaatgtgtgttctctagctgttgaatgcaatgttctgtaaatgtctgttaggtccatttggtctaaagttcagtttaaatcctagatttctttgttaattttctgtctagatgatcctactgttgctgagagtgtgatgttgatgtctcctactattattgtatttgagtctgtctctccctttagatctaataatatgttttatatatctgtgtgctccgttgttgggtacaatcatcctcttgctgaattgaaacttttatcatgttatcatcttctttataagcggaaagtttaatctgtttacattcaaggttattattgatatgtaagggcaaattcaagtcatttccttaattgatttctgtattttattttgttttatttatttatttttgagacgaagtctcactctgttgcctaggctggagggcagtgacgctatctcggctcagtgcaacctccgcctcccgggttaaagcagttctcctgcctcagccttccaagtagctgggattacagacgcccgccatctcacctggctgatttttgtatttttagtagagacgagatttcaccatttcggccaggttggtctcaaactcctgacctcaggtgatccacctgcctcaccctcccaaagtgctaggattacaggtgtgagccactatttccggcctccttaactgatttctgattgctttgtatatcctttcttcctttctttttctcttattgttcatcattgtggttttgtagttttctatagtggcaacatttggatccttcctcttccttatttgtgcatttgctctaccagtaggttttatacttttgcatgctttcatgatggtggatatcattcttttgcttgcaggtgtaggactaccataagcttttattgtaggcccagtcttttggtgattagtaccttcaacttttgcttgtgtaggaaagactgtatttctccatcatttatggagggtaactttgctgggaagagtatcttgggctggcagttttttttttttcagctctttgaatatatcattcagttctctcctggccagtaaggtttttgctgagaaatcagctgttattctgacggggggggtggttctcttataagtgactagatgcttatctcttgctgtttttagaatttgttctttgcctctcacttttgacagtttgactctaatgtgccgcagagaaaacctttttgaattgtatctatttggggatttctgaccttcctgtatctgtatgtctaaatctcttactagacttgggaattttttttagctattgttccactaagtaggtttttgatccctttcatttattcttcatcttctgggacactgaaaattcaaatatttgtttgctttatggtgtcccatgtgtgatgtagtcttgttcactttttttttttttttttggagacagagtctcactctgtcaccaggctggagtgcagtggtgcaatcttggctcattgcaacctctgactccctggttcaagcgattctcctgcgtcagcctcctgagtagctgggattacaggcatgcaccaccacacccagctaatttttgtattttattttattttacttttttaagtagagatggggttttaccatgttggccaggatgatctcaatctcctgacctcattatctgcctgcctcagcctcccaaagtgctaggattacagacgtgagacactacgcctggcctgttcattcatttttattctttatttttatctgactaggttatttcaaaagacctgtcttcaagttctaaaattctttcttctgcttaatctagtttattgctgaagctttcaaatgtattttgtattttattcaatgaagtcttccatcccagaatttctgtttggttcttttttacgatatctatctttttgataaatttctcattcatatcctaaattgtttttctaatctctttgtattgtttatatgaattttcttgtatatcactgagattctttaatatcattatcttgaattctttttctggaacttcatgaatgtctttttcattggaatttgttgctggagaattattatgttcatttggaggtgtaatatctctttgttttatgtttattgtttatttacattgatatttgtgcatctggtataacagtcacttattccaacttttttgaatttgcttttataggggaggactttttcctgaagatgtatctgtggtgttggtttgatgtagcattttgcctttgattctggatgaatacagcagtgtagtctctgtatgatttttttcatctgtaagtgtcagtagtgcttgtaatttcctcagtggcttagggtgtggttgttagtggaggtcatggtaaagttttgctggtgatgaggatgctaggtgggccagtcctcaatcactggcaggtgcttgaggtggcagtggcaggctgagcatgcctgtcctttggtcttagggtggtgtatgctggccctgatattagcaggttcagtcaggccagttggacctccaggtggcttgcttgggtgccagcagtggaagaagtgggctgggtggctgggagggtccttaggctcctaggcagtgggcatcgtgctgagggacgcagtagtagtggtgagacaagccttaggctcccaagtggtttgcgctggtgttgcagtggctatgacaggccacgcggggcagtctcaaggcttgcaggtggcatgggtgagtggatggtgtgggtgggtgggtgctagctgtggtgttagcagtaggttgggtgggtttgtcctcaggccctcagaaggagtgctcaggtgtcaatggtggtgaatggggcagggccattcccaagcctctgggtggtggtcttgggctctgggggagtgggatgggttttaacatggttaaatggtcctgttctctggcccctaggtggtacgtgtgggtgctggctgtggtaagtaggataggggtggaccccaggtcccccctacccctggcagaatagctggatgggggtggcagcgactgtgtggtggccctgaggccctgctgctggggagggtggagttaccatggcagcagttgtaaacaggtgactgggggagcttgtgctgtggctccatatggcggctgcaagaggggtgccccatcctcagggtgctcttaaatgcacagaggccttgttgctaggggcagcagggtcgttggcaaaggcttgtgctttggccctggctgcggttggaggatatcaggggagccccggggatgtggagatgcaggggctattgggccccaggccaggatgcagtctggtgggggctgacatttcaaaacagtgccctcctgtaactgcttgtgacacagcaggtgagtggaactcagtgckcgctccctctggaggggtgccgctgcctgatctccgggtggctcccaatgttagcctcagggcctgtgcaggccgcggggttctcccatggctacgattgcaggagtctgtggtggaaatgtgggctgctggggtcgctcacttaactttaccacatgagggagcctggagaaccttaatcacattagagaacctctctagctcccagccgatcctggctgagcagactgccccacttccctcttcttctttgcctcccatgttacctgtcacttatttcttgaattccaatgttctctcttatgtgatctgtttgacctgtgatatctactcactatttcagttcttgtttgtggaggaggcgagtaccaggtgcctctagtcagccatcttgaaactcccctctaacttttccttggatttttgataacttcccaggtgatgatgktgcccatttgtccaaggaacacactttgagaaccactggactagagtttgggagatcaatcagaaatcttttgcatttatctatgtaagataaagtatagaactaaatgctgaaaatagagttaaggaggaggggtggtttccgcaaatacagagcagctgtaattggcaggacttgataccagaccagagtatgcaggtgaaggggaggtaggagtcttgactggtttctagattcctaacattggtaggtggatgaagaatagtggtacctttatctcaatatatagcataaaggagaagaagctggctggtggtgttggggtggaactgatatgtgtgtcattttagacatgtcaaatggagattatggggacaatttaaatagagatgtcttttcacgaagtaggagactgccaagttgaagatgcagacatgtatgtctctacaggagaaattataggttataatgtgatgagaataggttataatgcgacgaaaataagatatagagaacagaactctaggatacgcaaatatttaaggtgaaatcagaataattcatcttcaaaagaactgagaagaaatgttwggagccctggaagagaagttactacaagggtgtgatcaacatgtcaatactatagggaggtcgaatgatagatggattgaaacatgcctattgcattgagaaaccagaagatgatagaaaaccttgataaaagcattttcatcaagcagcatgattcagcccggattgcactgacttgtggttacaaactggttttcaggacagagtatacaccttctgcttctctgatattaaattcctactttttaagctcttaagaggacaatgctatggatagaaatactttgctgtactaataggcccatattctagttttaacctcatytttctaggtggaatttagaaaaatgtttagttaacatttagaatcaaaatgtatatgttgctttttcttttgcaaaakcagcgccttttgggagatatcgtgccttaccaagaggctttcagaaatgatcagggcagggccaggcagcagtggtttatgcctgttatttcaacactttgggaggccgaggtgggtggatcacctgaggtcaggagttcgagaccttcctggccaacatggtgaaactcggtctccactaaaaatacaaaaaaaaaaaaaaaaaatagctgggcatggtggcatgcacctgtaatcccagctactcaggaggctgagtcacgagactcacttgaactcaggaggcggaggctgcagtgagccgagatcgygccactgcactccttcctgggtgacagagtgagactccatctcaaaacaaacaaacaaacaaygacaacaaaaaagatcagrgtggttttcgtggttggtccttctgaaagtgttatgttttattcstcacccccatccgtgctggggcacccagagtgctattattgctattaagaatattgttttactctgtgactttgtgtaacagttgggtatgattattttattactatcctgattgacccaacttaaaccataagggaagacagggtacaaagatgcaatagctgttagagcagctgtcacttctggtaatttgactataaccactttctttccttttcctccagtgtttttctaagcagatttaaaacaaaacactgggagtaaatagaaaatgctgcccctcacacgatcaggcctgggataagtttcataagcagaatttcctggtgatgctgttgtctggaaaacatggtcaaaaaatatctatctgttctgtaacagccttcccacctctgttttaggaacccttcgcatgggatcgtgtgccctgattctttaagacttgctggaaatccagacttgagattgtgctgatgcagcccttttaatttgatgcttgtatccctctgttaattagtaggaaagttctccccaaaatgtgggtcaaatgcagaatgagaggaacttccagtaaaatagtgagctttctatgtgacccaagtgaaagcacttttttaaaaaaawttttcatgacacaaccaaactaatctagcagattctctatgtgtgtacttttattttgcgcttcacttgctgacgtgtttgaagtttcagtgtgtcaaggctccacattgaaagaaaaaagaacacttcaaatctcaggctgcaaatgatcatatgtgtaattgtgattttacagagaccagactaatttcctagaccattagaaattttacttgttgacagatcaggctctcaaaagactggttaaaaaacatgtctttgaggctgatggtgaataatgggggaaaatggtggattttgaagatttatgatataaaacccaaaagctctcttcaaacattaaaaaaaacactgttttgaatactttaggtaatgacgtgagatcttttctctgaatttgttcttcatttaggattttttaaaatgctagtaagcatattggagttcaaattaacattttccccttttactttctttctcgagcaggttgtcaagttattaagcaacaaaagatcacaagcagttggaatactaatgtctagccttcatttagatatgaaagacatacaacatggtaagtgtcaaaatgaaaatttagcttctgaatattaaaatttgggctgarggatatgatgtttgttggtaatgttatttcaaacttagagtttctgtgtaaacygaggttagtatatatcccgtaagtgtgatcaagctatctcccatgattgtttctggaaggattactattaatttgcctgtggtgttatttatataccttactaacagtctaattatcatgtgacattattatcttagttcaggctactataaccaagtaccccagactggtgggtgataaataagagaaatttatttctcacagttctaggaggctgaaagttcgagatcagggtgccagcatattcggttctggtgagggccgtctttcaggttgcagactgcyatcttctccatgtatcctcaattggcagaaagaaggaaagagagctctcttgtgtctgttttataaggggactgatcccacgcacgagaattctacccttgtgacctaatgaccacgcgacctagtgaccaccacctaggatcctgtctccttgtaccttcacatgggagtgaggtttgcaacatatgaacagaaatattttctgtttggaattagagtggttcttaacattttayaaatggctttagtgtcaatattttaatacttggattctactgtacaattgacggccattcttatgccatatcctcctatgatatttatgctgagagatactgcccaaaggtgaatagagtaatgaagtgtaaattcagagtgtcccttaagctgactagaacctaagaatagatttaaagcagattgaattatccaatggaatgccagtttacctattaaagaaatatggtttcaagaataacacagaccttataatcacaaaagcatttaactggctttctagcttacccctttatgaatgtggattctatttgttgggcttaaaatcttgtgtgggataattcataaatagcacaagcttggtatgccctgtcaattgatgagtaactcttaatcacaatttmagtttttattaaattgttttgatggggaggagacttcctcaagctgaaacatttggggtaatagtcatagaagagaaagccaaggctggcgccaggcagtacttggtgtttctaaagctggcagatgtagcccagttaagtcataggatgaaatctgaaaataatgatatggttctttccttcagtcaaatattcaactcgggttgagttgataatgagaaccttatgaacaagagtccgcctgacatctgtgtctgtggtaaagccagtgagagttcattgaaaatttgcttgctttaacatgcaacgctagcaataacatggcatgaaaggcagtagttgaagggtcatacagaatcatgcagaaactttatcccattaggatgtgaagtgattgctttagtccctttgaaaccctgtacacttttttttttttttttttaatatggtggccttccaagtctaaagcagcaagaggttgtgccctcctgcaggtaaagtcctattctgccttggtgtattgtctgcaaacaggatttacatgtgtgaatcgcttgtgtcctctagagcaaacttgacttctctcaggatatgcctccactgagaagtccacagaagcataaacatcattgattttggatatagaagtggccacagaatttatctagacctccagcgtcatttttwaaaaatactttttatttccataggtttttggggaacaggtggtatttggttacatgagtaagttctttagtggtgatctgagattttggtgcacacatcacccaagcagtatacactgaacccaatttgtagtcttttattcctcaccccctcccacccttccaccaagtccccaaagtccattgtatcactttttatgcctttgcatcctcatagcttagctctcacttatgaatgtgagaacatacaatgtttggttttccattcctgagttacttcacttagaataatagtccccagttccatctaggttgctgtgaatgccattaattcgttcctttttatagctgagtattatttcatcatatggaatatgccacaattctttatctactcgttgattgatgggcatttaggctggttccatatttttgcaattgtgaattgtgctgctataaacatgcacgtacaagtatctttttcgtacaatggcttcttttcctctgggtagatatccagtagtgggattgctggatccaatggcagttctacttttagttatttaaggaatctccacactgttttccatagtggttgtactggtttacattcccaccagcagtgtagaaatgttcccgtttcactgcatccatgccaacatctattatttttttatttttttttaatgtggccattcttgcaggagtaaggtggtatcacattgtggttttgatttgcatttccctgatcattagtgatgctgagcattttttcatgtttgttggccatttgtatatcttcttttgagaattgtctatttatatccttagcccactttttgatggaattgtttgttttcttcttgctaatttgtttgtgttccttgtagattctggatattggtcctctgtcagatgtatagattgtgaagactttctcccactctgtgggttgtctgtttactctgctgactattccttttgacacgcggaagctctttagtttaattaagtcccagctatttatctttgttttcgtagcatttgctttgggttcttggtcatgaagtctttgcttaagccaatgtctagaagggttttcccaaagttatcttctagaatttttatagtttcaggtcttargtttaagtccttgacccatcttgaattgatttttgtataatgtgagagatgaggatccagtttcattctcctacagtgtcttgccaattatcccagcascatttgttgaataaagtgtcccttcctcactttatgtttttgtttgctttgtcaaagatcagttggctgtaagtatttcactttatttctgggttgtctgttctgtttcattgttctgtgtgtctatttttataccagtaccatgctgttttggtgactatggccttatagtatagtttgaagtcagataatgtgatgcttccagatctgttctttttgcttagtctttctttggctatgtggcatttttatcgataggcaaaataagacctgtgagtggtccagttaccctctcagtatcacgcagctcattaatgaaatggattgaacttgcactcaggccccttcattaaccagtacttttttttttttcattcagacatgctgcttctccaagattgtgctttttttttttaccaccagcattggtttatctaaaacaaagtatatgtaatattgtaataaacagcaagaatcattttctctccttctttgctgtcagtactctaggttttcatttactttgtaatgtttatatttcaaagtgctccattagagtaattagtgtgtaaggtttggattctaggtatcaaagttctaaccctggtcctgctgagcaccacttgctcagtctgttatttgaatacaggttatttcccacaataatagatgtggagcattctcagcaacacatacattcaaaaggcagagaggagagaagaggtcaggttcctaagtttattaatgcggcaaatataaggrggcatccccaaataattacctgtgtgtgtgttagtatataaaagttataatgaaggcctgagctgctggctatttggtaatgttcaaactggcctacagttataatacctctgaaaaaatctcaccctgtggtttatagtaatttgaagtctgagatgaaagtgccttccagagaagatttaccctttttgtgtgtgtgctagggtctgggggccctgtggatttaggaacaccttgaatcacactctgggggctgtaggagggtcccttcagccagtgctgtttgtccactgaatgggttggttcccctgccagtatagcmcttttttttaattattattatactttaagttctagggtacatgtgcacaaccagtatagtcctttgagtcccatttcattgtggggtatgtctaggatctctatgatgagtgggttctgggctttgatatttggcccctcccaccgtgaaactgtcaagagaaagttgacatttgttaggataggcaaatacactcagggcaaaagcagtttgtgagctggatcacttctctgagttcgctcttcattttgtttagcatggtaattatatcttgtcagctctttgacgtccttatgatattttacaaacatgttttactcagcatttttagttgttgttagtggggggattgatttcaaataattttggcctgttattcccataaattgatattataagagtatcctacagcttcatagtggtagttcacttctgtgaaaattgattaaatattttatacaatgtttggtctgtatttcaggggtcagtgtgctcttcacagatcttaggtccattttyatagataacagtagctgcaaaagaatttgcaattccataagcttcagctttatcccccaacaatgtcacggttagatagaaatactaactgggatgctttaagagtagaaggggatgtcattgataatattgcctggataacaaatgtaaagtgaaaacttttacttttttttttttttttttttgagacagagtctcactctgtcatccaggcatagttcagtggcgcaatctcagctcactacaatctccgcctcccaggttcaagcaattcttatccctcagccccccgagtagctgggattacagccacctgccaccacgcccagctaatttgtgtttttagtagagacagggtttcaccatgttggccaggctagtctcaaactcctgacctcaagtgatccacccgcctcagcctcccaaagtgctgggattacaggcgtgagccacctcacccatccccaagaacttttcagataagctagtagtattgtcaccctactaccagatcgaactgaagcaagtttcagactgaaccctcccccacacacagatatatattacactggtatttcctggccatctcaagcaaaatagtttgaaaaccctgcttcataaacttgaggttgtttacctctctgtctttataggggctctcactgtgatctatctgaaaggtttgcttcagacagatataagcttggcacagatgtaggaatctgctaccctcatagtctgcacgagacatctagaaagtcaactcagccagtggctgcacccagtactgtttaggtcctaggcctcaggcagcctccttaaagaacaaagctattagcccccagtagactcttattctagctatggaagaggtaggagtggagcatctctaagagattgcaactaatccacacatccagaatgactttaatttcaccattgaaagcccatttcagacattagtatgcgtattaaagcctcggttgttgatttagatagagatagctgagcagcttgcgttaactgcctctggagaatggcctttcttgcgtagtgctggtcagccatccctgaggtgtggtctcttagacactccctctgcaaaaatatttgaaaatagattacagatctcatcacaaggaatacctaatatctatttagtagtctgacacrttaaacttacggaaacacgtttcaatatactgcagggatacccagcccagggtatgaatggctctgattccttcctgtcttttatatmtgtcctgtctaaagctaactggaattatgggcccttggcagtaaatgctatgttacctccttgctgaaatttctatcctgtttaaacatgatttatgaaaatcatatatcttaaaatttaatgagataataatgtaaactacctagcattccatcagaagtacagttgatacagtcaataaaattgtagttatttttatgttttaatttctgagcctaatgattgctttcccaaacagtttatttaaattatatagttaagggtaccttacaaggacaatgcacaggctcttagatttcaattagaaatgccagtgagatctcagtgttaattatgacttctcattggaatcatgtcatgttgctgctgttttggtctgccattgtcctccctcaaaagggtccaaagctgagaagccttattctgataattgtttgggaagaaattgtcctaatgtagcaggtaccaaaaagagaaccggtattggcatacaggatacatattcttttttaaatttgtttatttatttttatttttttattatactttaagttctagggtacatgtgcagaatgtgcagatttgctacataggtatatacatgccatggtggtttgttgcacccatcaatctgtcatctacattagctgtttctcctaatactatccctccctttgccccctaccccctgacaggtcttggtgtgtgatgttcccctccttgtatccatatgttctcattgttcaactcccacttatgagtgagaacatgtggtgttcagttgtctgttcctgtgttagtttgctgagaatgatggtttccagtttcacctatatccctgcaaatgacatgaacttattcttttttatggctgcatagtattccatggtgtatatgtgccacgttttctttaacaggttacctrttctaagatcttttataatcatatctttttattagtatttgaagagatggaattagctattggtttgaactttgcttcttccgcctccttccctctgatattattggtgatagttgtgtaaaattgtccagaagaggggagttaattcccactttatagtagggggaattcaggtttatagatgragtctgcctagttctttatctccatagggccagaatgggcatccaatttttttgagtcctagctcagggctctctgctctgggcagtgtgttagcttgttactgaatgaagcatgtgttacctaataaaatcagaatgcgcaacatatgcaaaaataaaactggcaaacaggcatactacttttggctaccagttgtttcatttttacagttgaaaataaatttatcagacttcatttattatgtgtcatayaatacaaattttgcagtttgcatattgactatgaaattttttcacatctgtgaattaaatgaggataaaattcttttaacaaaattattaacagagttccttgctcttgattgaaccaagcaaagaatgaaatacacttatatgccacataacaacattttggtcaacaacagaccatgtatgtgatggtggtcccataacattataatggggttgaaaaattgctatcaccaagctagtttgtagtgtatcacattactttttctaggtttagatatgtttmratacacaaatgcttattattgtaagagagttctcaccagtgactgagtcagctggcaccttgatcttagacttcccagctttcagaattatgagaaaatatatttctgtttaagcaccccagtttgtcatattttgctatggcagcccaagctgtccaagacagatttgaatctcagctctgccactggctggctgaataaacctgggcaaattactttatatctctagtcctcagttttctcattagttcaaaaggctattgagttctgattgtacacacaccygcacccatattaagcacttaatcaatgttagtttccttcgtgtgtttcttaggaaatgacctatgtctgtaggctttggaggtgtttgaaacttagggcaaccagtaagagagataacttaaaggggtttgtttttttttttttttccttttttcrttgccctgaacagactctgtgataagtctttgtccatgggacaaaaggagggtgtagaatccaraatctgttacttcctttttttttttttttaataaatcaactattatttttgattcaggggtacatgtgtaggtttgttatctgggtatattgcatgatgctaaggttttgggtttgattgatcctctcacccaggtactaagaagagtactcaatagttagtttttcaatctttgtcccyttctcccccatctaggagtccccagtgtctattgttgccatctttatgtccatgtgtacccaatgtttagctcccagttataagttagagctagtggtgaaggtttttgggggggtccagtttcattcttctacaaatgggtagccacctagcaccatttattaaatagggagtcctttccccattgcttatttttattgaagattggatgacggtagatgtgtggctttayttttatttttggattctctattcttttccataggtcttttccatgtggtgtttgcttttctgttcctgccttaattcacttacatagcctccagctgcatccatgttactgcaaaggacatgattttgtttgttttttggctgwgtaatgttccgtggtatatatgtaccatgttttccttatccaggccaccattgatgcacacctaggttgattctaaatctttgctattgtgtatagtgctgtgatgaacatatgagtgcatgtgtctttttggtagaacaatttattattacagagaccaaaacagcatggtactggtacaaaaagacacatagacctatggagaagaatagagaatccaaaaataaagccacacatctacagtcatccaatcttcaataaaatcaataaaaataagcaatggggaaaggactccctatttaataaatggtgctagatggccaaccatttgtagaagaatgaaactggacccccaaaaaaccttcatcacatataaaaattaactcaagatggattaaagagttaaatgtaagacctcaaactgtaagagtcrtasaagaaaacctaggaaataccattcgggatattggctttggcaaataatttatgactaagtcctcaaaagtaattgcagcaggaacaaaaattgacaagtggaacctaattaaactaaagagcttctgcacagcacgagaaactctccacagagtaaacggacaacctacaggatgggagaaaatatttgcaaactatacattccacaaaggtcttttatccagcacctactaatacaagaaacttaaacaattcaacaagcaaaaaataaatagcctcatgaaaaaaatggtcaaaagatgaagccataaaaaaaaatgagatcatgtcctttgcagggacatgaatggagctggaggccattatccttagcaaactaacacaggaaaagaaaaccaaataccgcatgttctcacttaaaagtgggagcttaatgacgagaacacgtggacacatagaggagaacaaaacacactggggtctttcagagagtggagggtgagaggagggagaggatcgggaaaaataactaatgggtactaggcttaatacctgggtgatgaaataatctgcacaacaaaccctcatgacacaagtttacctatgtagcaaacctgcacttgtacccctgaacttaaaaaaaaaaagagacctgcaactttaattaaaacaacatataacaaaatgaattttgctataggctaattgatataaacaagagttaagttcatatggcatatttctggtcacttttaaataaagaccccaaacacttataatattaaacactgaagtaaatgtgagctatacatacatttaataaagactaatttttaaagatgggtaaaaggtgtgaacacacacttctcaaaagaagacatacaagtggccaacaaacatacgaaaaaatgttctacaccactaatcatcagagaaatgcaaatccaaatcattatgagataccattttacaccagtcagagcaacagatactagcgaggctgtgagaagagggaacacttatatactgttggcaggggtataaattagttcagccactgtggagaacagtgtggggatttctgaaaaaaacgtaaaacacaactctcattagacccagtgatctcattactgrgtatatatctaaaaggaactgttacttctgattgagttgggagtgagataagagggaagaaatgggagttaagttcaaggggaacatgtctgaggcagatttgattgttttgtagtttggcttttatttttccgtcagttttcagtaaactagctgaaatgctttttaatactgggctgtacccatttctgatttttgagtacagataagtatgagaattatctaacagctcttagaagttgmgcatgactacatgtttggactgttttatctgcaaggaggacaacttgttttggaaacttgaaaggctaaaatctcccctaactgtgtggcttcttaaacattgtctctgtgctgtgagagtcagccatattctatattaattactgttggctctgtaaagcatgtgaaggtagtgggggaagaagtttagctttgttggggaaatgaatattggtgtgggccatgagtagaatctaagtagagacatagacagatgcttttatttcttgctttgacattttatttttcctgatagttaaactagtttctagctatgaatataaagtataagaacactttcatctttttttgctgatggccattctaacaggtgtgagatagtatctcattttggttttaatttacatttctctgattagtgatgtagagcattttttcatttatcagttggccatttgtatgtcttcttctgagaaatgtctgttcagatcctttgcccattttcaatagggttatttgcctttctgttattgagtagtttgttatatatttagacatataaatatattagatattagcccctattcagtgcatgatttgcaaatattttctcccaatttgtggttgtctctgcactctattgttttgtttgtgtgcagaagcattttgatttgatgccatcccatttgtctattttctactttcattgcctgtgcttttgggtcatatccgagaaataattgccctgaccaatgtcatggaacctttcctaacccctgtgttttcttcgagtagttttatagttttaagtctttaattccttttgagtttattcttttatgaaggatgaaataaggatctattttcatttttgtgtatatatagatgtacagttttaataacaccttttattaaataggctgtcctttccccattctgtgttcttgacacctttgttgcaaatcaattgactgtagttagctgggtttatttctggacactccattctattccactggacgatgtgtctatttttatgccaccaccatactgttttgattactatagctttgtaatatattttcaaatctggttgtgtgatttctctggttttgtcctttttgatcaagattactttggctatttggttttttttgtggtttcaaataaattttaggattattttttctatttctgtgaagaatgacaytggaattttgattgggattacattgaatctgtagattgctttaggtagtatggccattttaacaatattgagtcttccaatccataaacacagcatatctttccatttatttatgtcgtcttcaatttttttcatcaatgttttattgttttcagtgtacagatttttcatttccttggttaaattttctcctaagtattttttgatgctattataaatggaactgttttcttttttctttttcagactgttgttagtgtatagaaatgcttctgatttttataggtcgacttttgtatcctgcaacttaattgaatttatcagttctaacagttttttgatagagtctgtaggattttctatatacaagattatgtcatcagcaagcagaggcaatttcatttcatccttttctatctgaatgccttttatttatttttcttgcctaattgctctggctaggatgtccagtactatgttgaacagatgtggtgagagtaggcgtccttgtcttgtttctgatcttagaagaaaagctttcaacttttcaccattgagtatcctgttagctcttggcttatcatatatggcctttatcatattaagaaacattctgtctatacccaatttgttgggagtttttatcatgaaacgagtttgccaaggatgtggggaaaagagaactcttccatactgttggtggaatgtaagttaatatagccattgtggaaaacagtgtgaagatttctcaaaaaataacaatagaatttccacatcatccagcaatttcactactgggtatatacccaaagggaatgacttcagtatgtctaagagatgtctatacttctatgttcattgcagcattattaccaataatcacacctcggataaacctcattggcttcagtagtactgcaacagcacctcattggctttgataactgccacagcacaaagctaattgtattattattcacaagagccatgaaatggaaacaacctaagtgtccatcaacagatgattgcattaaaatatataatatatatatacacaatgaaatacaattaaaaaactaggtaattctgtcatttgtaacaacatggacaaacctagaagacattatgttaagtgaaataagccagggacagagagacaaaatctctacgatcacatttatatgtggaatctaaaaaagtcaaagtaatagaggtagaaagtagagtggtggttactagaggctgaggggacaggatggatggggaaaggggagacttggtcagtgggtacaaagtctcatttagataggaggaataagtcctgctggtctattgcacagcatggtgactatggttaataataatgtattgtatatttcaaaatagctaaacaagagggtttaaaatatttgagatgatggatatgttaaataaataattaaagcacaagaacacttctttaaaaatctgcaaataaccctttgacccccctaggaactttccacgatggtttttttttttttttttttgtgactctgtttgcatgtatttggatagcctacacatttgcacttcttttatcctgttggggttgccactgaatcatggttttcttatgaaatttcctatggaacaagttgtacattacaaactccaggtccttttcatagagtctggcttcattcttggagacacaggctttttcgcttccctattaattaccataagaaagttcattcatcatcatttgtttatttttgtaatagtctcaaaaattaggctcagtgtgagcaatgttgtttttccccactaggcttttcagtgtctgatttttttttttttttaatgaaactcaagcttataaggcttgcttagaaattgcttcatgcccccatttttttaaacctttttttttaaagtgttttcctcacatgggatatagaattttaagacctgtttattatatttattgagacattaaaaatgtactaaatgctgttgggaggtttagtgaatggttttcattgaaatgtaaagtcattgagaattagaaatttgagaagaaagtaggctccagtgagcctgtgtaaccttttcatcaattgtagccttgtagtggagaaaagtacatgtgagatactaggctttcataaaaacctactctcagaaatttaatatgagaatttgttttaatttaaaatataagttcattacctagagctttttataaaaagaaatacctcatatgtcttttgaaatcacacataaattattagatcaaggtcaaatgaattataatgtcttttactacaagttcagcaaaaaacttgggttgagcttagattatatttttaatgacattgttccatagttggactttttgattatacttctatgggaagaaagaatgcaatacttggggttgtaccaaagccatgagctttgcatatggttattcttttccctcattgtacttactgtctgaattgagaatcatgtatttgtttatttgtttgtttgttttggccaacctcttgaccctcactaggagggtgactctgtgagcctgaagacagcccactgcagctcaaggccttcctccccataatgttgcatctgttctttaagatcagtgggtgactgcgaatggaattgtccaggaccacatggagcatgcatggaggtagagcccaagtttgaccacagagcacttagtgtgagcccataattaatcacatcaactttgacccttgaactactttgtgtaaaaggtgtggtttttgcaaaaagattcctttggcataatccttgagaggggtcggattggcactgttattttggggcaaggggaagcccctttcataagtagagttatgtttgtatttcaaaattggctgattgaaagttctttgtgttttgacaagcacttctccagcatccctaagtggatactctcaggatgctccctggccacctttatccagttggatgaagtgaggattctgagagttctggagaagatgcaataattgacacttttcacctttcccttatggagccgcatgtgtcctattcttgtgaggtatattctacaaatataatcatagtccttcctctcagctcagtgtgccgagacatcagctaaaacatcaaagtcatgtgatgacatgttatcttttggcatggctgaagcaatgacatttcgtgctgttgactatcttgcatcttctttcacggtcaaacatgaatacagcgagatctttattttctcagccaaatacctctgactacatttttacattaaacaatttaaatcagataattatatgcacgtgattaagaaaataagttgtatagaaaggcctataatggaaaaagcacagtttccaaatctccgtaagaactttgtcacttctccgatagattataaaggaaagaattgttcccttgctttagccactagagcataatagcaggctcatttgaggaaatggtggaacttaagaggagggttctctatcattgtcaaaaacagcatgaaattcttatgaattaagttgtaaagagaatttctgaattgaggaagacattgaaatagattgtctgcaagattccgattaatgctatttttatggttccaaatttaagatagacaatwgctgatcataatagggaacacttacagacattactatgcaaagacttgcaacaactgtatgaggcaggtgtttttatctccatcttcaggatgaaagaactgaggcatagagtagtaaaagaaacttaattagcaggtggtggggctatgatctaaacacaggcattctgggtccaggtccatgctctgaacctctgctgtacttgctgagaactctcaatgttacttattctatcagtggcttaagctggaaaaacagtgcatgatttgtttttttcctgtgtggttcttagctatagagctagtctactggttagaggctatggttgctgtgtgcagtgctttagtgttgtactgtctcgctagagtacacattcatgttctgtgtatgggagtggcatgaggggaaaggcagagggggcagagacacacacacagggaggaaaaagatgtgatggataacttgagaatttgctttattccttctattattaccacttgctgtatcttctctctgtgattcaggtgactctgaatcaggtgagttctgtgattcaggtgactctcaggtgttgggggatctctctatgccaacttctgtgccaagtagagagataaagagaatgcatggaaagactatgattgccttagtgaagtactttcatatgaatgttagggtgtatgagagtgactgattttattgttgtacttactagtccctgttgtttccacaaagaaagatgccagcattgacattaacatcagggaggccataattcgttcactcctactgctttctttccttccttgatttcttccaatgcttcagcattcactcaacattaactgtttgcctactctckgccaagctccactcctggcagtgggatacagaaataaagacagagagacaaaaatccatgtctgtgttcccatagaagaaaaacaattttaatatgtaccatgggggaaacgaaaaaaaaaaaaaaagagagagtggaaataaggagcacatcatgagaggagagggaggagtcagggaaagcccaattggaaggtgatagctgaaggccatgacagaaggaaccttgtaaatatctgaggaaagagcatgtgagggaaaacaaccaggcaactgcaaggatcctggggtgactgaaggatcagcacgatgtgagagtgcctggagagagcactcagsggggagagaattggagacgtgatttggataaacaatggggtctgcgggggagggagatcatgtagggctttgctgactttttaagaagtttggcttttactctaagaaagaggaaatactaacagagggtttaggtagaggaacgattggtctgatttgtcttccaagggatgctctgctgagtgcagaatatcaagaagaagggaggtaggcaagaagagcagtgaggagactatcacagcaacagatgtgagatgctggcggccaggaccagagtgggagcagtggagacgtgtgagatatcagattcctaatatgtttcgagggaggaggcaacaggttttggtgatgtagactgtgagaaaaagataggactctaggattattggcctaagttaatgaaaggttgtcattgcatttactgagatagggaaaactgcagaaagagcaggtttgggagcggaagatcagcaattccaggtcagactttgtttgcttgagagagaatggaaagacagtgatttggagactacaggtgtagactttttgctgagacaaagtgcatgaacctggtggtatacctatagctggtaggggaaattggggtcaagaaagggtgttcttttttttaagtttttttttttttttgtcttttattatactttaagttctgggatacatgtgcagaacgtgcaggtttgttacataggtatacacgtgccatggtgttttgctgcatgcatcaacccgtcacctacattaggtatttctcctaatgctatccctcccctagccccccaaccccaaacaggccccagtgtgtgatgttcccctctctgtgtccatgtgttctcattgttcagctcccacttataagtgagaacatgtggtgcttggttttctgttcctgtggtagtttgctgagaatgatggtttccagcttcatccatgtccctgcaaaggacatgaactcatccttttttatggctgcatagtattccatggtgtatatgtgccacattttttttttatctagtctatcattgatgggcatttgggttggttccaagtctttgctattgtgaacagtgctgcaataaacatacctgtgcatgtgtgtttatagtagaatgatttataatcttttgggtatatacccagtaatgggattgctgggtcaaatggtatttctsgttctgggtccttgagaaattgccacactgtcctccacaatggttgaactaatttacactctcaccaacagtgtaaaagcattccttttctccacatcctctccagcatctgttgtttcctgactttttaatgctcgccattctaactggtgtgagatagtgtctcactgtggttttgatttgcatttctccaatgaccagtaatgatgagcttttttccctatgtctgttggctgcatacatgtcttcttttgagaagtgtctgttcatrtcctttgcccactttttgatgggaaagggtattcttaagtagaaagtatagcctgtttgttatccatgcaaatgacctctaaggaatggaagaatccagcgtataagagggatcaaaccaaatatggtggctcacacctataatctcagcacttagggaggctaaggccaaaggattgcttgagaagtttgagactagcctgggcaatccctatcatttctgcaagggaagtatagtatgaatgctgggcagcagtgaagggcccacctgaggttagtggccatgattttaagggtggtttgcatttctctctgcaatgttcagctgttcaggacacaggcattagaataggtgaagaggtggttttaacaagggttgaggtcttgtcatttgcatatgatattttattatagaggaattaaagggtgtatatgaccckggaaggcatgaataatggtgcgtggttaagaatgtgtgttaggatgtaagggaagagtgtgagggayaatataatttgaggagaagcttcatgtgtcctggtgaaactgatgagaacactttgaccctaccttgggggttaagtagaggataacaatgcacttgagatgagtcaatcatctgaaataatcatgtgaacacttagttgcaccaaagcaaaaggaaaatgcacaattcatattgttagtggaagatgcagttatctattggggtgtgtgtcagtgttttccatccttttccaaatgacaccccatttgccaccatgaccctcatggtgcagactacacaggctgctcaattttccacaatcatgtaagtttgtaaaatatcctcaagattatatactgcttgaatctactatgttgcatgtagagtatttctagatgggtaagaatcagatcaagtggcaaggacgaagagagatgtattctatattgagcatattttctatttttcraggctctgcctggaaaggggacagaatgctcagtgttgcctcattttctcatcaaacttgacactagttcactggggaaattgcatttccaagttgttttaaatcargaagttgttttaaaatcargctgtgtgtttgtgtttgcactgttgccacttaatccttgatcctgttaaatgtttcttccatacagaggaacataaacaatagcggctttcttgatttcctaacattcatgtaaagataagttggaaatattatatttaataaacgtaaaatactgtaattaaatgtaaacagaaaattcaattaccattttggtggattgttggataataacattgaatatttgtcacagtagccatttggaagagaatacagattgagttattgatgggatccaagttgacattaattatttcattagaaaaatatatttcttctaattcttagaattttttattttaaaatctggtatgatcaatccgtttaagaccagcaggtctaaactctcccggactctaggactgccatgtttgaatacagttatattgaacctttctgccttttctttttttttttttcaaataaatggagggagaaggatgtgttttatgaagattatgccttacccaactttaagtacctgcatcttcttctttttttttttttttttttttttttgagacagagttgcactctgtcgcccaggctggagtgcagtggcacaatcttggcttgctgcaacctctgcctcccaggttcaagtgattctcttgcctcagcctcccaagtaactgggattacaggcacctgccaccatgcccggctaatttttttgtatttttagtagagacgaggtttcaccatgttggccagcctggttttgaactcccgacctcaagtsatccgcccgtcttggcctcccaaagtgctaggattacaggtgtgagccacagcgcctggcccgtacctrcatcttctaacattgccttatttaccagagtgaaggcttttgaaatatttagatgtctggtaaacaataaacttaaaaatattgagttcgttaaaaatggaactcaaatgtttatttaaattctaagaggctttactgttttttgaaatatttgaaatgtttagaatagttaccaacatgcatactttacacttttgagatgaattatttctaattcaaatgtacttatcagtggtccaatgaaccccgattcctattacactgtgcatatattaatgcttcttgctaagtgcccacttttaaaagtttatttcataactatataaacaggcatttggggctcctggcctcactgctgcagagtgtctggaatgagcatttgtagggtcagttgtcattatcttggtcacgatctttggagtgctgtattcccatcacctgctgcacatagcacaaggtctgggtgtcacaaagacatgacgtgactcttctagcatctgtgatactcttgagtagtaatttcagaatacttagtgaaaggctcgaagtgttgaaatacgatgaagtctggggagttaacttttagcctcgactttaactcatttattctgtgccaaagaggaatttgggggagaggytgagttttcctttgtggtagcctggcaggtgaggacaaatccacttactctcctctttcctcagctagaagagacgaggaatggaaggagatttgatattccttaggaattttattaataggaaattgcttcttctttaacaatgaggatcataacttcagctgagattaacttttaagggctttattaaactgttttagccactagcaacgatttcccttacacagatacatttagattgactttgcacatcttgaaaataagaaacaaatgaaaataccagagtatctttatatgtataagttgtgaaatttgaagtctgcattacttcttattggttcagttttcatgggattatttatgtataggagcagccaaggaaaagaccatagcagatttttgtaatgatggaatgagattcctggcctgtcaagccagtaggtgtgggactatggagaaagttcctaaattttagtccagttatttgaatggaatcttgaagagacatttaytattcatagagcaacctgagctcgaactgtaattttgttctagttgggcagtgggggaagagaagagacttgaaactagtgttatatgatggacacgtcagtgctgaaaattcacggtgcctgaggtaggttaaaccttcctccaaccaatggtttccatgcaagctttttaacacagtgatgcctatcctatatttttactatttgcacatattacgagcgattgaaggatgttaggaagctctgacaataaaaatggttttctttaatgaaaaaaaaattctgataccgtgagaagaggacagatacatcttgctcaattaaatcaaaatgtgtgggacacctcatttctgcagttgcagaaatgctgaaagtcactggatacttaaagcaatgaaggaggaagaggttggggttgggaaaagcaaaactgataatctcctttgtgaagacatcactgtaagaagcaggtggtacttactgaactctggagagaatggaaagtgtgaggacagcacagtaaayagaaggaaaattcccttagcagtccactttccaggcaccagtcacctctggaactttaattagaactcaaaaatgtgagtggaggaattagaacagaggcctttctatcttatatttgaaaagtatttattttacttagaagcaactttttattaattaaaagcacatcagataaatcctaatatttgaaacacctccccatatttaactaattcctcattcttctagacaaggaaacattaaagtaatttttacacatcaacatatacttcagaagagaaaaaagaaaccttcattaactgaacaaataacaaaatatgactcaacatacacaaaaaccagtgtatcatatttttgcatatattaactacatgttgatgtaaataggaacaaaattattccaaagggagggtgataaatatgtgggttttagatttttcatgtttttaaacatattggaaatgtaatgaaatacaagttgattaaggtgatctctgtagtacagtggaaggtattaccctaacatgtctaattttggtatgtgagctctgatcttctcagtcatatgttacaaattcacaactgagttttctttttttwatgaatttttaatttttagtgaccaaacttcttagttcttccccctacctcagcatgtctgccaatatataaatgtttacatatactaaagaagttgaatatttaaatgaagttttaggtgaactattttaaaaaggaaaattttttcccttaaaattgtgattataatcattgtgtttataattcaagcttttctgttttaggtttctttcagtgagacatgtttgtgtagcactacactgaaaaaagatgattcttattggtatgaaagttattttggcataagacattttagatttctgatagattctggacttatggagcaatatatatgcttacattcaaaataaagtttatcactgtgccccttttagagcatgtgttagaaaacagtggcaaaatgtgatcccagagttagggttctatttccaggggaactcactaagccctcttttacaagagcataaatgtttacctaagcaagaaggtgaaatctgttatgcccaataaaggacattttgcagtgctggtttacggaaaacattcaacagacagtggatgttttacataaagtacagtgcgttgtttgaaactctttgctcatctatacactatgcttaaaataaacactatctgggaatatacccgtcttttttctacctcccttattccacaccctagattttgtcacctgccaaagtcaaataaatcttatctaaacagttgagataagcgccgagtcgtacccagtgtggtcaaatcaacaaacctctccaaaaacagaaatgaaatacaatatcgctagattaaacagtctacaatggtaatcatgtttgcatttaaagattttattccaaaaggatcacagtcttggtatccatttttttycctcctgcctagacaagacggcgacatactgactcaaacaaaatgcatttgttctctaacaatttaacttgtacagctcttataaacaaggcccataggtgtatgaagcctaccgacttaatcagtaacttatgtcgttaaccttgtataagcaagtatgcttgagatgtaccagtgttggattgtgtatgggatttagttttttcttgcaggaaagcctttctttatgtagcctgagtgcaaagtctatggcattctgggattttattgtctgtatcttacagtaaagctccatcatgctaaactgttcaaaaagagaagatagtacaaattaaagtgatttctaaattataggatattataaaaaatgcagttttcttccttcctaggacatatggtattttaactgtttgataacaaggtgtaaactctactagggcaggaaccgtgtctgtctggtttatgctgtatcctcagggcggacaagagtacctagctcagaattagaattctgaatatttgttcaatgaatcaatgatgttttccagaagatattctgtcttctctgtggatgaataaaaatattttgtaattattacattaatttctgatatttaaaagcatgtctctcgagagtacatttttgtcttacagtttttaataaatggtctcctttcaatgtcgtaccatttaattagcaaaatttaaaatacgcaataaaggaaggacaaatgacacaatatcactcattttttggtaatatctctaaggtactgtatttgtgcatttcttactgtagagcaatttatacactgactgctggtttgaaaataacccatttttccattattctttaagcagatcttcatttactttggttcatgaaattgggaattagcccagttgtatatagatgcgtgatttgaatatactgtccttttatttttaaggtccaaacaataatacgaaacttatagtcttattttctaatttatattttgctttatgagagcaaatatatctacaaaggtatatgtgctatttagacattgaccgaaaactgaagaacctttcattttagagtgcctgctataacaaggactgttttccacacaatagaggagttacctctaatctttataatatccatttaaggggataataacattaccactgatatgtctatttcccatgtgaataaaccaaagctcatagagcttaccaagtctctccaagagaygcacagctggttagtcacagagmcctgtttttagttcaggtctatctaaatccaaaacacaaggtctaagtctcatgtaattctggagaaaaccacaacttttgagttattatattggtgagttaagacttctcagtaaacatgttactgtttaaactagagctttkaatcagaagagagtaataaaatttagaagtcttacaaatacaaggaatagaacgccactatttaaatttgggatcaaaagaagaatgctgttggtatatgtgccatttaactggcctttatcatggtctttagataatccagaattacttgaaatattactcacgagcgtgtgtgcagggtttcaggtgtatgttaagaatgcctggcagcacgtcttctggcaagatgcccacgtttgtgtgcatactcaaaggccccaggtttccaggtgcccaagcatcttagtggtgagatgcagaaagaatgcaagtagtatttcctttcatcttatcatcgagtgtaaaatgttccgatgaatatggtagcaagtgtcttccttcctktgaaatatgagttttcatcagctgttggatatgctcacgtaactaagccaagcaaaatccaacacaaatttaaaagttgcttggctacctctttagaaaatttttgttatgtaatatacattttggaagtttttaatgtaactgcccaggtgtgcagattttcagctggagattgatgcatcagcattctattccttagaaaacaatgctgggtgtgactcttgactcctttcacatccagttgcacagtgacatgcacctcccgaaggtttctatgctttattgagtttcaaataaagattgagggatgatagttctaggcatttctgccaagctgtgtttttcttttttttcttcttccttcttacatcttctcakcagattaattaraacagtaattgaaataaataaaaattaaggcagccctgaaaataaaaatgagccttttgtatccaccacagattatagatgcagaggaggaaaaggaggcttcttcccctagtaatgtctgtctgttgctcttttctttgcagttcytctcctcattactatttagaggctcatgcttgtattaccatttgcagcagggatttttgcctatgccagtatttatttggctttcactttctcaggcatttcggcctttgtgcatttctggagccaataaggcaaatgtgtgagtggtggcatcctttcttaaggttacctattatgacttttccctggaggttcagcaatgacttttgtttttcacattacacacttcttcagttgtctgctatatgcaggacactctggcatgatacaataatgtctaagacaagatccctgctattaggctcttaaaaatcttcttggagcgaccaaccacatacttttatacaatagagggagtagctggagtgtatcagatggcttttattaatgttaaagggtggaatccaaaggtagggaaagtcatgagccttggtatttatggagtgttttggagattacttagactggagcttgaaattgctattttgttagaaacagcagttcgtccacatttagagccatactttccagtttccctttccttccaggtgaccataggaaactgatccggtcagtgagatgtaagtagaagtctcctaaaaatttatgatccatcggcattgtgcatttcttcttgttgctttcctctttcctccttcgtctggcctggaatgtgaaagtgatggctggtacagtagcagcaattgttccaagtgaggaaaaggaaaaggcatgtgaagaccacttaaaaattttgggccctaacatattttatcccctgaatcaatggcaacctaccttagctttgttcaagtcwctatctactcagatattcttttacttactgctgaaaacaattttttaactgattcaaatgtatttagcactttggccatattgtcatgtgggtaattgtcaggatttcattcatatttcaaataatcttcatcactatattctaactagatgcccatatcactccctaatatgagccaatcttttaagctgggggggaggattgagttagaaacaaacagtcaggaatgactgacattttccccctcatctagaccctgtgttttcattttacttcctaataaactcaaagatattggaattcagtttttatttctctttaatyccactagaatacagatgatagcttctataaaagcactttcccttccccagctgtccactcttggaattctttgtccatctacacaacttttcctcaactttatattgttttgtcttttaacacctaaagacaaacacaaacttagctaggtaagaagagggaaatatttctactattagatgaaggattataaaagaaaggcagagaaactttctaagttgtaatctgtcttctagcttcagagtccctsaaatttttaaggaccttttctgggtccttaaaaacgtaaaaactaataggcaatgtagtgagtaagttctgtgaacagaaggatcaccagggacacagcttctggctgggctagagtgtgaaccaagtgctttatatctggcaggcatatggtcagagggagtacgtgattctatggtttttgttaatcttaactcgctgggatctactctcaggaactggtcaaccttttctttcctgttatttggatgttggccttcctaaatttgtctaaatttcttggctttttcctcttcgtttcctttttgatctacttttgggaaattctcacatgtatttcccaaatcttctattgggtttttctgttaccctgttttttgtttgaagaaacattttgttcaattaggagggtgttgcaagaattgcaggcaataatcgggaatgtctgagaatggggtggtaggggtgggtgtggtgaggtgaagtcatattctggatgtgtttggaatgtgaagccaacacgattcatgatgtgttggatgtggaaggtgaggggaagggaggaattaaggacagttcctctgaacaccaagcagatggaggctccgtcatgtaagacagaagaacatgtatagagtgtgctgtctgttagacacccaagtggtgatgctgagaaggctgttggttctataagtgaggagttcaggaaggaggtcggaagctggagatgaaagtgctggagtatttcaagcccaccgtgagactgggcgagaccaccaaggcggtgagtgtagatagaggtaagaaagggtggcagtagtgagccctaggacattccaaaaatgagaggttagggagagaaagagccagcaggggagactgaggaatggggaacattagaagtaggaggaagaggaagagagagtggtatcctggaagctaggataaatgtttagcacgtgtatcggaaggaatttataactgtgtcacatgctgccaagggttgagaaatgtgcatttggatttcacaagatctaaaacactggtgactcagtaatcagagcaaagacttgatgagtgggtttaggaagtgatgggcagagaagaaggtggggacaacaagtattgacgacactttgtaggagttggaagagttttactgctttatttttttttcctttttttcccccgctctggtttctaacatcccttgtagaggcttcccatagatgatttgatccttggctgtctgttcttgcttaagtctaaaaggtgatgagaagccctgagtcttcatgttgggctcttggactttgagttcagtgtagcattttcggtgtgkgttttttgtcgggtattcacccatgtctttatcttttggtcttttttcctgggatggagagatttcctggagacttcccatttctggcttggggtgtaaaggcctgtctggcagtgttctggaccctaaattgggggaggagggctgaatggaggtatggaggcttttgtattcaacatgcagtactccacatggtccctgtgtattcagcatagcaacctatcctacaattgtgattgctgtgtctttgtccagagacttagatttaatttctcaagaaaatcaacctgatgaagttgggaaggactttttcagaatgagcatgtaactgactgactggcagcattcatccagtgctccttgtttctgatattccttgctttaccctcagttrgacaagtgcctgttgccagttccttggccttcagggttggtgctcagttttctcagtgaaagttatggttttatcattttaaggtctacgaaactgagtagagctggcttccacattttgttgctgtcatctcatcttctttcttccagtccttatgggtttacttttttaaatatgtttttactatagctttagtgaaacttcaggagagaacaaaatcaaatgtgtgtacttcctgtgccatcttaatcagagatgcttcccagcagtacgtattaatacatatcacagtgcaaatggaatgaagcaatctgaatgttaggtgatgctattaagatttagaccatctatttagtagtcgttcactttcaaactctgtcacwttgaggatcttttacacctgacaacgcagttctttctgctgtttgcacaagctctaccttgtgcttttattgtggtgtaattgttgtgtagttatttgtcgatgtgtctttctacttcactatactgtcagctcttctagatgggggagtgtgtataactccagattcccaaaatgttttgtaggacatttacaaaagagataacaaatactgtcagatacatttcaattacgcatccccaaaatgtaaaagtttctatttcactgaaatatacagtgaaacaaaaattaactgcttacatgtcctcgtcgtcctgattttaaagtcgaaatgacatgctccctgcagttcctcagagagatctcttacaaaatgtagtttcctggtagctagagtaagatgacaaacctgactcttaaatgagaggatgcttctgatctctgctacataagatgagtgtctgctcaaacaaaggtctttgcttctcagcagcttgcaaagctaacttcatcaaagcttttcctgtggcttctgtattttaaatggggtaaagatgctttcttcaagcccttatactctgccagtgaaaagagggcatgaaccgtaaatatgggctgatttgtactcattttgtgtttaagcttctgctgactctacttctctttccatgtactttaacccaaattagtgttaatggcttccctctggttacttgtttagtcttctatgttactatcagtacaactgaaactgtcatttttctttttgctgagaatgttttcaacctggttcatctgaaacctctcaatctaagatactgatttggagagagattaaaaaaaacattttccattataggaatgtgaaatgggccgtaataataatcacaacaaccaacattttctgagtgtttgctttgtgcgtggcactgcatttgacttttattatttaatctcctgcaagaactctgtagggcaggtcctcttcttattaggtccattctgcagatgaggaacttgagactctctgggttatgcagataataagttgtgtggtcactgtgccccactgccttccagtgccatcaggtggcaatgtgacatgacatattatctttgtgttctgtatttttgagctatgatgtcagctagagtgaagttagttatttatgaaaggacaatcagagtgatctcaaagaaaggtcagtttatccagtaaaattaaaggcagagttgrttttcaggaattgctaacctcagcctgttttagcctttcarcattcgagaaagatgtttttccaagtcttttgtgtactgggttcttctagatagagaaaggatacaacagtgaatgaagcatgaccatgtaattatggagggaagggtctgtccatattgtctcacacgtctctgtatatctacagaacgtatctcatatgatctctatttatagaaatgatgagstttagctgatttgataggttatgcctaaaccagaagccagccttcctgactagtgcactttttctttccactgaatcatgatgcttctccatgtcttttgtcaacctagagcctaataggagaataaaaacattcgaattaatgaaattaacacaaggtagagacccatagagcaacacaagttggaagctgaagtccaaggaacagagagccatgggttagcaatgtgttgtgatgggcagcccctcagatggtccctggagatccccaccttctgagactcacggccctgtgatattccctagcccttatatgtgggctacactcacgactcacactgaatagaatagaacagaacaggggtgatgggatgtcacttccaaaataaggttacaaagagaaggaggccctgtctcgtatgccctttctgtctcactctaagggaagccaactaccttgagagttgtctatgaagaagcccatctggcaagaaactgagtcagacttccagccaaccagtagtgagatgctgaggccctcagcctgaggaactgaatcctgccaacagcctgtgagtaaggctggaaacagatcttcctgcagagccttcagatgagaccgtagcccccgccaacactgtgattgcagtcttatgggagaccttgaggcaaaggcccctagctgagctgcacctggatttgtgacccacagaamgtgtgagataatccatgtgtgctctgtaagcccctaagctttggtgtaacttgccctgcagaaatgaataacacacttggtaataaacactgtgagattttctagtttggggcatctttaccaccagtttagcaggtcacacaggaaagattaaagtaggtgactgcagtggctgggataagtgttcatggcttatgaaaggaaggggccatcargcacagccctgagagactgctccagtcctgtctcatccaacagatccctgattttaaaaaatatcaatgtaaggcatgtactaacactgttccatagcttaaaatgttgcattcaacaagagtaatcctatcatattgaattatacaaataggttgggcaccgtggctcatgcctgcaatctcagcactttggaagcctgaggtgggaggatcacttgaggccaggagttcaagaccggcctgggcaacatagcaagacctttttctctacaaaaaaattaaaaaaatagaaatattatctgggcatggtggcatgtacctgytgtcccmgccacatggagaggctgagatgagaagattgcttgaacccaggagtctgaggctgcagtgagctatgatcataccactgcaccctagcatgggtgacagagtgagaccctgtcactctgtctctctctaaaaaaaagggattacacaaataaagtgaactacttaatctggctattcaaaatatgtgaaagatcaacaaatttgtctaataatgttttgttgaagtgctttgttttaaatgagttccttttaaggcacatttaaaataagtcctttcccttctgtgcagttctttgaaagtatagagacaggattcattttatcatgtaaacattcatacagatagattactttgctctctagcctgtgggtaattcaacatttgtagtaagttagaataagaagcatgtaccacatttctggtgctgacaaaggcagccacggaggagaacacgttaatagcaaagaccaagtgtccaaggatagacacctgcctgcgcacagtcaagagtgggactgtttcttatgttgagtctataatgcttggttgttttgaattgctttattcttttatttttttaatgtaatgcagtcatcgatcaaaatcttaaaatcaaaagaaaacagatttctttttctgtttggacattttgagacattttaaatatcttaggttaaattgacgattggacttccaaaacaggccatttcatttttcattttttaacagcatgctttaacaacaatgacattggatcttagcragctcataccrgtggagcaagttcgtaccggaggagttcatgatgagaatakctattgtgaaattaacttttaactattgaacgcaaatgtttagtcctgaacctagttttaatttagcacctagttttaatctaatttctgaaccaatgtgtttacaggtaacatacaccttaaaattaatcacacccattattccaagcctttctgaattatttttctactatataattacttattttccccacatgataagcatatgctrtaaacgaaagttatcccacttgataaagtctcagagaagtttagtgtcttgatcaaagacacacagccatttggtatgaaagcctgaaagattactatgttctactctctatctagacattggcatttgataaaatcgtagacaagaattgttgtctattttggtctggagtgatgtctgtttgtttggttttttttttttgtttttttttttttttgagacagagtctggctctgtcacccaggctggagtacagaggcatgatcttggctcacgtagatcttggcctaggtagatctaggccctctacctcccgggttcaagtgattatcctgccttagcctcccgagtagctgggattacaggcatgcaccaccacacctggctaatttttgtatttttagtagagacaggatttcaccatgttgtccaggctggtctcgaattctgggcctcaggtgatccgcctgccttggcctcccagagtgctggaattacaggcgtgagccaccacatccagctggagtgattagtaacacgtggtcatttgtaggttgtttaaaggaagtggtaaatatctccgttgttttaatcctggaaatgtagcatatttgacaaataagtgaataatcttttaatgtgcaaaaaaggtctatagttcctctcaacacctttctccttgaacccactcacataaaaacagaacagatgcttcctggttaaattgatttatatatatttttgagaaagtgattaaaactgcattgtagacctgcagggggtgggtgggggtgggaattgtaaagagtcgcagacaaggatgggtgttactcagcatcttaaagcagcaaggaggaaatgagtgtgagatatctgacctccaatctgaaatgtaatcacattaacrccttgctgaatattagagaataaagtaatctgaacwaaacatttatcactgaatattcttttaaattttggatttatctgaaatctagtcttctgcttaatcatttaaatgctaataaacaagacagagtataatgaagaagcccaggtagttctgtaccaggctctcttgtttcactctaatggtttatcattcaggtaaaggttccatccctcagtagatgcagttggaatggattttttgtttttcttttttttggatacacggggaagctaaaacacaaattgaaaaaaagtcaactcgtttaaccttgggcttcatagcaaggctcacttgagyaggaaggatgttctaatagttgaatttatgtgaaaagttggcatggggaggtaacattaaccaactacatgtcagacccttttacttgttattgcctctaagccccacaaaaaccccaaaccaaaacttggctaatattttccattatttccttkcccctgccccataaaggaactgaaacttataaaaagtaacttacttgaagtaatgcagcagcaaataaaaatttaaatttaaacttagtttagttcgattccrtgttctrtgtttgttccacatcaggaaacagcatcttgtaaaaataatattccctttggaggaactgtcaccttgatataatttcaatactcaggttctttcctccgaaacaaggctgaaattttggacttggaaccaagaaatttctgaggagttttttctttgaatctttttgccaccgaaataaataaatacataaataagtaagtaggtaagtacataagtaaataagtaaaaaataaaaaatgcattcagtcattcttagcatgatctagaactctgatcatggtattctcttctctgtgcattaccrgttgtctgcagactttcaaggctgggctattcagcatattcccacccaaatagctccaacttcaaatcattattactcaagtaactgttaacacttctagtatactagtgtaatccctgatgtataggaaacacctcacatttgttgaatacatttgggaatgcttatttccttgattttagaattccatccattgaaaatgtaccattgaccaaatcacagattttaaggaagggagaaatggaagatgctactaaacgtctagtaacatagacattttgatctaagtcctgatttctgaaatgttagcataygctttttaaactggggaggaagtatggcacttcgataattgtaatctttcccaaattgcttcttttacctttatttcctgtctagaatttctatcactgcatccattcatctgtcagtatttaatctttctttctttttggctacaaaagcatgattagattttgccctgaaaactgctcgttcccatttgaattgtgttaatttctctcaggtcaactagggggaagttatatggagaaacagtaacagtgctgctttccagtgagattttctgtggatgagtaaaaaatgagatttcatgggttaggaccctttgagaacttgtttaggagcacataacatgtattaagatattcattattaagaatattctttcgatctcatgtatatgacattgcatgagatagaaagatgagaaacctcaggatattcacaagttttatgtggggaaaacttgtgggtataatagtatggtttaaaatgatggataaagtcaaaggacaactgtgtactttatgagctttgaattgatcatgaatgattttattgtgtttctttgccttgttctggggatgaaatctgacaccaagttgaccccttgcatttcctttatagttttcttatcatgtagagaattactggattattagctagctgatgaattccaaaatcagaaacctttggattcactgtaagatattcttgaagagctagactctgcacaaatygaaagaagataattccatacataaatttactgtttttacttgggttttgtgccttttcttacatattatcacagcaaaattattagctaatcctttttaattaatttttgaaatatagtcaaaggtatttggactgtgcctttactactttgaaacattaaagttcacgatatttttgccttatatggtctaatgaataagatttgtctgagactcttactcttagatatgtatttcacacctaatttttttggaaattgagatagtggattattattagggtggaagtatcatattctacttggtacaatattttttggtgaatctgggctcccttcccagctccaaatacaaatgctaaattaccttgtttagatttcttatccatcctgtgcttcgatttcccacttgtctttttaaattctttcttgggattttgccagagtcaactagaaaatgtctcatgtgaaactttgagagaagagacattgtaaaatgcctcttatcaaaataaatatatccagtttgtgattattcacttggtgatttttgtcccggaaatttttaactccccaagagcttcactggctacttggcacaaattctatcaaggcaaattcaccttgtttctaccaaatatccatgtagaaaacacagaatgatttgtattaacctatgcctaaagcaagtaataaagcacacctactccaaaatacaatacaaatttccccaggcaacaaatgcgtaaagaaaatattgctgatttttctattatctatcctgcttcttccttgtataaccatgggtagtatatatttgaaggatggatttttaaggtaggatctgtgctaataccactaccaatataaaagattcatcctttgattataatattttgaggaattataataggaaatgcccccatcatttttatactaagtccatctgtttaatgattaaatttcacctttgtcaaaggtcctagatatactggtgaatttaagcatttattgatataaaactgggatgtagcattcactggagtgatttgcttattttgctggtatgaagcagatttttcaaattcattcagttcggctgtgaaaaacagacctcacagtttctctctgacctttgcctgggccattttcatgggatttagtatttgcggagcaagtgaaagctttaacacttgacacctggcccagcgaaattcctggtgcaggctttgcagtgggggcaaggggaaacattgaagttaaagcccctgctccctctggctgctgagccgtgagcctgctgcctgagatggtcaaacatcttttcacaggtggcttatggcaatttatattcttcttttttttccacagctgttgtgaacttggataattctgtggttgacctggagacccttcaagctctctatgagaatgtgagtaatagaaggaattttatgtgtgagtatataatatgtacacagtacatgtctatgtgcacatataggctctttgttttaaggtcctctaaagaaatttgatccgagtgtagtgaatttgcctaagtaggtgtttgttacaatactttctaggaacatatcaaacaaatgtgtggtctcatggtttgaaaaattgtgaatcaaatcatattgcatatgaggtcattcattatttttttaaatttaaataatagtactgatgtgggggctaacttgagccaagcattgttctgtgcacttcatacacacacacacacacacacacacacacacacwcactcacacacacttaaaattttaaaatatgtaactgaaaaagattgaatacattcattccaggtgtatgtattgaacatattcatgctgagttgatatacacattgattaccacaatcagattaacacatccatcaccacccacacttatatataagatctctagaagttattcatcttataactgaaagtttgtaccttttgaccartatctccctattttcctacctcccacccctgggcaaccaccgttatgctttctgtttctatgagttcaagttttttagattccttatttgtctttctgtgtctagcttatttcacttagcattatgccctccaggttcatccatgatgttgcaaatggcaggattgctttcttttttatgggtgaataatattccatggtgtatatgtaccacattttctttatccattcatctgttgatggacactggttggttttatatcttgtctcttatgagtagtgctgcagtgaacatgaaagtacagatatctcttcaacatacttttcatttcctttggatgtattcccagaagtagaattgctggatcatatggtagttctgtctttaatattttgagcaacacctacactgctttctattatggctgtaccaatttacattcccatcgacagtgtgccagggttcccttttcttcgcatcttcaccaacacctgttatctctctcctaatagccttgccaacagatgtgaagtcatagctcactgtggttttgatttgcatttctctgatgaactgtgatcaaatgctattattatcacccctgttttacatgaggaaagttagagaggttagatgacttactcagggtcacatagctagtgttgtgatatagctggggtttagttcattctgcctgtttctctatactgctacagtttatttcactaggtggcaggacatttagcttttgttatgtagtactttttttttttttttttttaacaaaggtggtagagaaagggagtaaggtattgaaggagaataaccatagcacgatatagtcagtgctattgggaagtgtgatatgagagatgtctttagctagaatgtgacattaaataatattgattcaagtagtaataaagcaggttgttttcagtgcttttgattatatttaaggtaaagtctcagtgtggtcctattttgggtctaatatctttgagtgcttttttttttttttttttttttttactttatttctgttcttgcctttgatctgcctggtatttaagcctctgctctttggggcatggccttagttggtccttaacttttctgtctcaagtcaaataattcttggctctggggagacccatgtggtgggcaggatgcagactctgttccttgatcactcccttgaggactgtgtattcaacctgctcatccactcttgagtttggttttttttttttaacatatgttatatggtggtctcatctgtgagattgagaccgatgtaagacaaaatatgtctcatggtgcattgtacagaatctgtgggccaagtgtagaattggtacccattaagcatggtgagcataagcattcagtgaaactgagtcagaaacaaagattgagagggaagstttcagtgatttattatacagttgtcactatgcaaagggaaaactggaaaaagtaaatcgtgtgtttagtatattcacattccaatgaaattggtatttaaaatataaccattgggaggtacagagagttttcatttctcttgagtctttcatactaaccctcttccaaccaggagggccatatggaagaaaggaggaaatactagaggaaagtaatttcttcagcaggtcataatgatttaagatgttggtgtgtgtgtatctatctatcttgcacatatatattacatatatacatttggtgtatacatggtgtgtgtgtgtatctatatgtgtgtatgtgtatctaggaatgaatgtcttatttacacttgatgtatttatgtgtagaaatatacccagaaaatacagaacattgaatgtttattttatgatggtttagaatattttatttgggctgggtgtggtggctcatgcctgtaatcctagcactttgggaggccaaggcgggaggatcacgaggtcgggagttcgagaacagcctggccaacatggtgaaaccccgtctctactaaaaatacaaacataagccaggcatggtggcccgggcacgtgtaatcccagctactcgggaggctaaggcaggagaattacttgaatctgggaggcggaggttgctgtgagccgagattgcatcactgcactccagcctggtgacagagtgagactccatctcaaaaaaaaaaaaaaaaaaaaaagaatattttatttgggagtgtttagcctttcaaagtaaagtaatttcacaaaatataaatttatgactcaggacaaactggatagctacccagaatcttatcttacttcatgaaagtagaaaaagtactgtgtcttagtctgtttgggctgctataatagaataccatagcctaaatggcttatgaagtgttatttctcccagttttggagactgagatttccaagatgaaggcactggcagatttgggatctggtgagggccctcttccaggttcacagactgcggtgttcttgctgtaacctcacatggtagaagggacaagggagctgcttggggtctcttctacaagggcactgatctcattcaagagggctctgctctcatggcctaattgcttccaaaaggccctaccttrataccatcatcctggggataaggtttcaacctatggaactgagggtggggcgtaaacattcagcrtatagtatactagctggcactggttaaacttaattacaatttttattgctgctgttctcaaactttaaggttcagactttcattgtttcaggaaaacaattattttgtgagagggtgattcacaattattagtttaggtagtaccaggttagccctctgcagtacaggaacttgaaggatccgttatgaacaataacaggtcattgtgcrtattttatatgccaataatacatatatgcaaattcctgattaatatctattaaaaaataagtcttgggaaggcaaaaatagttgttttatccacagcaatagctccagaacctagagttaagtagtatttggaacagttcttccctaaacgtcctgtatatcaggggtcctcaaccstcaggccaaggaccagtaccattctgtggcctgttaggaactgggccacacagcagaaggtgagccactggtgagcaagcattactgcctgagctccacttcctgttggatctgtggtggcattagcttatcataggagctaggagtacaaacccttttgtgaactgcgtatgcacgggatctaggttgcctgctctttatgagaacctaatgcctgatgatctgaggtagaacaatttcatcaccaaaccatccccataatgccaggtctgtggaagaattgtcttccacaaaactggtccctggtgccaaaaaggttggggaccgctgctgtctatgtaagacattgttgaaatcttatagtactcctttcttcctttcctgggaattttccactttttgctttatgttatctttatgtatgcatatgtcttatcttctcacttaactacaaattccttattagttgaattttttttttttgaggtggagtctcactctgtcacccaagctggagtgcagtggcgcagtcttggcccactgcaacctctgcctcccaggttcaagttctcctaccccagcttccagggtagctgggattacaggcacccaccgccacaccgggctaatttttgtatttttaggagagactgggttttgccatgttggctaggctggtctcgaactcctgacctcaggtgatccacccgcctcgaccttacaaagtgctgggattacaggcgtgagccaccacacatggcctgagtttttatattccatattgaacaatatggtttgtataaaatattcataataattactacttaaacaatgacctgagaatagtaatrttttccttttggtattattttataattgacagaaatgaaaatggttaatgtcattatttacatttcaaatgctctgctttttttaaacatcagtataaaaggaaatctggctttcttaaaaataaggtaatttcagaaatatttctgcagagactcagaagtgatacctttaccatggataaagctaaccattgctatcccagcaataatctgatcccgttatgtgtaatttttcaaacaatggtttaaattcaaacggtgacattctattttagggcaaactgagtagatttgcttccttcttgttgatgtaatttcagacgtgattgcctcaggagcccctggaattgctaaggaagctctttccatttcccatgttaccttagatcttttgagtgtccgctggactgaaaagaagcttgagcttccttttctcagtttatactagataatgcatactgcgatgaacccaagatggacctaagattacagaactagtagtagtttattttttggtgcacaaagcggaacaagtttttccatgttttcagttgctaatagactgcatttttacgcaagactagtaggaataaggtggcgcgctgtatgaaggcacatttgtggtgtaccttggctggaggccttcctacttcctgcagactctccccaaactttacagctatgtaatagctagattaaaataggccactatttcatctccatgtgacatgaatatgtgcttacatgttccatccctcctctatcaccccaaatcacacaagggtataccagaagttgtagttccaactgcatgaaaccaatatggttgctattactaaggggactgggattctaactacctcttttcattcatgctgtatcaggtaagggaaggctaggaacccagtgtaactataatagaagtttcatatgatctctatgctatttaatcccattaaatgactgttgaatgaatgaaccctttgaaacgggagctcarcayggtagaacgtttaggcaacatgtgatgccagcttcttttccatgcattttcctagattcccaacttacaaatataggarcattaagccatctgatttgtatttaccattgtttcctcatttgtcactactgttttctctttgtctaaaaaattctatgacaatctttgtacccccctctgatgttccaatcaaagagctcttctcactttgtactagtttctttctcctatctctcctttgttatagcatgctcagatgcccatcaaaccgaaatgaaaacaaaataaagagacatatataacttaccttcttttactcattgtttctttcattgaaaactatttctagaaagctaactaactgtcatgcagtttgctaagatcagtgctaggtagtatattaggcacatgcatatttggaatcgttttttctcttggatgttgctttttatcagtatgaaatattcttcttcagtttagtaatactctttgtcttgacgtttttttaaactgatatttaaatagctattctattcttttgatacttactgtgtgcatgttttttttttttttccaactccatctgtgtactttcaactgccctgtgtctctgtgtttgaattgcatctctcatagacagcatgcatttgggtctgtgttttttattcattgtgataatctttactttcttggagcatttagattgtcaacatttattgtaattgttgttatagttggatttaggtctgtcattttttgtccctctaattcttctttcctaccttattatttacatggtattttttgctgttttgttttaacttttatttctattttttttttttagcttcacctctttgtgtcacatatttttcagttatgctaggaatcacaatgtatattcctaaccttttatactctacttagatagaattttcatataaaatatagaaaccttgactccatatagggctttttgctgcctctcctgctccatttaacttattttgttgtgacgtgagtagcatctgtatgtgattgtatttttaaataattaaacatatttaaatatagtttttttatatttagctacatttcccccatttctgaagctcttcctttgttaagaccaagtttccctccagtatcattttatatcgtttttctttagcctaaggaagtatctgtagtgtattttgaaaacacatcttttcagtgatgaattttcttaattttctttcatcttagaattttttttatctcaccttccttttttttgaaggacattttaaaattggatatagaagtctgggttgacagtttttttctttcagcataataaagatatcccaattacctccgatctaccttgtctctgatgataagtctgccatcattgttactttgtattaatacataaattgtcatttttttccccttctactgcctttaggtttttctttttattgggttttaatcagttttattgtaatataagtaggcatggttttcttgtattctgattgagtttgatggacttcctgattataattgtgatttttcaccacatttgacagtttccatctctcgtccttcaacctgaaactattcttttgtactctgttctcccagtttctctcctctctggcttactaatgacatacatgttacatcttgagtactttttcacaagtccctgagattctgttcattagattttccatcatttttttctttctgttcatcatattgtgtactttcactgattctttcttttgctgtctttattcttttattcaacctctcaaatgaaaacattttatttctaatgctataattttcctagaattttcattaatagttctttttttgagactccttatctttgttaacattgataatttttgttacaaattgaatagttatgttcagttttttaaaaggcacctacacacatttaaaagataaaccagaagctagaaaaagaaatttgcaatacctgggccctcagaaaatcgggacccagaatattgaaaaattcttacacttatcaagggacaagtccaaagaaaaatgaataaaagagataacaaggcaactcaaaaaaagtaaactggtatgtccaataaatacaagaaaaagtgtgtattctcaatagaaagcaagaaaatggaaataagacatcagtaagatacttcttcatctccagtgaaaaagtttgacagtatcaaatgttgaagagcatttgaaaaawtagtaactattatatactatattaatataatttggtataatctcaatgggaagcaatttgcaatatctaatataattagtccagtaattacacccttagtcatacattctagagaaactctttcaaaaccagttttccaaccatcagacacattaatgggtccaacacttgggtctagtcagatttgcctgatatctaagtataactatcagacaaatcaacctaggccaaaagattatgaaaattaataattagagtttcaagctactaaagtttaatttctttcacataaaaatgttagctgacacttttcccatacatttttatgccctatatggatataaatatagtgaaaataaaaatagggttatattaccattatacaataatatagaaagataatttctatgtagagcaagatatttgtttttgttattgtctctatgactaaaaaaaaaaaatcagaaaattaagtaaaaagaagtatatttcccttcttattccaggaaagtaactgagccttttgtaccctgaggctgcgctctcctgcctcagatgatctttggggaccttggtttttcttgatcacaaagagaatttgctttgtcttcgtcaagtgagagagactgattataatagttaaagtagctgacgtgctcacatctgtatttcttcatacagctttgagttatggtctagtgtcctgtcatttcatcctgcaggactcccttgagcatttcttgtggtacagatcgagtgataataaacttttccagctttagtatatctggaatgtcataatttttccctcatagtcaaaggatagttttactggatatagaattattggttgaaactttattttgtttcagyactttgaatatatcagaccactgccttctggtctcccaaatttgtgacaagaaatctgcagagattcttattgagcatttcttgtgtgtgaccagttacttctttcttgctagtgttaatattctctctttgactttgtctttcaaaagtttgtttataatgtatctcgatgtagggctctttggattaacatcattttgagttcattaagcttcttggatgtttatgttcacatctttcatcaaattggacaagttttcagccattattttttaaaaatatcctctctgttcctttctctctttttcttctaggacttccataatgcatatttggtctgcttggtggtgtttcacggcttcctgaggctrtcttcacttttcttccatttttctttttctgttctttagagttgatactttctgatccatcttcaagttcatggattcattcttttgcttcctcaaatccgtctttaaattctctttgtgcattattttatgttagttattgtatttttcagttcttttcagttattgtatttttcaccctctttttgatttattttcaggttttctatctctttattaatattgccattttgtctgtacattgttttcttggcttgctttctttagttctttgagcatatttaaaacaaaatttaaaaagcctttgtctttactctgccatcaggtctttttcagggataatttgtattgatttatctttatcctttgaatggtgcatacttttgtttctttgtatgtcttgtgattttctttcttttttattttgaaaagtggacatttgaatttaacaatgtaattctggaaatcacattctccctcttcccaagggtttgctgggtttttattaattgtttttatttgttgttttttgatttttgtagtttatctttgtgccaaggataagcctgaagtgtaaacttaaggtcttctcagggcatttttcagcctgcacctttccctgggcacaagtggtcactttctaattttcccgatatatatacagttgcttttaaatgtcctaatctttaatgtctggctcccaaaaggtgggaaagattaaaaggaatcatggaaaaaagagggctctggccgtttaatcccccagctgtcacttcaaccagataaggaggggcaactacagtggggggacagaggctcaacaatggcctcctgcttctttgtttgcacctgagtgatcagaagcagtaatcagggatcagagcacagatcctttatatttggaaggtgaggacattgggaggttggctcactttggctcctgcaggctgtgtgcaggttgctccagaagcgcgtgcacagctgcctgccacagggccgggagtgggggataggtagctgctgatctgctaagagctgacattgactaaaattaactgtaatttaagctccaagcctttctttggaagttgtaagaccaacagtagaccccaaagtttccaacagattctgctagtacaattgtctagatggggaaatagatccctggcactttctactctgctatcttcccagaatcctttctggggtttctrattttttcattcattcttaatatatttttgttcatatcatggagcatagttataatagctgcttttctaaagacgttgtctgataatatgaacatctgggtcatcttgaggttggcatctgttgattgtattttcctttgagatttagtcagattttcctctattttggcacattggataattttgtatcttggacaacatagtctgtgtaactgtatttaatcatttcttttcatttaacatttaaatgagcttattactctctgtaatacaagatatattcaatctaggttttgctgagaaagaaactcattcatttttgaaagcatgcgtttcccagtattgtgtttttcaaactgggttcagtgaaacactattgttttgtagtctatagtaaaaaacatgttgcataatcaaacaggttaaaaataagttaatcaaataagttaaagttaaaaataaaactgtgcagagccataatgtatgcctaataaagtggtagtttccaagtggaggacattttaaactatattcttccttcaattaaattattaatctagtgaaaacaatagtattacgtggtttggaaaatgctactatagtgcagtctaaataaatccagacttgcagaaacgtagctattgtataatgccaaggaatgtgtctattgtgtatttttaatttaacatagttactattttacttattaccaaataattacatgtatatcccttttatgtatctcttccacttatacttcttgtcataagaattattacatgaaaaggtcatcttagtagtgtagcatcattattgtaataggatataaaccattataaggtcagcataattgttttaaagtcattagtcatacagttttctagactagatatgcttgtaagttttttttttttttttgaggtgaaatcttgctctgtcacccaggctggagtgcggtgacgtgatctcggctcactgcaacctccacctcctgggttcaagtgattctcctgcctcaacctcctgagtagctgggattacaggcatgtaccaccatgcccagctaatttttgtatttttagtagagatggtgtttcactatgttggccaggctggtctcggactcctgacctcatggtccacccacctcggcttcccaaagtgctgggattacaggcgtgagccaccgcacccggctgcttatagtttttattttctttttttaaaatccattttaattttagattcaagggatacatgtgcaggtttgttacaagggcatattgagtggggctgaggtttgggcttccgttaatcccataacccagaagctgaacatagtatccaacaggacatgtttcagcccttgttcctctccctccctccttttggagtccccagtttctagtgttcccatctttatgtgaacccaaaatttaactcctacttgtaagtgagaacatgtgatatgtttctgcatatggaataacagtctctagctgcatccatgtttctgcaaagaacatgacttcattcttttcatggtgttgtagcattccgtggggtatatgtaccacattttctttatccagtccactgttgatggacatctaggtttattccacgtctttgctattgcaaatagtgctgtgatgaacatacgagtgcctgtgtctttttggtagaatgatttattttcctttgaatatatacccactaatgggattgctggattgaatggtatttctatttttagttcattgggaaatctccaaactgctgtccacagtggctggactagtttgcattcccaccaacagtgtataagcatttccttgtcttcacaacctctgtaacacctgttattttttgacattttagtaatagccattctcactggtgtgagatggcatctcattgtggttttgatttgtatctctctggtgtttagtcatgctgagtactttttcttaagtttagctgcttgttatcatcttttgagaaatgtcttttattgtcctttgccactttttaatgaggttgtttccttttttcttgttgattcatttaaatcccttatagattctggatattagtcctttgtcagatgcatagtttgcaaatattttctcccattctgttggttatctgtttattcttgtcaagagtttcttctgttgtgcagaagctctctttggtttaattgtgccatttctctatttttggttttgttgcatttgtttttagggtttcakcataaatgtttgcstagaccaatgtctaaaagagtatttcctagcttttctcccagagtttttatagtttgaggtcttacttttaagtttttaatgcatcttgagttaatttttatgtgtggtaagaggtagtggtccggtttcattcttctgcatatggttagccagttttcacaacaccattgattgaacagggtgtcctttctccattgtttatttctgctaactttgtcaaagatgagttggttgtaggtatgcaactttatttcaaggatctctgttctgatccattgatctgtatgtctatttttgtaccatgctgttttggtaactgtagccttgaagtatagttagaagcccagtaatatgatgcctctggctttgttctttttacttaggattgccttggctattggggctcttttttgtttcatttgaattttagaatagtttttcctaattctgtgaaaaatgatgtttgtaatttgataggaatagcattgaatcagtagattgcttcaggcagtatggatattttaatgatattcttccaacccatgagcatggaatgcttttccatttgtttgtgtcgtctrtgatttctttcagcagtgttttgtagttctccttatagagatcattcaccttcttggtattcctaggtatttaattaattaattaattattgtggctattaggtacattatagtttttaaaatattctgtgttaaagagaaaaaaagtcaatgtgagggaaaggatgttgcccaggatggtgggtacaattttaaatatggttgttatttgaaagatgacatttgaactaggaattgcgggagatgaggaagagaagccatgtgtaaatctaagagaccatatcatgcctgaagtgtgagcaagtctgatatattcagggaacagctggaagcccacacagctgaaatggcacaagggaggggaacattgtagaagttacttagagataaattggtggggactagcccctctagggacttrtagaactttgtaagacttgaactttttctctgagtaaaatgggaagttaacacacagttttggctagaggattcatgtttcaaagcttgtccaactcgctttattttgttgttgtcattctgttttgttttgtttcaggcttttagcagcctgaagccatggtgtttagtttcgtgtctagtgataagcagaaaagagggacgaggacggggctttactgrcccaaccagaaacagaaactaagaacccacgactgtattctgtcccttggacacccctgtaagaagttctgacaactaggaatagactgtgagaagcaaggtggagtgtcagagacctttcagagttaagagatgatagtggcttggacctcagttaagagatgatagtggcttggacctcagtgtacacagtggagctgctgagaagtggtcagattctggaactattttgaagaatatgccagtagaatttgccagcgggctgggtatggactgtgagagaaaacaagaaattgagagtgatcccacaatttttggcctgggcaataggaagggattgccattagctgataagtggaagcagcttggtagaaaatggggcaatgagaattctgtggttatgttaggtttgagtggtctgttccttcataattgatatgcagacacaggggtctagtagtctcaaggcagaaggtggagagtgagggtatgagtgttagaaagtctaacagtatgggttcaattgggacataaaccacagactaatataagcagaagagtttattataatgaatgattaacctatgatggaagagtacaagaatatagtgataactttaacagcaccctagggatgagtaagcatacccaagttcggataagcttggaagggggtcccctctctaagactggggtgcagatytcattggagaaggtgtgtttgcagcccactggtttgcctgggccatagctggtcacgtctctgggcaagcaagaaaacacacttctgggggcaggtgaactctagctagtgggcaggcatgcaggagttaggatgctacagtgaacrtgaagcccagagtgtacagtatctatgtagggagggcccaggaaacaaacctyagggcacaggcaagccttggctggtgcaggtgcacagtgcgtggtgtctgcattggaggcaaactggtcactgagtctaggtcaggactgcaaggttgccaaagggctctgcactccgggtatgctgctggggtgtggcagagcacccccagatgtcattatacacccacaccgctgaccamttgtgctgcagaaaaggcaaactgcataccagagtcaggaagaggacccccttcctctagcagtgcccctccatcacctcctactggcaaagcataacctcatattcactgtaaagggggaccgggagctgctgagtccagtccgttatctcggattcagttctagaaggcaaactgagggatgagaggcagtaactggcacagatggtagggagggttgaggttttaggaggtatggtctcatctggcatgacagtcacgtgtgtttgtgacttaatatggtaggtgtcatgctcatatgaaagtgtctctagaaacaaaaagtgacatgcacgggcttagacttggcttgagtcctctttggaaatctttccaactttatcatgttggtgtaatggtaattattaacttcaggtctgacacagtgtttgaaagatagctgaatagtcttaattttgccttaatagtttaataataacatttgagggtacatgtgaattttatctagaaaaaataaacatatttaaactcaatttttaaattaaatatatgggtaataatcttatttggcattccacttcttatccttgaagaaaaaaatatcgctaacctaaatcctttcccataaatacaacacactttctttttgccagatgcttaaatgtcattggtctgttttaaagtaattctatttgatctctgtgaaacagatggaagtatttgttatacaaaccttatttagaatgtaatctttttttctctcctgattgcatatgkttggcagtgagctttctcttctagatgtgaatgaatcttggttagcctccaaatctaaacacaccctaatttcaaaaaccacaatcctgaggactcaattcctgtttactgaggaattaaaacctagagaaaccacatagttactaaatgcagtacaacctagtgagtttttaaaaacaaaaatcattacagtttatttagggttattgactgtcattaagttcagagagtaagatcttttcctaagcagtatataatatttacagttggttaactatatctattgcttctgaatcttgaaatatactccttatatggcaaagtgagcttgtgaggtggataggaagcagtagactgtggtgtggggaatgagggagcagatgaggaaaattactcatttttttaagtgtgttgaatgactaacttcaattcaaaaatgtgtctgttaaaatattcatgtataactatcagttgcattgtgtttttctgaaaatcatttttttctttctttcatatttaagaaacaaataaacaaaaaatcttaagtattcaaccagaccaaaacctggacatgaatactattagcagttcaactgaagaaaaatacatgaaaaaagataggaagggaaaaaattcaacaccccctttgtcattaaacagttctaatccaattagaaggaagaaaaaaaagcaggtaaagtagaaagaattagagatctaaatttacacttctcaggattggatttcacaggcatactttatagttttagcaatctttgcttaaagattactagggtagtagttgacataccataaacttgaatctggaagaagggtatcatgcatgccacatgatacagcatcctcaaaagtgtataccatattacattagtgaaaatgaattggattaactgttctgtgttcccataacttcctagaggaatttaattgattcatgttttaagcaacatttaatcatcagtttcttcaaacaaaaatgagaggagtattgactttccccacatagctgttttaaaaccatactctcaaatttcattgttttattgagttggttcatggaatccctgcaagtatgctcattttcaaccataaacgtgcttaaggtgaatttcagaattaaaaaaaaagaaaagctttggatcttgaatcacttacagattgactctataaacttaataaaaaatcagaaattatatttctttcttgttaatctaaggtgtgacactgcctgtcacatcataaaattattgactgattttttgatagttatgcttcttttggataaaccaactatattgcataaattcctggaaaatgaaaattaaaagattaacacagctgcattggaaatatgtggaaataaatgatccgggattgttcttatatgtcgttcctgttattttactttattttattaagagacaaggtctcgctctcttggccaggctggagtgcagtggtgtgatcatagctcactacagccttgaactgctgaactcaagtgatcctcttgcctcaccctctcaaatagctggaactacaggcatgcatcaccatgctggctttctcttattttaatatgatatttttcttttattagttgacatccaaaaggctgacattgtagagcagagagcagtttcatgttcacattgtggaatttatggccatttactttttgtaggcgggtaggttctctgagcacttctccttcacatttgtttttagttttgcatggtccgtccactttaccatcttgtagccctctgctctccagccacccacccccttttagtttctcaaaaccatgcagatcctaccactagaacagcactgacaaaaggtgttccttcaggcaggagatttccacttaccatctccttctagtaaaagtctcctgaatcttcagttgtcattcttttcttccttaggaattctttgtatcaaatccttccatttcaggctcatacagcaacatgcaccttgtctttagaatgcttgtaaacctagacattgtacgcatattcacttttctttactcccattctctctgatctgatgaaagttctgttgtttttccttagtattgtatctccttggcacatagtaagcactacaaaaaacatttaccagatgaatgcaaataattgtttatggcagttagaacgctacccttgacaagttctcttaaatagaatttcttttaaaataccagggctttgatcatgattttaatgatggcattgtttcttggaagaaagagtaattctgtgatcagatgttccacaaagtacatttgattatcagtgtttacttttacatttgaaataaagactattgctttcttggtcattgtaacagaaagcagagtaacaatgtattatagaatctgttagcccaaggaaaatgcacttctcgaactgatcagatcgctgccctacacactttacctccacacttatcaatttgcacatcaagattagtgttttccttatatgtcaatgcaaaagacttaagagattatttttagaactccccagcacttcttcctgttcctgaccttttccttctccttacccacccatgcatcttgttctgaagtacaaggctcaatacagaaattaatcccttggaatttgctatgtcacttcctmttgcaacatttgctttttagatgaccagttaccacttaccctttcttttgggaggtctttactaagtgagctgtctacaaaacgatgagtcrtcctggatgggtgttgttagagcaggccattagttctccattctacccatccgatgcttcctttttctcccatccaagtgggaaccactgatgcttcctttttctaacaaatatgcataacgcccttttcactattctgaaaagaaatgtatggataataaatctatatacataacttaagtcacctaatgtctgacacttaatataaagtagtgcagtaatgtataatattatatgatgtatttaagtatgtgaatgcttatgtgtgattgaaccagaagatataaggaagtacatatttgttaaggtatttataatcaccttgaatacaatatctaacaatggttttatcaccattaatgagattttccaaaatagtcaacagtaaatttgaagtagagtttttcttagatactgcagcatggttttattcctggacagctctgtgtaccttaaaatatgatataagatatttaattaatattaaaataatgtatataaaatagtgtatactgcccgggcacggtggctcatacctgtaatcccagcactttgggaggctgaggcaggtggatcacttgaggtcaggagttcgaaaccagcctggccaacctggtgaaaccccgtctctactagaaatacaaatacaaaaattagctgggcgtggcgatgtgtgcctgtagtcccagctactcaggagactgaggcaggagaattgcttgaacccaagaggtggaggttgcagtgagccaagattgagccactgcacacttcagcctgggcaacagagcaagactctgtctcagaaaaaaaatagtgtatrttaacatcctgaaaaatatttaacgtgtacattttttttcaaattatgcttttgtacataaaaagctactaaggaagatgctggtatctattactgtcctctgcaaggaaaaagtaattttgttggggagctacaatatgcatacaattttaattatcatataagaattccactgctagcattctatgaatagtagtttaacagaaaacacatcataaggcactttaagtaccaaccttaaaaaagggggagtagatcataaagactgtggtgttttgggaggggaaatatggcatccatctgtagcaaggagtgcaaatatwgcttgaattgaaaggagagaaagggagaaagggagggttgctgtattacgtctatgccagattcacatttccctcagaaatgctaggttcaactactgamctattttaaatcacaggcctgtcttcaatatgtactgacctgaaatgaaaaaatagtccaaatttctactttttaaaaagagagaggaaagaggagaagcaaaaggatcactgttattgttgtcctcctcaagttctttataaaaatagctggagaataaatccttaataaatgtaaaaattttggaatactttcatgttcgtttcatcctagctttgatccttgccgctatttttcctcatgttttcagttctaaatgtaaacctgtttgataatggaaacccttgtttgcttctccttttattatgactttttttggtttctcaggaggtctttgctcaggagaacatgaattgcacatccttgtgtgtggtgttgaattgtttgtaagttccctgtctgcctctaccagccattgtttttacataaattctgttcttctgtgatctgcctcgtttgtctctttgagaacattaacaagccttttagcttagtggaatacaaaagtgtttcctgcgcattcactctttaataactattcagctcttctgggaggacagtttcttctgacacacatagagtaaacattttccagtaattttccttgatggcaggcaagcattagggaaatggtgcagttggctagcaaccccagtaaattttgccarcctgatgccataaatgttcactaggctgtcttcaaattcctttattctgctgatgttacaggaatggacttaagactaagcatattgtagtttatatayaagactttcaggtttggcctgtgtggtcatataaggtagaggtttttgaatggtagcaaacataattgttctcatgcctgctaaaaaccttggttatgactaaagctggatcctaacttaaaattatgcatgaacagtaaaaacatttgatggttttgatgtattatgtttgatagggtcatcaaccttcccttcttacttcccatgattgcaacaactgaaatttaactgggcaataaatttattaaaggaataaatagtcaactctcttaataaggatgtagaactcctatcatgtttttcttcactgaacttatttaggaacttgagtgattccagatggtattacatgagtatttggctctgaatttcttgttttctcacatttgccaacatacaagtgttcaagactttcaggtccctgaggagctgttcagccattggatatacaactttaggttgctatggtatatttgatcattcttttgaaagttctcctcagtccttggcattttaaaatatgaaaattatttaatgtaacccggagaagaaagatctgtggagctgtagtgtgtgagtcrgtggaccataaaatgtagatctcttgaaaagctagttttcaagatgagacgagatcaacaagtagtatatagaccacccataaactcttgaatgtggaatgtgtaaaaatgtatttaagtggccctttaataatgcaaaagtattttcccttaaatgtgctgggaagtccccagtccaacacacaaaaggccatttcatgcataacatatatatagggtttttacatactcaaataaaatgagagaaccaaaccacragatcttttttcccctccaataaatatttagagtgaacctactgtgtgccaggcactgttctaggtgttggtattacaaaaatgaatcttatattcacctctttgaagagctttggatgtaatgtggatgacaaacatgaaaccaaataattaaarcctattgttcttaagtgctagatagagttctttggaaagagtggggcagttgctgaaaaggcaacaaggacttgatcttcggggaggtagaaggatgttcatagagaggcagtatctgggattgttcttaaatgttggtcaataatatgctgcagagaagagataaagacccagcagatggagcagtatgatcaaaggcatggatgtaaaaatctataatgtgttttaggtgaggaattttgtgttgctgacaagtagtgcctagggaaatgggagtcagaggaggggcagggattgagactggcagggatggatgtggacaggttgctgtggggtagcaatgagagtgagagggagaagtctgtttctaagatgtttttcaggggaagactcaacaggaaatgttggtaacaggatgtgggagacaggagaccatacacaggcttctttcttgggtatttggatcaccatagctgggattggatgttcaaaatgatgaacagatttggggacaaaatagaacggatgatcaatggctcattttgttttttttctttcaagtttttattttagactcattatagattcagaggactttgtaaaaatagtacactgtgtcccatatacccagttttccccaatgatagcatcttataaaactatagtataacatcaaaacctggaaaattacattggtatgatccgtggaccttttttagatttcaccaattttgcatgcactcctactgggtgtgggcatcatgtacacacatatgcatgtacagttctatgcactcgtgtcacatgttgattcctataattatcagcacaatcaagatgtaaaacaggacgagtgggtggctcatgcctgtaatcccagtactttgggaggctgaggcgggctgatcacgaggtctatcacaaggtcaagagattgagaccatcctggccaacatggtgaaaccctgtctctactaaaagtaaaaaattagcttggtgtggtggcacgcacctgtagtcctagctgctcaggaggctaaggcaggagaattgcttgaacccaggaggcagaggttgcagtgagccgatatcatgccactgcactccagcctggggagactccatctaaaaagaaaaagaaaagaaagatgtaaaatgattccatcacccaaaaccatgacccaaaagatcccttgtgctacccccttgtaattacaccatctctttctccatccctaacccctggtagttaataatctgtttccatcgctataattttgtcattttgagaatgtgacataaatggaatcatacggtatataaccttttaagattagcttttttccactcagtataatttccatgagatccactcaagtgttgagtgcctcagtagttcatttcattttattgttgagtagtatttcatggtatgaacatactaacatttgtttaatctttcacctactgaaaggcatttggggtgttttgagtttttgggtattacacacaaaactgttatgaacatgtatgtacrtaattttttgcatgtcgacttaagttttctttttttgtgtgataaatgcccaggactgcaattgttgtgttacaagttgtgtatatttacgttttaagaaactgacaaactgttttccagaatggtagtaccattttccattctcagcagcaatatatgagagatccaattttgctgcatccctggtatggttactaatttttattctagctgttacaatagatttgtagtgatagtccatcatgattttaatttgcatttccttaatggtcaatgaggctgaacatcatttcatgtgctaacttgtcatccatgtattctctctggcgatatgtctgtttatgtctttttcccgctttctagttagattgagttgctcatttgcgccacctcagatcacctctttcttccttgttgctgctgggtggaagtttggctgcccactgggcccccagataccaggttgatgggaagttggagtaggccttgtattaagtagcactgcctcatacccacttgctccacttcatagcgctggagtgacagttcagctcttcacttaacacctcaatgggacagtttttcatttggtgtttggcctagggcaggtattaagagaaaggttttctgctctggcagaccacttttttcctagtcctttgtctggaggaaggaaactggcttttctttttctttttcttttttttttccatgtatctgctggtggttccaggttctaagcttctttagcacccactctgggataaatgggaagaaaatagaaaactcaggaagttcatcaccatgctgttaatgatactgtgaggtcgttggccagtctgccttctttccacccttcattgcttccctatgtttgtttgtaccattatgtccaggtattattctaaaaataattgttaatcagtaaaaagttttgaataggatatacatgctctgatttgcaccttttaaaaacaatcacattaagtacttcatagaacatgtgttagagagagtcagggatgatttaggggagaccaatcaggatattagaatagttgagttgagagatggcggtttggacaaggatggtggcagtggaggtggatctgagactcagtgattcactggatgtggaagtgaaatatgagtagatgtttaggataacccccagctttctgggtgggtgacgagttttccagtttactggaatgaggatcactgaagatttagaggaagaaaacctgacttgattttgaaatatgtttcatctaagatgcttctgaagtatgcaggtgaaaaagttgagaaagtaatggtctgtctggacgtggaatgaaaatacaggcttagaagggaaaccagagctaaatgtatttattatatagtgtggtgaggtatagtggatgaagacctggcagtggggatggagtgggttcagcagagggagggaagagattcacaagaagaagatgtaatgtaatcaaagggagcaatattaggatgtaaggttgcctagtcaacataaaagtatcaggagtgatggcgtttgtggagagaggcaaagggcttagcatttagctacattatgaaattggagagaaaatgaataaaggaactcgtagaagtttggccagcccaatatttctacattatatcccttagaacactggttccttgggggatatctttctgtctgtctgtcttagacacacacaaatgcacacgttttgtgagaaattaagtataaggaatgmtsttaaacaaaactagtatttccaacagcataatttcaaagagtgtttagcatcgtgagtcttcacaacagatgtggyatacaacaattcctaagacatctcagggatttaagttagtgtcctctgggagttagttcttgtagactgaaacgatgtcgtcttggaagggactttccctwatggaagtgaaaaagactgggcgagggaaggtttgttagttgaatgttcagaacctggaaattctttgatgtgattaactaatgtataagtgtggagccactttgttcgtgtatttggccataaggaagaatgagcctatttcagcattcgagaaatagttgcttagcaccattcataaactcagcagaaatgggtatcaattcaatatcatagccgcctgtttcccctcccccgcaaatgaaacatcttcctgcctatagcgttaatgatttttttccccaggagttgaaatagtacaattcggttgcagaaggtatatgagtctagggtggtggaggttgaagtatttggtgaaatctgcgatgacatctaggaatctgaatctgcgctggctggtggtgactggtgaaagcatccaggttagcagcaactggggtgtgtttcatttataggcaaacacagtaaatcttgagaaaggaatattctgctacagatctgcaaatgatcagggtgagaktgggaaggggtgaaaggaaggagcaaaaagacagtacttgtagactgaaacgatgtcatcttggaagggactttccctaatggaagtgaaaaagactgggggagagggaaggtttgttagttgaaagtttggaacctggaaattcttttatgtgattaattaatgtgtaagtgtgtagccactttgctcatgtatttggccataaggaagaatgagcctgtttcaacaatggctcgtgtttgttccatgtaaatggcaaagaaccaggtacttagcacagaagacaaatgaggaaaattgtagcttcctcacatatctgaaagagattttgaaatgaccctagagagtggacctgggaccgatagctaaaagtagaggaaatgttttgtttagtataaagaagcccatagttttggtgtttctgaacactgttctttaaagatgtgatgaccaatttaggacgacagtgaattttgtcactcaaagtgcttaagtatgggggtgggtggttgagaatttaatgatcagctagataggaaggttttaccgaacattagttctcagtgtctgctccgtggatgcccagggattcctgccattctttttgaggggatctgcaaggtcaaaactattttcctgataccgctaagatggtatttgcctccttgtgtaaacagctgtgctgattaagcaaaagcagcggtaggtaaaaacgctggtgcctcagcaagaaccaaggcagtgacaccaaactaagttgttgctgtaattcttcaccactatgctctcacagggggaaaaagtcatttcctttgatagagcaataaaaatgatctattctattaaaactcagctatttaatatgtgtctgaatcttctgtgtgatgaggtgggaagtaaacataaagtctactgcatggcaaagtatgtcgttattttgatgaaaaatacttgtgtgattatttaaattgtgaattgaacttgttttttttttttcattgaacaccatttctacctgaaaaccagactgcaaaccgtggttattcataccttgatatttgctagacattttcttgaacaaagtaagccagttacgtcaaggaaaaccactcagagtatttgttaccaaggataaagtctaagctctaaagcaaaaattagaatgttggaagtcttttatccaccagcataagcttgaaagtttcacctatacttaaatacttttttctgataggattacagatggtatttttaaagaattgactttatttttagtaatccaaaatgacatatcccagaatctgggagctctgtgtaaatcagtgaatcaataatttttaaatgaccattctcattgcaagatagaaaataaatttttatgtaacatagtacaaaaagtaaattgatatggttttcactaacttggtgtagtactaaagattatctacacttatctgaaaaagctattaaaatattcctcactttcccaactacctatctgtatgaagctagattcttttcctatacttcatccaaagcagcaaatcacattagattgaatgcaaaagcagatacagattccagctataagccagacaataaacagaacttcaaaaatgttaaacattgcgactcctctaatttaaagaaaaaaatcaaattatttttacattaatggacttttatgataattttgattgaatgaatacatatttgaaacacttcttggtttaatacctaatatggtaaatatcagtagctatacagatactcctcaacttatgatggrgttatgtcccagtaaacccattataagttgaaaatatctttaataaacagtgcatttaatacacctagcttatctatcaaatatcacagctttccctagccacccttagcctacagttggacaaaatcatgtcacaaaaagccgattttatataaagctaatataaaaattttgagtcaaaattcaaaatatgatttttactgaaagtctattgcttttcccaccccaacttactatggtttaaaaaaaartcataaatcaaaccatagtaagttgaggaccctctgtaatcctcaaaaactaaagctccttggcatcttctataatttttaggagagtaaagaatcttcggtctaaaatgcttgagaattgctatagttgatggcctgtgcttctttccatccctgagatttttatgattctatgatattatactaattcagtgcttgctgaaagtgtccacgcaaaggaatttctctcttccttgccaggcgtgccaacactcaggctttgctacgacagagagaggatttagagacgagaaacagacaggtgttgtccctgtcctcacagaacttccagtctctgtgtggaagatataaacccaaaattcacaaaaataaataaaattacagtggcggtatgctagagaggaaaagtagttggaagagggtctttcctcaagaaacagttcccccatgaagtgactgagcatgtatacgtaatgagcctttcagaccgaggaatccacacgtggaagggcactgtgggggatggaaagcactgttgttccrtgtcaccatgagagagggcttgtggctggcacacacgttcctggaaaagagtgaagctgaactgtggtccccttggtgttccatggcaagcatgttgccatttatcctttgcaagatatttaggaggttaatttttttgtctatgtcataacttctctaaacctgttctttatcttcattgttcctcaagttcatttcataataacttgatttcccttcctgatcttccgccatccccaagaacccccctcctctttattttccgtggctggttcatcattgttgaattttagttccttttcttctctccccttgtttgcattcctcacacattgactcttcagacctttttcttttcttttttctttttctttycttccttccttttcctttcctttctctttctctttctctctttctctctcttttcttttctttctttctctctctctctcacactctcactctctctcactctctcacccaggctggagtgcagtggcccaatctcggctcactgcaacctgcacctcccaggtccaagcatttcttgtgcctcagactcccgagtagctgggaatacaggcatctgccaccacgcccggctaattttttgtatttttagtagagacagggtttcgccatgttggccaggctgatatcgaactccagaactcaggcaatctgctcacctcgggctcccaaagtgctgagattacaggcgtgagccatgcccctggcccagacctttgacctttttcactctgtgtcatcctcttcaacctgaccttccttatttatgggcagtaacctcacttccaaatttagtaacaaagttgagatcatccacgtgaaagatctttctaatattcttttctgtatcaaaatcctctgtgtccttgttcttcccttccgttgttgttcccatttgtgaggataaaaatgtctactttcctacattttctgtctctgacctcttctctcacatctctgctggcttctcctcatcctccttcctgttcttcctcctcttgcctgtttcttgataggtgagcctcccccaggatctgtccttggctgacttctgtctttcctctgaagcttcctcctcagggttctcttcatgtctgacttaaggacagctgattcccaatggtatcttttgccctcgcagctctccgaatgttccaagttctctcaagcctcactgtcatgctaccattacttagtaccacaaaaggaacacctgtcacactgtttcatggcagtttattcttttgtctgcctcctgtttgggctgcctgaaggcaagagttgggatttgctagcccttgttttcccccttaccataatagtgagttgtggtccgcgagtgatacttatttgatgaattgaaagcaccaatttcaagcctgctttacattcctaacactttagagatctccccatctggacattccaactgggtaatttttcatttgctattgatttatayactattctggtgaagttaccttttccagagcactgtcggattgaataggagagggcattatttgaaaattggcacttgatgaaaacgatttttaaaaaatacaaactgtgctacaagaaatggtttaaggccaggcgcagaggctcatgcctgtaatcccagcacttcgggagctccaggaaggcggatcacttgaggctatcgagaccagcctggctaacatggcgaagccctgtctctactaaaactacaaaaattacctgggcatgcatggtggctggcacacacctgtaatcccagctacctaagtggctgaggcatgagaattgcttaaacctgggaggcagaggttgtagtgagccgagatcatatcactgcactacagcccgggcaacagagtgacagagtgagaccctgtcgaaagaaggaaagagagagagagagagagggagggagggagggagggaagaaagaaagagaaaaagaaaacaaaaacaggtttagctcttggactagtccacaaatgactattttaaaccttgcatcaaaaaaaaaaattgaaaacaaaactgtagctgtactacgttatagttgtgggggtatttacttaaataatgaatattcactgcatgtctgtaatttgttggggtgtttacaaactatgaggggaattctaagatgcgtcaaaagctttagggattggcttatgtgtttctttaagatgattaatgtttcaaaatgcatggattcaggtgtaccactaccatctttgtgcatgtcaatcatcgctgtggttgtagaatgaaaagggatatgtttttgaagtaatcggttgaagggggaaaatgaaggggattcatactgtatatctaggctgaggcaggcaaacagcttgagcccaggagtttgagaccagcctgggcaacatggcaaaaccccgtctctacaaaaaaaacaaaacttagctggagggtagtcccaacttcttgagaggctgaggtgggaggacctattgagcccaagaggtcaaggctgcagtaagctgagatcgcgccactgcacttcagcctgggtgacacggtgagaccctgtctccaaaaaaaaaaaaaaaaagagaaggataaggaaggcttcatttggccatattcctccaaaagtaacataggttaaaaaaagagtgtatacttattagagtgtatactttctcatataaatgcacatgtgtatatatgcatacaaacacacacatacagatttgatcttcattatttgcagattctatatttgctaacttgcctagtgtcagttaactccaaaactgacacacatggggcttttrtagttatttgcagacatgtactgagtggtgaaaaatttgagtctcccaacacacatacatgttcttactgaaatcgaacaaggcaatgttctgcctttttgtttcagctctcgtgcagtaaggcatcccttttgcagtccatttagtaccatgttttttgcactgttgtgcttttgttagtgattttggagtctaagagggccccaagcacagtgttaaagtgctggctagtgtttctgagcacaagacggctgtgatgtacctgatggggaaaaatctgtgtgctggacaagctttgttgaggcgtgagctatggtgctgctggccttgagtattaatgaatcaacagaatatattaaatgtctttaaacatcaaacaatgttacatattggtgagtcaatgaaaatgttgtgaccccagaggctcacaggagccctatattttttctagaagtaatagttcagtatatgctgattcagtgcccagtccataaatagcaagaattgaccgtgtgtgtgtacacatgtatgtatatatttgtgcacatgtgtatatgagagtgagagggccagagattacctgaggtggagttaactaagccccagagagaaaaagagaaactatgtacccatagttgtggataacaagaaaggagtttatggggcatagataaagtgacagttcccttgacttgccaaaaagtttactgtcagcccagggcagctttatttctttctgaagtgagcagaaatggtctaatagagtacaaggtataaaggactgtgcaattagtaattcatatgtgctgaatagtttggggagtgcctctagagtactagtagaaagtcactttgttctgaagacattgatgaatttcatccttctcttgtatctttaattattactctgatttactttagccatctttttgcgcttacagctgccttttgatttgtttttgtgttgtttaagacccagggaaatttactgtgtccatggagtaggattctggtcattcaaccccacgttgagtctattcaacagctagattgagtgtatattaasgtgtctaaacaaaatcaaactaagaaacctaattatgtcaccaaactgtagcaagctggattttttttttttatatgaggttttgggtatagaaaggggttaggctyggagatagttgactaaccaactgctctggtagaaactctttcctttaagacaataaagargttatagggattggagacctttatgtgttatactttggtggggacttgtgtgtcttaaaacaacccttgccttgtctgtattcttagctttaatgttcttttagaatattacctgagtctctcatttgccagaaagatgggtattgtcatttttaaaartctgtcttgtaatatggctttacatggtcttatgatattatttatgaggctgactctcataggtaactgacgaatgaagtagtatttgctcaagtagtaaaattcttgagcaaagccacaattaactggagataaaagtaagattactgtgcaattgaaattctagaagaagagttttaattttttgagtagcttgggatatttgcagtgaaatgtacctccgttacttctttgtattcttttgacgcatcacattccaaatgcaaaatttatgaaactgtcagaggatcagcttctctggcagatctctcatcaattcttctctcgttaaaagaaacttcttttgagacacgtctttgttagttaatcctatcaactgaaaacctgcatctcaaaacaatcagtaaatacaaagcagaacctagctttgtttaggtrgtatctatcaattctcttgaaatttatcaggctgtagcttctatagcasttctcggctgagctgctcgtctatttaaacaaaaataataytgaaagaatattaacttctgaagacgactcagaaatcataatatagtggtctattcttaatgcatgaagaaaatgtgatattttggctcttttaatacacctttgtgagttgtaaaataataaagacaggactacaaataaaaataatccaaatactctataaaataaagacagatttgtgcttcttgaagtctataaaatctcctaccctatattaatattaaaatgtacaggatcttctctcataaggaaacacatttagaatgacaaatttttagtttgcgattataaagggtaacagaagacacttaagaagaaaataagcatggagtcatttttgtatcaaaaagaaaatccaggccaggcgcagtggctcaygcctgtaatcccagcagtttgggaggccgagatgggtggatcacctgaggtcaggagttcaagattagcctggccaacatggtgaaaccctgtctctactaaaaatacaaaaaatgagccaggcgtggtggcaggtgcctgtaatcccagctacttaggaggctgaggcaggagaatggcttgaacccgggaggcgcaggttgtagtgagcagatgtggcgccattgtactcccacctgggtgacggagcaagaccccatctcaaaaaaaaaaaaaaaaaaaaaaaaagaaaaagaaaatccagcaaaaggatcaaaaccttttatttttgttccatgacttaaatcatttaattatattttcccccaagtacaaaaatcaataaacaatgatttccatagttaaataaatactttttttctttaaaaatgttatgaaacctttagtatcaaattacttccaaattcaacttgacttctgaataagaaatactactttataaaatgaaatgcctgtgttctagaaagtattatagacaggcaaaataacaaaggaaaactattgttttaaagcatgcttgaatgaataaacatttctcagatcactaatggtcaataacattatttggaagatttggggataatctggtttgcattaaacatatttacactttattttatttatttatttatttatttatttatttatttatttragacaagagtcttgctctgtcacccaggctggagttcagtggtgcaatctaggctcactgcaacctcctcctcccaggttcaggtgattctcctgcctcagcctctcaagtagctgggattacaggcacctgccaccatgccccgctaatttttgtatttttagtagagatggggtttcaccatgttggccaagccagtcctcaaactcctgacctcaggtgatccgcccgccttggcctcccaaagtgctgggattacaggcatgagccaccacacccggccatatttacactttaaaatgcctcatgaattaagtcaagctttactatatacagatgctaagaaacatgaaaatatatagcgtttcgctgtattcagatcagcaaatttatcaagataattagattattatctaagggattcagttggccagactttgaaaaactatttggtttttgtttttctagagagcacagtcagacgaactcgaaaaaatagaaaagcatggccgatcttccaaagacaaggaaaatgccaagtctctggacaaacctgaacagtaagcatgtcttataaccacgtagagggcgtccaggctatgggtgggcccgttttgtttggaaaatgcaaatgcggtgtcttcagtgcatacttgttgtgaatgagatgaggataaacatctgtttatgtgaattatatttttcttcttaacttggctttatttccttaggttcctttatgaactgtcactaatccccaacttttcagagcgagtcttttgcatcctgttccagtccacattttcagaaagcatttgctcaattcrtcgcaaactggaattactacagaaattgtgtgaggtgagttctggtccaaagagagctgaacttgagtctcatttaattgtgctcagccatgttcttatttcagaaaagcattcttttatttactctaagtactcaccaaatttgaaggatcgcagtcccacagaagggaacattttatgattgacyttcaagatcaaagtaaatgttccggcgggcscccagggctacaggaccacattgctagaatgtggccaatacatgttggcctccagagatttctctgccctctccttttgccaaaacaaaatcttcagttttcacggtcctctcagacatcagacttccaaaggaatgtaatttgaaggcttttttttttactttctttcgttatctggaaggacctctccacaaaytgttaataattattccagccaaataatttaggaacagccatatgactcaacagaagacaaatattcttccgaaaacaaaaaataaatgcttggcagaaacgaccaatgttaacatttaaaacaatttgtcaaatatcagtartaccatttgttctagttgcggtaaatcattttgaaaagtgaaaagatgtttttaaaggctcacattttcagaagaagtgacatgcaaagtcaagttaaacacagtgttttgaaagaaatgagtgtgagctctttgggggtaaacctaaatttaraaattaatctctgaatctgctttttggtttcctctgctgatgccaaacattggtattgttccagacgtaggcaccattaagacaatggcagtgatattagtgatgttattttgtaatagttctcatttggccttatctaatagttatcatatagcctttgttcccatatagccttaatagttctcacacagccttgttttccttgcagttacatcacagaaatggcctaacatagcatcccccagcttacaaaggcawacctgaatgtttgtgggtggtgcaacttttactaactttcaggatactgctcttaaaatatacctaataattaggaatgataaagttcggttgtgacccaaaactcctaatataatataaatagctggcatcaactcgatgattcaaacaaaacctggtataagataaaagttgttttttgttgttattctgttttacagacattaaaaaatggcccaggggttatgcaggttctaggtttggttcttgcctttggcaactacatgaatggaggaaataagactcgaggacaggcagatggctttggattagacattcttccaaaactgaaagatgtcaagagcagtgtaagtattttgcatgagtggacgtaagcacattgaggagtcaaggttttgtttagtaatgggtttgaatgtaaagcagttgtaaaaaatatttatgttcctaggtcaaatgcttctttatgttctgagctagaaaaaagtaatgtccatcagatatttgtgattttgtgattaatgtttcctaaagtgaataattttcattcttatgtctaatgtataattacaactttttaatataaaaacaatacaaaataactttttatattgttttaatataaaacaataatttcttttaccatatctttcccatgtctgctaatatttatccttttggaatctgaaggctaattattttctatgaattagacagtatatctttttttctttgtcatgttaagcaatgraggccaataggtccatattttgaaaataacacaatgatgagtaaaatggcttgtaaacaaaatataaaaggtgattctactctgctgcatatgattttctccttgatactggtgtgtagggggatgtctaagctctcttgcagacctaatcattttttggtactacttctgcagttgtgtttgtttgaaattaatgtctaagcaattgtgagagtgccagtagaaatatgaggttaggaatgatggttagagtcacagactcaagtctgagacggtaaacttaaaaaataaaagagttacatttctctgataaaaaaatcatcacacaaaaaagtaggataaaggaaattctggacatgtttttgaaatattaagtttaataattggcttgtagaaataaaaatatgtaggactgtccttcctagataatgaaataatttccttcatgggggagagagagacttttaaaaatcttttctgccagccaacaatttgtttattgttttatatacagatgcttctcaacataaaatggagttatggcctgataaacccatcctaagttgaaaataccataagtgaaaagtcattcaatacatctaacctagtaaacatcaaagcttagcctagcctgcctcaaacatgctcagaacacttacctcagcctacagttgggcaaatcrtctaacacaaagcctattttataataaagtgctgaatatctcatgtaatttattgaatactgtgctgcaagtgraaaacagaatggttgtatgggtactcgcagtacagtttctactgaatgcgtatcacttttgtaccattgtaaagtcaaaaaattgtaagatgaagcatcgggagtcggagactgtgtctctgtgtacgtgtgtgtgtgttgtcaaattaatacagatattcatgcaatattctttcattgagcatctatggaatgtggacactgctcttccaaaatcgaataattcatagtccttccttggtacaccagcagcatatgatttttttatttttataattgttcaaatgctcatgtgtatgatacacattttcatagaagtatctactatagagagctgataaattacatttgttaaaaaaaaaatgctgaagccgagtgcaatagcatgagcccgtaatcccagctacttgggaggacttttcaaggccaacctgggcaatacagtgagagcccttctcaaaaaaaaaaaraaagaaaagcccttttcttaacctatggtaattcttcaatactcagcaactgcttgttggagtgaaacaacttttgcaaataacattgaaatctatagcatcaatatcatatttaaattatagaaatgaactggaaatagattctrgtgatcatatataaataagagattatttgtgggacttttttggtatcagtttatatatcttattcaatcctctgttaggttaaatttcattaatttaaataatcaagaggtaatctaaaataaaaatttaaatatgtaatcaagaaatacgtttttaaaatagtttcacttgtactcagaagagctatacaaagtcttcctgaattggttctttctctgtaaaacaaatgtaactatatttattccttagtactatttatagacctccatggacagagctgttactttgatcacttagaattttctctcagcatgcctagttttgttaattgattcaggtgctgccaaccgtttcattgaattacaagttgggagagagaaaggaagtcaagttgcttaaatcattttacaagcaaatcctgtctaatgagggatatctctaatagctacattactgactcatgtcaaacttgattataaagaggttttgctctttttamaaatatagaaaaaatcgtggttatattaaacattccagagaatgtagtttgtatcatagggtttgtttttaaagtaaaatatatacttgagctctcaaattcagattatctactactactttggaacaatacaaaaaaagagtaaaataaaaattaatgcgcctaaataaaccagaaaggaggtgaaaaggtatttttgaagtgtgttagatatgaaacaattttacctttttttaaatagaaatatccacattgtcttatttataaccacatgagtgttaactcctcaaatctcaattgctgatataacaaattataatattggaattgttaaaagctcccctttacttagtattggaatggttaaaagctcygctttacttaaaatgatacttagcttttttatttccctaatctatatgctaatgagcctcaatcaaacttactgttggagtggtatctgttagtccagctatatatcaatgctaaattatttcttttaatatagtagttttaaaacataaaaaattatcaaacaaaaacaataaaaacacaaaataataaaatatacaagacatgagctaaatttctaattgaggggggtaacarttggaaagtatttacagttcagactttgcccctaaatagctgtgctaagattggaacactggggagaaaaatcttttaagccaccaaactccttagacacaatggccaagacaatccaaaatgtaaaatttcacatttcattccaaatgttctcatgtatatacatgaattcactagaatcttttttggtaacactttatatttaattagttaaaaaatatattgtcactgactttggtctttctgcctaggacaatagcagaagccttttgtcatatattgtttcgtattatctccgaaattttgatgaggtaagacaatttttacatatagtcatattccattattctttattcgttggatgatttggcagtactttttgttgttgtttttgttttggacatacctgctattattcttttttatattgataaccaatttctttaaatatgatggggttttttgttcattaggatgctggaaaagaacagtgcctctttccactgccagaaccccaggacctttttcaggcctcacagatgaagtttgaagattttcaaaaagatctcagaaaactgaagaaagacttgaaaggtaacttaaaatcctgaactcatgttttctgtttatgcttttttaatgagagaaggcagacttttcaatgtttttagagaaaagtaatcttttttatctttatagaactaaatttgtgtgtgtgtggcgaaagaacaattttgcctatattcttattctttggttgtttaaaaagttatgtgtatcaaaaatttggttattaagtaatatcttggttatttcaattaacaatctgtcttgtcaggaataagtttacattttgttttcattttataaccaagaacattttggtattggtcatgtcatggttggatacaaattatgtcattgttgtaatagaagataaatagtccttccccattttcccttggtgtacttgcccaggattttctggcttatgaactttcctgggaacaaaataycttctacttaaaaaccacatacatgtatattgttttattaccagtcaagctttacataaaattattttgaagaataataggccgaaatttttcaaatttctaaattaaaagtagcatttacaaaaaagcaaatagtttgcagatttttttatkttgtaagtaaaattcctgctatccccttttcttgatattcttattgagttgcgaacacctcagctgtctatttcagcttctttcttgctgtattacatacagatgagaagtaaatacatttacccgagcttttgatttgataytgtgttactatatgagaagaaaaggcctggttacccctgtccagaaaccaaaaagatagaactttttaagagactcccaattttgagatgtgtttatccaaagatactgatctgtaatcaaattcatagagttgttatattctagttacaggtgttttaaaatggatttcagtgagcatagggacattatgtagtgtggttatagttcttatgtattcaacaacatttattacggacctggttcatggcagacagttgctaggtgctgtggatccacaaaggttacagtaaccgctgttraagagggctgaaattctgtcattacatgtaccctgttggagccttacaagttggtgctcattgactgaggccaagaaagactgccttgacttgctctgtttttcatacaataataataaataaaactatgttacatttgtataatattgtggtactgtgtattttaagctaagaatgaattcttaaagcaacaaaaaaacccactcatgctatagtattatacttcaacctgatgacaggcatcttggtttgcttatgaaatttacacacactatgatgtgtaaatgctagaggcatttctaggggatctggaaaatacttcccacttcaatcaatagttcagtcttgtaaagtaggatttcatagtttacaggtgatttgataaaggagcggaatgggtgaccctattatcaggatatcaggatttatgtttgctttctggagttgcatcacttcggaatgtgatcccattttcttatgataaatacacaacttcttactataggcattaaacatacatgtaattatgaaaatggcaagttcttgcaagacttggagctaaaaagaaagacctagctaacaccagatagtgggtttgaaaaggacaagcagccggccaggcatggtggctcacacctgtaatcccagcactttgggaggccgagacaggcagatcacctgaggtcaggagttcgagaccagcctgaccaatatgaagaaaccccatctctactamaaatacaaaattagccaggcatggtggcacatatctgtaatcccagctacttgggagcctgaggcaggagaatcacttgaacctgggaggcagaggttgcagtgagccaagattgtgctattgcactccagcctgagcaacaagagcgaaactccatctcaaaaataaataaataaataagtaaaawtaaagaaagaaaaagacaarcagccagcgcctctgaatactatttccgcatctgcatttgccacctacaagtgctaggtgcctacatttggtagcacagaagattagatattgaaggagcatcttagcaatttttgagtacctcagagtttaaagagaggattttaaccctgaaggtttacactttatgtcagggaaagatgaacttatttttcagatatcatcagacctgtgcccttggccaacaatgatcacatttgtctggcacagtattttccccaatctgaacacagcctgttacaatttgatagaattgttgaaatggggagtttcatgaccaaatgaatgttaagttaaagttaaaaggacttcatggtattctccaaaaaaaaaaaaaaaaaaaaaaaaaaargggtggttgcaattgttttcccatttattacagagaacttttttcacagaatctctggtgtgttctgtagtcactgaaacatattttgagaaatgcaaggctggtgtactgtgttagtaacagaagaatggcatttacctttgaggagcttacagggaaggttggagaaatgatgctatagttgatgaaataatgtaattatatattactcttcttaaaaaatggaatcagcttgaagagctatttacaaagctgtcaaactctgaggattaaaaactgacaaatcataatttacctcattttttttttgcttttctcaatttggggttttccatgaaaaacaagatgttttatgacttgaggaaggaaatcttatggactgaaatataaattcagttactgggaaaaaaagatatacccaaatgtagaatttcgtatcaacaacrcatgaaatctgcctcatgtcctttttaggaacgagagggatataaatagatatgtacgtctatctgactaaatgggagtcaaacggaaaattattggattatgttattttaggaacaattactttgaaataatgtctactttgatcaaagtagcctattaaaaattattccttttctttttttttttttttttttttttttaagacagtcttgctctgtcacccaggctggagtgcagtggcacaatctcggctcactgcagcctctgcctccccatctcctgggttcaagcaattctcttgcctcagcctcctgagtagctgggattacaggcacatgccaccacttccagctaattttttgtatttctagtagagacagggttttgccatgttggccaggctggtctcgaactcctgacaaaaatgattccttctaagtgatcaagtgagggaattcatttaagaagattcatatggccacattttgtttcccagaggcaagttgttataacaaggtttagaaaataggataacgtatagaaagcatttatctcaatacctttcatacaataaatatccaataaatcttggccattcataataaggtaaacatagaataagcagtgggattagtttgataaagacagttaagcaataatcatagtagctcatctgctggctctagcacttctgtttctgcttagagacttgatttttatttctaaggaaaggctgaaaaataatgtgttatggctcagacattttaatgagacgactgaatctcattttagcattttataataacatccactgtgtttagtttctctgctcactcccaagatttccatatttcctcagggtgcttccctggctttctgagctcagcgacttgtagttcgttaagcaacctgatctgcttttgatctcttctggctgtcagcagcttttcttgatgtagtcatgccaaatgatgactctgttccagtgcctttcttgaataggaattgtagcatttgccacatgacttaaatcaactcaacatgcacggagcattgagtaattaagttaccggaactggatgagaatgttctcatgcaaattcttctctgtatcctctttctttctgttcttcctccctgtactcacacactctctctcttttcaatatctgagttgaaaacaagtttaaaattcatyaactataccttcaagttgaagcaatgtccattttccagagatttataggaaaaaccagccctcaaactagtttagggtttattttggcttacaactactagtttgtaactattacatttaaattgttcatttctgatatttccttttttccccttatgtttgaggacaggaaacaaataagcttttttaaaaataacattttacagtggtccttcccacctatccaaggttttactttccttggtttcagttacccacagtcaaccttgatccaaaaatattaagtggaaaatttcaaaaataaacaattcatatgttttatgctgggcactgttctgagtggtatgatgaaacctcctgccgtctaccttcatcccttccggcacgtggatcctcacttagttcagcgtattcatgctgtatatactgcccacctgttcatcacttaggacagtggtccccagctttttggcaatagggaccagtttcatggaagacagtttttccgtggacaagccagtgggggatggtttcaggatgattcgagggcattacatttattgtgcgctttacttctattataattacattgtaatatataatgaagtaattaaacaactcatcataatgaagaatcagtggaagccctaaacttgtttttctgcaactagagagtcccatctgggggtgatgggagacagtgacagatcatcagacattagattctcctaaggagcattcaaccgagatcctgcacatgcgcagttcacggtagggtcctggctcctatgagagtctaatgctgcagctgatctgacaggaggcggagctcaggcggtaatgcttgcgatgaggagcggctataaatacagatgaagctttgcttgcttgctggccactcacctcctgctgggtgtcccggctcctaacaggccgcagaccagcacccatctgtggcccaggggttgaggacccctgacttaggagccatcttggttatcagatcaacagatcacaaaaagggtgagtatagtatgataagatgttttgagacagagagaccatattcacagaacttttacagtatattgttataattgttctattttattatttttttttaatctcttactgtgcctagtttataaattaagctatagcataggtatgtgtatataggaaaaagcatagtatatataggtttcagtaccatctgctgctccaagcatccactggggatctaggaaggtattctccatggataagggaacactactgttttatgatttttaaaaaaaatttaaaaaaaatttattgaggtaaaatatacatacaaaatttaccatctttaccatttttaagttatattttaaaattaatatctgtttagcataggaactttagacaaccttgaaaaatgtagagaagaaaacatttgtatttccacagttccatgataaataatgtttatcttttgttctatctggtaggtaggtgtttattgmatgtgcatacatacatgaattatgcaactgggattatgatgcacataatttttgcaatttttgtccactcagtttctggtctatactaggataatttaattttatttatttacatatatattctattaatattttctttctggttgtctatttgataaatttttaaatatctcttcctaacacctccaataacatttaagaagatgtacatagtattcctgttaatttactgggtaatcctaaatgctaacatattttgtatactatacaattttataacatgctataaatttatgtagtatatttattcttctaaataagatgaatgttttagaacattctaactaacaattgaactccttctactttcttttcagtttttttccagactttgggtactgtcatttttcttaaaaacattactgctgtttaataattattaggtaataacatttatgaatatatttaaataattactgtgctatcattgttgcatcttatattcctcccccctccacatttgatgttctttcagtgtgagtgaatgggtgttaaactcttagtccgggccgggtgcagtggctcacacctgtaatcccagcactttgggaggccgaggcaggtggattgcttgaggtcaggagttcaagaccagcctgaccaacatggtgaaaccccatctctactaaaaatataaaaatgaaccgggcatggtggtgggcgcctgtaatcccagctactcgggaggctgaggcaggagaattgcttgaacctggaaggcagagtttgcagtgagtgaagattgtaccactgcactccagcctggatgacagagcgagactccatctcaaactgaaaaaaattgttcccccttgttttggaatgatagtttcaccagaaatagagttctagactgactgacttttcatcagtattttgaagatatttttgttttcttctggtacctcttattttcaataattttcattcttttgtagataagctgtcttatctctgatgacttgtataattttctcattgtccttattcatttttggctttccttggataagtatggtatgaatatattcttttaaaattttttgtattgctctgtacttagaacttcctattaaaatactgatggcttccttaatgtgtagaaaaatttctcagccactgtctgcccaagtattacttcacttttctcttttttcctgaaactccttttagatgtacattggtctaatccctgttagccccttaatctaatccccatgtctctaacatctctttcatgtgtttaaaatcaccttccaccttttgctattatcttcatgcattcctcaacattatcttctaattcattcattctctcttgactctgttaattctaatgtttatgttatcaatgcagtaaatcataataattcttgtttccaagatatctaatgtttttatcatattcattttccctctaatttcttattcttgttttggatatttatcttccttttatgtcattgatatttgtaaaaatatattaaagtccttttcagctgttgtttcatctgaaatgaattcatcttccactcagtgattttataagttgtccttcagagtcactagtttcctatgtggtgttagaatgatgatttttataaaggtgtcaagttcacagttacagattgaactgctcgttctattctttacccccttctcactactgcacttgactagtctttaaaaaaaaaaaagtcaggaaattatggcctatgggctaaacctgtcctcttttgtaaataaaattcagttggaacacagccacgcccaatcatatacacattagctatgactgtgtttgtgttacaactgcagagttgaagaattgtgatagagaccttctatcagtgaatgtgtccctccctgactcccttcttctgacccccaaaatcattcactgtcttttgattttttttcaattgctttaacttggcctgcctttggtacccaagtcacaatcaaagcttctagcagcagcatagagctcctgccctgtgggcatattaggtttattgtagatccagtctccacrctagtgaatgacttggctggggtctgggctgggaagctgtggctacttactcttgctgccccaggcatagagttgcatgtgggctacagccctaggaagcagtgaattgtaggtgttttcatcctctttgcatgagtttgggagaccagttaccactctgggtttccagtagagagactggttcctttccctcctgtctgttctctcccatccccagtcctcacataagccaagatctttatctattcctccacgatcatagttcgatgacttctacttcygccctgtttattaactttggcttctctactatttctggtccaaggagatatttacattttttaaaagcatactatgtctgcttagtttcctctttatatgttaccgttcactgctctgtgttttcaacagagggaaagctcaggctataaattgattataagttctgtttgactggaattctgtattcacttttatatcttacgtttttcctcactgaaaattatagcagaaacatttttccatactatttcatatacttcaaaaactgcttaggatggtttcataattcgtctcatgaatgtgctgtagtttagtgagtaatttgattcttgtaggaaattagactcctcccagttttcactgctcttaagtatatcatgttgagcattcttatttatagcccttttaaaagttgtatctctggttgtttccataatatagattcagatttataattactggatcaaaggtaatgaacattttttcaagttctcgatattaccaaatgttataaaaatactttctagaggaaaactgatgaattttatgggtgagttgtttcttaaagtaaaacagaataataaaatttatgaaatttagattagtaaagaatcttagagacattgtggtctcataccttaatcatttaacaaatgtttattaaattaacagaaaataaaaagtagattctttcctcatagctcatagactaaaaagaggactgttgatgatatgaataaccactatacagtatacaattttttttcattatatggaaacacagaagtagtagttattaggtatacttggaaaattatatttaaattggacttcgaaagatctgtaaaattctcccaagaggaaaaaaaaaatagtatttcaagcatgggaaagagcatgagcaaagttacctatcctgtgaccatttggactttgattatttactggttcctgatcccagaagtctctcaattcatatcaggtatatatctaacagatataaaatattcaaacctgagatggggctcattgcagtggaattcacaaccagggtgaagactgtgcgcatatgtggtttgaaaaagcctcccagccagtaattctgatatgtctttcaaagtagcttgctatgactactctgtgtcactgttttacatgcattagctcatttaatccctatgccatagataggatcattaatcctctctttagtgattgcataactgcaagttagagatagtaaatgctctacaaaaagtcacatagtgcaagctgaggctggatctgggcctgaggaagctgatccagagctcacccttttaaccccaacacaaacaccgcctccttttggggttcactgcgcagaacccttcagggaaggttgataagccgaacatacagatataattgcactgaagtatagtaacaaccgtgataaaataggagcagggagcagagtggaaagtgagcctgattctatctaattggttagaacaggcttgagttaggtagtaccatgagaactgagccatgaatataaatactttaccaggtgaacaaatttatgcaagaaaatttgaatagatgagccaccaagttcaatgagatgaaattaatgcatcttggaatttgcagcaatctgacatgattcaaatactggctgagtacagagaagtagaaagcaataaagacatagacgtacgtagtgagcagatcaatctcacatagacaggcaggaagattctgagtggacaaggggtgtgtgtttgattgggtcggcggggagtatttggaaggaaatggaggaggagagagagaggcatttcaggtagaggaaatgtcccaatgccccagcattcttagaacacagtgaccatgagatgatagaaaatgttttctgattatagaaactcaacaaacttctatactttataaggaattttcattttactctaaatgcaatatccagccattgaaatagtctattcagggaaatggagtgayatgatttatgtcttgaaagtactgctctggcaagaggagaatttgtgagaccagtttggaaacaattgtgattttgacaaaggagggagacagaggagctgggaagagctaaacaaatctttctatttttagggacagtcagtgttctagatagtaactgtttagaattttctgtaatctatgtataaatgcttcttaataaaattgtgtcattccatgatttccttcaagtcaatagtatgtaggttactgtgatgttttgctgtttgagatgtctgcatttctttccagaagctttgaaagaaacattttcatttgtgatttttttcccaaagttgataagcctcaagtatttctctttctcctcactccttcctccacactaacatgtatgtgtactctatttaaatcaacatttttcagtattctttgacttttttaaactattagtctcaaaatatacattactttcagtggtgattttgccattggacaggagaattaatgagaagaaaatttttcaaatcattcaagtcattagtcgttgaattctaagatttgatgccatttatatatattagaaaaaataacaaaattgtattttctcctttttactgattgcctgctgttctgacccagctgtctggtgaaaactgcagctaattaaaggtgattacttccctgtcattttgagttaaagtacattttattttataaattatctgtgattgtgttacagtgtgtactttgcatactttgcacaaatgtttgcttttaaagcaatagtcaacttagtttaatgcaaagccatgagattctgtttctttcagggacctggtataaacaaattatcacataaaaacatggtctacacatatgtgatacaagtttaccatgagattatagtcatttacaatagttttcatgagaatgtttcattctcataactgagtcatttctttttccatttttaattggcaaactgctcattcttctagatgattcagctaaaatgaatatacttagctaaaataattcttcttcarcaaggctgtctgatgaacttgccctacaggagaaccttgacaaagattcactgatagccacataaacagtgatttgcagcagtgcctgacaacatgttaaatatgagagtgtaaatgtcaataacttttcaaatcatgctgagaatttcatcttggtcagtatgtctggtgattggtattctttttaaaactgttaaaagtcagagaatgtgaaatattggcaaagatgtagattggtgagaacgcttttacactgatgatagaaatgaaaattgattcgatcccatgagaaaccatctggcaatatctttttttgttgtttttgtttttgagacagagtcttgctctgtcgcccaggctggagtgcagtggcctgatctcgactcactgcaacctctgcctcctgggttgaagcaattctcttgtcttatcctcccaagtagctgggattacaggtgctgattacagcatgcaccaccatgaccggctaatttttgtatttttagtagagacagggtttcgctgtgttggccaggctggactcgaactcctggcctcaagtgatccacctgcctcggcctcccaaagtgctgggattacaggcgtgagccaccacacctggctatggcactgtcttattaagtcaaaaatgtctatactctgacccagcacttggcccctagatatatactccagtgcacaggtgaccaggtgaaataaaaatggcattcatattgatagcaacagcaccaaaaccctcagatatttttcaacaaaataatagctgagtgaattatggtatcttctttcaaaggacatcggttgaactgtcaaactgattgaactgtatttacctgcattaaaaatgggtaaatcttattaacacaagcttgaggaaaagcaagttgtaggaaaaatatgaacagtatgatttcagtttttaaagttcaaatatatagacaagtacagtagtctccccttatctgtggggagtaagacccccaatgaatgcctcaagccacggatagtaccaaactctatatgtactatgtttttcttatgcatacatacctatgataaaacttaatttataaattaggttcagtaagaaattaataataataataaaaataattataacaatatactgtaataacagttatacaaatgttgtatacaaatattatttgtatacaaaagttatacaaatgtggtatctctctctctctccctcttaaaatgcggtaatattttccgactgtgcttaaccattggtaactgaaaccacaggaagcgaacccatggataagggagggcaacttcacttgtttagggatagccgggggatgagaaacacaaagttaaaggttgtagttacctctgggcctgagagagggacagagagaaacacactgaatttttccaaagcattggctatgttctgcttcttaaactggaaatgtagtaggtgaatattcatttagtctttacatgtaacgtacatgttatgtatgctccgtagtacttctttaataatcgtatacaagaggaaagaaaaataggcaaccagtcaggaatatgtttgaatttgagttgatatttagtcccacaaatttaaaatatgtgactgctcagcctttcctatactttatgaagaaattatataacagcatattcaaaaataagcatcattaaagaacataagaaatttaaagaacaaactatgtttaagactttatatatttgcgcatgatggtgctaataatataaaacttatttgggaaaaacaatctgagaaactggcatattttatggtcaacaattcaaacagatattatgtataagcaattaataaattagaaataatttccagtgtcagaaagctgttgagtacttagagaaacataacccattaattttggttactgcttctactatttctgtgtgaagttggggaaacaaaaaccacatttactattttaatagcagtaatttaacatagagaatgaagttaaacacacgttgaaggatgttaaatgcagaaagaggatgctgaggaaaatgtggaaagcgtataccatccgtacggccaggggaataaagtgaaaatgttggggttagcaaagaatcatgtaactacctgaaaactacagctggacgttccactgacatctgaaacctagtgagttcaaaaccaaatgcattttcattcctctgaaacctactcttcttcctccatctccatctcaaagccacccagactctatatccattcggaatcctctgttctcctcccgacagcactcatcaacgcacattagaatctccatgtgagctttctatgagccttgtcgtggagattacttttcttttttactttatatcttggggttttcttcaacttttattttagaatcgggggtacatgtgcctttttgttacaaagatgctaaggtttggggtaggaatgatcccctcactcaggtagtaagcatagtacccaacaggtagtttttcagctctttccccctctgtctctccccactctaatagaccccagcgttgatcgcgctcatctttatgtctgtgtatacccaatgtttagctcccacttgtaagtgagaacatgtggtatttggttttctgtttctgcattagttcatttaggataatggcctctagctgcatccatgttgttgcaaaggacatgattttgttctgtttcatggctgcatagtattccatggtgtatatgtaccatattttctttattcattccactgttgatgggcaggcaccctggttgcttccatgtttttgctattctgactagcacaacaatgaacatacaaatgcatgtgttcttttggtagaacaatttattttcctttgggcatatatacgcagtaattggattgctggatcgaatgctagttcaactcttagttgtttaagaagtcttcaagctactctccacagtggctggactaatttacatcctcatcaacaatgtatwagcatttcatttcctctacagccttgccagtatakgttgttttttttactttktttttttttttggagatagagtctcactctgtcacccaggctagagtgcaatggcatggtctcggctcactgcaacctctgcctcccgggttcaagtgattctcgtgactcagcctctcaaatagctgggattacaggcacccgccaccatgcccagctaatattttgtatttttagtagatacagggtttcgccatgttgaccaggttggtctcgaactcctgacctcaggttatccgcccaccttggcctcccaaagttctgggattacaggcatgagccaccgcgcccagcctattttttttttttttttgactttttaagaaaagccattctgactggcgtgagatggaaagagatcacttttcaaaatgacttaggttggagccctgtcaggtacattctgaaaagagtccccagttgattctgaagtttacrtcttcatgaaggagcactgaccttccgttcaattaccaagctctgcaaattttaccccctaaatatttcttgtgtctgtatcttcccttgtctgaatttaactctcgcttttgtcagtacatatacagtacttgtgaaaggtagtgaggccagacatcaatgtttttactgtttctatgttttttgtttgttttgttttgcttgtttgtttgcctcactacatggagtgactgggttttctcaaattattttcccagtgtccggtcactagctctgtggatattgagaggcagagttggtgcacagggcaatgactgatttgatggtgcagacttaacaagtaaggtttgagtctaaaaccaaaagtcgagcctgtggtacctaccacacagcataggtcctgactgtgccatatatagcatgcccctggtgggctgattttatagtttttgttctgggagtcatttttggagaccaagtgtagagcccaatgtctgtgcacttacacctactttgcaagcatcttgctgcctacattgatctgctttaagtggctacaatggtgtctgtttcctaaaactgaacccagaataatgtacaaaccaggcttacgtgggaaacagttggattttagaagaaagctttctgatctgattacagttatttcttttcctttgtatctgttaygtkacttccttcctacttgctgaggctggtttgtagatgccaatgaaactttctggaagctcacagaaaagcagcaactctaagctgtgattaacattgattgaacttgtagacttgtataaattattccaattccctactcaaaaaaaaaatagccagactcttcatgatcatggttcattccagggagtggcatgtcatgtccttgctttaatctgacagtgataaactggtgtttgccccacaacgtgccactctgtggatggcatggatgtattggaacccattgtctggtgggaatgtctgacatttttctttctttcctctggmtgggttattctttgtatttggaaacctaatgcatgctttctgatactagcccttcaacatgatataaaatctttttgactcagagaagtctttaaattaaacaaaagttgagatgattggaattactcggttatgccaacagtctcctaacaaatgttttttaatatttggatttgactgcaatgcaagttttccaggaactctatctttgttctgtttttaataatgtttctaaatgacccttcaagtttgtgagattgtagtgttcggtattttttttttttatttacatagtcacataccaattttgaggatgataagtaatagccaagatgatatgttgtgcaacttgatgtgctacagttaagagaagaatggtgtccagtcttctaaatatattccttatatataagcacattgagcatatttatatgtggcattgtgtatgtacaaaatatatgagagttatgaatgtagaaactctagaacgtgacattctatttttacatttatccaacaggctcttccttcttaatatagtgaataagtaaagcaacaattaccaagaaataactgtacaggttttatatcacactgagctttggaaatttggatgtgagttttggtggtttacctcagtgaccactggagacttaatatccctattaaggaaagccttggccttgattatgggcatcattgaaagcactttctttcatacagggtcttagtacttcctctgcatttcagacacttgacacacagaggtgaataggatagcccttggcttcaaggaatgcaaattataatcagaaacaaagatacacaaacaaatacattcaatgaaataatataattaacagcttttttatttttaaaagagttttctaacagccagcttagcactttaagttcaacttccagttgaggctgagataatttaagtagctagcccaagattacagagctaatagaagaactggacttgcatccagatccgtttaaccagtgctttgattctatcctatatcatttgtacrtgttctgtagaaaagggagatgcaaagttgaggggagattgaccctcttgtcttgaggtaacagttgaaccagactctggkaatggataagtagaagttcaaaactggtcattaagtggtgagagtatgtctggtgggtgaatagcatggggaagggttggagaaatgtgcataagcaagacattttgcagataaacaagaagctcactatgacaggaagatacaatgaaattatttattcattccacaaagaactgttgagtgcatattgcctgtgggagattattctaagtactggtaatacagcaaagtgagtaaatggagactgtctcataggagatgagagtagagaagaaatctatcctcaaaacaagcagacttgttctgtgactcattaaatacctgaactatcagtggtggacttttaaaaacatctttttactttgtaatggcacaagtatttgtgtgactatatccagcatattttaaagcaacctccagacatgtcattccgcagggggtgcactgtagagagatatttactcagtatacagttgggaattctaatattttgagctgcttagtaaggaaaaagctgcccagaagcaataagaatgcacatgacttgaaacacccagacactggacaggtgcgtttcatgaccttctagaaggaggactgtagatgaggtgaggctgccagtaaatgactttacagtttttctagagctgaaattctacatgtttcccagtgtgcacaggaaattctataaattagggggaaaaggtagaagaaatagaaaaaatagtttttgcatgcattgatgttacaaatacagttcatatgaatggcccaaggacatcgataaaattaagtgaaaattaatttaaaataaggaaaattattatagcatgcattttcttatctgttgaatgttctattgtttcaacattagagtaaaaatgaagacccagaggatggttgtcaccatgtagaagactttgtcacagccagtctgtgatctttctctacttccccagctaatgaagtcctcctttaagtcaccagacccagtagatgattctggaagtttctagtgttagcgtgttcatacaggatcctagaccccaagacactgtatgatgtcatgggtgtgtatgatgtcatggatgtgtatgatatcatggatgtgtatgatatcatggatgtgtatgatgtcatgaataaaaggacagttattacttctactttttaacttaaaaatggaaaatgaaataattgtgaccagtaatgaaaatattagccttccttgcctctggcttttaggttttgcaaatcagtcaaggtgagagattagatttttttttccctgctagcctacgttattaaacatgaggctaataggattttactttcctcattgggattgaaaagtcactacttgaagactgtaatgtagtagaagacaagctcgctgaggacaggggttttgtcagttctgttcgtggcagtcttcagcacctagagcagtcccttgaatcagtagatagttgatcgatatctgtgtcatgtgtacgttagaaactgctcagaggccggtagtaatctcagcactttgggaggccaaagcaggtggatcacctgaggtcaggagttcaagaacaccctggccaatgtgatgaaaccctctctctactaaaaatacaaaaattaacagggcgtggtggcaggcgcctgtaatcccagctactcgggaggccaaggcacaagaatcgcttgaaccgggagatggaggttgcagtgagtcaagatcgtgccactgcactccaggctgggcaacagagcaagactttgtctcaaaaaaaatttaaaaaaaacaaactgctcagagacttttgggaacactgtgtcacctgacgttgctagaaataacccactgaaatgataagggctgttaaatctcggcctcatttcttttaagtgatgtaacttgtcttccatatattcagtatccttacacagttttaggaaactctcaaatttatgacatgatttaagtatatccttaatatgcatctggaaacattgttaaagagcagaatttccagccacgtgaggctgtcgtaaatgatacagcccacaggaagttgactacggatgtcttgtcatctgacccatccctttctacatttctgacaagcagtcagctactttctgaataatcccagtgacaaagggctcaccccctcagaaggcaggttacgtcactgtaggagttctgtaaacactagccatccctgttaggtagaactaacatctctctctaacttctactcatkcaacttcctccttccttgagatcaacacagagaatgtcaacacccggtcattcatgagaccacacttcagctctttgaaaacagctactgtattttatcttacacttccttaggctgaactccacttggtcttataaaaacaatagcagcaatagctactgttttttgtgcatgtacttagccagcacaaagtcagtttcaggcattttacactcatagtggctgatcatcacactaacgttagagaattcattaaactcactaccatataatgcaactaagatccaaaaatgttaggtaattagccccaaatcgtaaggcacattcagtggatgggtgacctggaatttaaaccctgtctgctagattccaacatctagaatgttatttccacttaagtaactatttatacagcaactaacccatccaacagcaatttattgcctaagtcaggcacaaatggaaataagatggatttcctttcaagtagctcagtctagtggggcagaagacacatagttacaaataactttaatatagtgtggtagttgatattgaatcccacctcctcaacttgtgaactatagaaatgtgggcaatctctttgtagttcatttttcgctgatgtaaagtaagcatattaatcatctacttcaaagggttttatgaggattgaatgggacagtacaggtaacatgcttaatgtgctccctggcacataaaaagtactcagtacatgacagccttaactctgtatgcacaagatgccctggaatcaccaaagaaggacgcctcatcctgcttggagacaagtggcagggaatggagaaaagcaggccctgtggggaggtcagggaatgctgttcaggggcagttacatctggagattaacatttgcattgagtctgcagaagatatcaggactagagggagatggatggtttaaaagttggcaaggtctacattgtagcgagtgctacaaatcatggtgtaggctttgcaattcttcctgtattcagggtgtagctgagagggcagaggtcactgaacagtttcaggttaagcggttgggtctcttctggatggctttttaaggctgtgaggaggagcatggatctgtggaagactggagatgagaagccaagggtaagaggttttcacagtagcctcagtaggaaaaatgaaggcatttgtaccagcatagaacaggaatggagaggatagggccaactgaagaatggaggcaaaaacaacaggatgttggaataaagagagggggttgagaataagtctcctgttttggctcaagttatgtaggtcaggtggtggcaccaccaatgaagggagaataagggaggtggcaggtttagagaagtctgtgaggaattctgtactggtggaagtttcatatgttgagtctggagctatgaaatacatgggctatagatacaggttagaaattctccagcatccagcctgcaagaggctacctgggcacaggtgagggwtgagaagcagacgggcagagagaaccctggatctgcctacgctgatcttagattttactaagcccaaagtcatccacatttgctgggaaggatgtgcactaataatacagccttcctagattcccatgcttagataaactaatgacctggaagggaaaaaagaggacactgtagctttataaaagaaagaaaatatattagaaatgcaatgacaaagtctcctgggagaaatggcaaccttaccttaagaactgtagtgagaggttttggggatttttttgttgttgtcgttgttgtttttttttgcatcagatgtgttctatccaaagttttgtgtttaaatatgtacttttcattgttgaattacttccttactggctcyggtttcttgctattaccaaaatggcagacatttcttcagaatcttcttagaggtacttctcaatattaacccaaatggaatctgtagactacctaagacatttatgatgccacaggcatgaaaagaggataaactttggtgttagatcaggatttcagttatgaatttgctgcatattatctgtggactcttgggcaaattagtgccttatttgagccttaacttcctcagctataaaaggaggtaataagtctactttatgggcttcattctaaggattatgttaaataatggataaaatgcatctgacatgtaatagatgctctacaattattggatgctatactaacattaccacccatgttattatttattatttttcagaaatctggtctttaggaataaacttttattataagtcagttgatactgatgatgatggtgatgatgatagaaaatagttacatattgctttactctgtgccgggcattattctaacacttcacgtctcttcacagatctgatccttataactgcacagtgaggcaggctctgctatcatgcccattttacagatgaagagactgagatttagaggttatataacatgcccaactgattggtttgggaataatcaaactgagattataaattctgcataatttctttttacagccctctaaaaggaagccttgatcatcggcttctcatgtccgtatttggatgtttccaaaatgtgtgcagaacatatgctgattaggggagttaacagaattttctaacattagctaagatgttttcaaaattgccttaatgctccactaacagtgtgacactctaaataatgttctgtctaatttcagcctgtgaagttgaagcagggaaagtataccaggtctcctcaaaagagcatatgcagcctttcaaggaaaacatggaacaatttattattcaaggtaaattccaaagagatgtgttatgtttttctcccctttcagcaaaaaaaaaaaaaaaaaaaaaaaaaaaaaaaaaaagctacaaggcattgtttaaaaaatacatattgctttaaaagggcttattttgacattacagaaaaacagattaagttgaattatgagtcacagggttgtaagaggctagcaatttgataaacatgctatttgtggataatgctcattattaatgtttgtttgcttgcatgacagtatatacactagatattagttaaaatagctcatcttttaaaagacattaacaattctgtgctttttgtgatagaaaattagatagtattattttacattttaattgtactgatgagctcatttcaacctggtatttatttggcttgtcaaaacattgtacccagggaacaaactatattgatgttgttcggatcttcagagcattatttgcagtttytttaatgggatacrccaatacctctggatattcaacacctgtcttccagggagcttaaaaacattataaatattatctcatggactcttcctgcatttctaggagataggcagggatggaaaattttagaagataataaagaaaaaaatttaacaggaaaagaaagcatctattaagtcttgatgtttgaaatcactgaaacttataattatatcaaagcatttactactcaaaatatttcaactttggaatgttccatctcttctaaagatcagatttatatcatgccaygctctgggaaagttcttgctgtttcaggaattctcctagaggctgacatggcttgagactgaggccaagaacactctgaagattggctccatactttattttgttataggttgttcaagtgtcattaatgatgatttaacaatgaattagtcatactacaatttgattaaatgttaggcacagcttttttaagatgggaaaatactatttaatcatttaagataattgtgaagattgaaacagaactctggtgaaattcataaatcacgttgaatgtcattttcaaattctgaggtcttcataacttagagtggaaaatctactcattgattcttaaccgaaatcattagtcctgtagtaaatattagggaacattgtaaactcatcccactcttagtagtgaataaaagtgaatcatgctttttccatctagtggggttgtggaatcaagaatatgtagcacattttttaaaaatgtaacaggaaataatataggtaaaagcatagaatattcatttttgtcttataagaagaaaggaatccttaatcctaggaggatttattcaaaaaagcaatcaagcaatttgctggatttcacatccaaaatataaacaaatgtcactcttattcttggtcacattatatgtgatttattatataatattttgaatctgcaatttatagaccaggcattgagactagtgttttccatactgaatagtgaaattatgttttgcaacacatttggaatttaggaattgtgctttcaaaacacagatgatcagccgaatatgatatctctggtagtcatttataatgatttgaaaggcagttagaggtgtttaggatttgtctagtagttccctggtaggaaagacgggattgcccagtcatactaactgtgtaagtaagtatctcttcagattttaacaaccttacgggttttttttttttttttgagacggagtctcgcactgttaccgggctgatgtccagtggtgtgatctcagctggctgcaacctccacctcccaggttcaagtgattctcctgcctcagcctcccgagtagctgcaattacaggcacccgccaccacgcccggctaattttttgtatttttagtagagacgggttttcactctgttggccaggctggtcttgaactcctgagcttgtgatccagcctcttcggcctcccaaagtgctgggattacaggcgtgggccaccgagcccagccaggaagatcttttaacctccttgttatgaaactcagatattaactttttttttaatacttctccatgttaaatgaaaacaatgttgtaaggatactaacctatatactgtattcttagaagtaggaaatgcttcacctttttgccattaagttaaacatgatgagtcttcatggcacctcttccactactttcagttgcctttttatttcttctttgcatctgttcgagttttctgtttctttgttcatttaaaaattcttttaatgctttcagtatgcccagctattctgttgggtatgacttacagcagtgaataagaaaatgtatgcgtcttaatggaccttacattctgcattacctggaagacaggtgataaaaacaacataaacaacagaaaattttttggaaaaaaacctatgtacatcaaatgtatgtagatcaagtgtgtcaacaatatgaaagaatagaagtctcactttaaacatagtcactctcaaagcygttttcaagaacatgtagggaaacagtggagttccgaatatgtttcctgttctagtccattttcacactgctataaagaattgcctgagactgggtaatttataaagaaaagatctttaattgactcacacttcagcacgtctggggaggcctcaggaaacttacaatcatggcagaaggcgaaggggaagcaaggcatcttctttacaaggtggcaggcaggagaagtgctgagggaagggggaagagccccttatgaaaccattagatctcrtgagaactcactccctatcataagaacggcatggagaaatggcccccatgattcaattacctccacctcgtctctcccatgacacatggattatggggattacagttcaagatgagatttgggtggggacacaaagcctagccatattatttcccttaaaatacatttttaaggccaggcccagtggctcactcccataatcccggcactttgggaggctgaggtgcgcaggtcacatgaggccaggagttcgagaccagcctgaaaccccatctctactaaaaatacaaaagttagccgggtgtggtggtgcacacctgtaatcccagctactcaggagactgaggcatgagaatcacttgcacccgggaggcagaggttgcagtgagccsagattgtgccactgcactccagcctgggcaacagagcaagactctgtytcaaaaatttaaaataaaggtaaatttttaagaagatagccaattcctttgcccccatgtttcttctagtttatcaggacatgattctaaaattaaaattataaactaaagaaaatgccatcttagcacaaataaatgccaaatctttgcttataattaggctttcatcaataatagtattcttacatcagcctctgtgcttagattcatttatatgggtatgattatatttttgtatatacaagcaaggtcttttttaatgtgcctcatcctcaaaatataaaatctcttgaacaattcaagaagctatgcccaacactgcccaaatgtctttattgcattagctccctctgtataatagaaacatctcttatccctgtaattcagctattgtgtggtctgtggtccacactctaagagtcttacggaattcatctagccctgcaacccattcaattttccctccctatcttcctagttctactgaagccaagatttcatggtctatgtttaaacacctcctcactgggaacatctctcacctctgccctaaaataggcagatttagagaatttagccctactgtcataaggcattcattgtttgtaaaggtgctagatatgtaccctccttgagagaattgagaatatactcactcaaaaattgttctgacggccacctggctttatattcttcataacacttatcactgtctgcaactgcatcatttatttgtccatcaatagtataagcttcattaagaaggcagttttgctttgcttcttgccgtacccctgtacctagaacaatgcacagtatagcatacactgtcttgctcaccaggcataggtctagcaacccttgttaagctcatctctttgctttctccatatttgcaccacaatattgagcagctgatcatttttgtatgcaggaaggtccttaaaaggacaccgactagtatcacgttaaattcataaacccactgacaactcagtttttttcctcaacaatgttactagatttcycttgcaaatttagctttctctatttctgagatttgtttatatcatcccttctcaaacctttgcaatcttcctgttccatttaccgatgactctaatgataacctcaccttatacctcgatgakaaacagttacatgattatacagaagctcccacacttacccaccatcacatctgcaaaccaacagcatctgaatctgtattttctgtgcatctttcactgcaagagaaggaaaaccctgctctcattaaaggcagatctttacccacatgctctggacctgatacttctatttttatccaggaatccactcctagagttacctccccttctctctcaacttcagttgtacgttttccttctgggcttgattccttcaacagcactcagatgtactctatcttacagagtgtgaaaccataagaagggtgctaaatatacacctatggcgaggacaagtctttttagtgactgttaatacttgattattagaggaatgattggggggtgagagagtttacgtatgtttattgcggcactattcacaatagtaaagacttggaaccaacccaaatgtccaacaatgatagactggattaagaaaatgtggcacatatacaccatggaatactatgcagccataaaaaaggatgagttcatggtcttcgtagggacgtggatgaagctggaaaccatcattctcagcaaactatcgcaaggacaaaaaatcwaacrctgcatgttctcactcataggtggaaattgaacaatgagaactcttggacacaggaaggggaacatcacacaccagggcctgttgtggggtcgggagaggggggagggatagcattaggagatataccttatgtaaatgacaagttaatgggtgcagcacaccaacatggcacatgtatacatatgtaacaaacctgcacattgtgcacatgtaccctagaacttaaagtataataataataaataaatatatgtgtatatatatatatatatatatatatatatatatatatatatataaaagagtttaaagaaggaaaaaaacacgacacgaagaaatggacacaagcaaattggtagttgcgtcgtgggagggagtagcatgtgatgaggcygaacgtgtattcctggctgagggacttaggcttcatccagaagtcttggggagcagaagttgctcttggggagcaacagtttcccagtgatcaagggatcggtggaggcagattggacttggaagcaggagaccacttataagatcgttatggtacgctggtaaagaaatgagaaagccttggactaaggaagtggggatggtgctgaagagagaatagcagtgatggtactgaagacagaatagctgtgagggataataataagacagaaccaaatggacgaggagatgatggataggtgtctagattttaggtttgagtatctgggtgagtgggggtactaatcactgagatagagaatatgcatagacggaaagatttgaatggttggcatggttacccatatgtaaacacgcaagtgggcatgcccagtggacatgtgggtatatgagctgaacttggcatagagatctgagattgaggattggacatcataagcaaggtgattcttgcatggatgtggtcacctaggaggttaagaaaaattagatccagggatagtattctggaggagaatagcatttttaggatggacagaggaaaaccaggtgttagtagtcaggtagataggaagaaaattggcagatgaatttgttacggaagccagaattgggaagagtttcagaaaagggcaaatgcgaatactcatagcagcacatgttcaaatggactgggtaaatgaggactgaacaacagctaggcttgtggatatgaaggtgggggtcagtggacggaacatgtttctgggattggcataagcagacgctgattttctgagcttttaacatagaagtgaagaactagtgtgcacagctcttattgcgggacaactgtaactgatgcatacgtgttggactgaactcttgaatcagagttactataacttagcttatctctattttctgtcacatatgtgacaagaaaccatatgtgacataggatttttctgtcgcaaaaccaacatatgtgatggttttgtttttgtgcatgtgagatgaagacaactaattcttaatctccagatggtcattcagcatttatttacaatttggtgttaaattttctatttttttaatagcagaaaatgtgggatatagaaagatgagataaatgtgatcactggggactcatgttttcctaatatatctctcagaactcagtacactccttccttttttctctctctttatttttgaatctaatttgtagtttggacaaagtatacacacaaaaaacatattatcgctgaactataaagaaccttaggtggaatggatgacctttatatatggatctgctcatgttgaagtcactgggagagaaatacaagcctggttctcctttgttggccttcagtgctcccttagtcatrtggtacattttgataagtgtgtattttaaaacttaagctcaactgtttttttggatgaatggcaatttctttaaaaaaaggagtgggggctctctccatgcttttacataaagtccctaccatgattttataaatcaaaaatagctaatgggatttttcactgaccttgctcttcatacttctacccgcctccccgcttttcccaaacatttcttctttaagcatagtaaattgtggctgaactaggggaatagaaccaaaatgaaaatgcataaatctgtaatcacatgcttataattaaaagaatgatgaaacctcagctcttaaatatacagtctgtagtattggtaatgctatacttgagaacaaagagatgctgaaagcagtggctgttgactgtgccaaagactgaagagcctagtagaagagaatatctttctcagaaaggaatattctttatgcagggtgggcatgtttcatgttgtacttctgtgtttttctgaaaatatgataaagacactttttccagtaatgaaaacaggtatgtttgattttttggtgtaatctcccttcattgaccatttaatgttgaaaaagaagcaaattgtcttttaagcaaacygctttttaccattgtgaatttggtgtgatttgttgtagatttttaaattttaatgaatttggtgtgattttctgtagatttttaaatttcccttttggagagaaaaaccaaaacacttgccctgctggtaaatcatgggacttcgtccaagcccttgcttggcccctcccagttttaagcttgaatgagggcaggtctctgggaccctgccccttgcagcaggagcatcttgtctcgtgtgcgtgcstgtgcatgcatgtgcaaatgttccctgagacccaggacagaggctgcatcctaagggctggttttaccctcttttcattctgtatgtcctcccccacctgcctgtgaagctctcaaggtcctgccagctctacacgtccccaamtctktttctcccctccctttatactaggggttcagaacttccagccagaagccaytgcccttgtactaccttgtccccaacccctttgtcccctctgccccccagcctgcytcctgcctgatggctcaggtgtccccatgcyggtcatgctggctcaggctgcaggagcaagcctgggagacttccctgcctctgccactttgtgtgggtaattgtgctttaggggaaagtggggggttcagtaaatttctggtgcactagtgggaaaaaaaaggtcataggataacaattattaaaccttaatgctatttctgctgtgctgaagaatgaagcaaagccatttatactccaggcaattttactttcgtgactctttaggtcagtctgagcagccattattatcctcattttacgatgaggaaacaaattctcagagggctcattgcttgactgaaatacaatagatggcaaagtcaggctggaaccaagatcttttaaaggaggctggagcagtattttaatttaaaaatcattgtaatatagtaagagacccagatagggccgttttgtggtgtcaggtggtagaaaccataaatacagatgaaatcccatgtaagataatcaattaaactcaaaagtcaccaataactggactgcaaaatgaatacgcttttgtattagtgcaacattcatgcggacaccgtgaaccagacggacaaaactctttcctctcttgtagtgacaaatgatgattccattttaaaggtacctttcttgccactcttaacatttgagaagcatgaatttgaagtgattcttctggaaacaaaaatagtttatatcaccacttctctctgagggttagatttccagcagccacaatcattcattccacaaccgtagatgagacttgatcaaagagcctctgaggagtgacagggaatcgattccatatgggagtccctaaccaccgcctcctgcatatttccagtcggatgctcccactggcacctcacactaaatatctccataatgtgttccatgctgtgtcttcagcacctagtacgtcgcagactcccaataaacatttacttcacagatgaatgaatgaaggaatgactgtcaattcaacacaagcatctcagttcttctgctccgcttgtgttctctaacactgtaagtagtgctaccacccatgtgattgtctaagacagaaagcttggcctcattcttcatttctctatgaatgagtgctgggaatgtttaaataatgcatgtatctattataaaatacaggaccataatggaatgtaagtcttctcactattactgttctctactttaaccaatgttgtatttcatttctagccttccagagataatttgcatggataagcatgtatgtgcatatatagatatagatatatacacatatacatacatacatacgtgtgcatatatatacatacatatgtgtgtgtatatatatacacacaggacacacatatatatacacatatacatacatacatacgtgtgcatatatatacatacatatgtgtgtgtatatatatacacacaggacacacatatatatacacacacacacatttgtatttatatagtttttactagtggttacatgctctatatgtctttctgccttttgccttttcatttccattatgaaatattttatatttctttgttttatattttctatatagagataactatatgcaagtgtatatgttttagatacacacatacatacaacataaaattttgtactatattcattttatgttgaacacaaaaataaaacattttattattcatacactatttatgtgagacagccaattctcctcattttctatagttaggttttatagagtcactgcgaacactgaattagtgaatatggaacyattcttctatggggaaatacaagtttaggtgcctgcaagcctgtggtcatattcttgtcaactaattcactcataactttgtcttatgtgtgtttatgtttaatgacaccttagctaataatatacattgttcattcattaatgttgaactcatggctggcaacactgttactcatgccttaatgaactttacttaacacatgtattttctccataaggtayatcacagccatcttgcacataggaacactagctaacaactgagcactctgcttgggggccatttaaaacagtgaaattaccaaaaatcccataaagatgtggaaaatgtggcacaaaatagatggtgacaagggcacttttcacagtgtaagagctgaaacaagaaggcagagtgttaccttgcaaaacctcagctggaaacatgctagtttatataacaaaaataaggttatattatagatctatatgcatatcttataacctaaatgaggtataaagatgtatcccaatagccatatacacccagctcacagaatagaacatgatcaataccggtcagtcagctcttccatttatctttctccaatcttatacctgtgtccccttcagaaacaaccactatcctgaattttctatttatcattccgatgtttattctttatagttttgccaaaaatgtaaatcataaccaacgtattgtttacaattttaggaactttgtgtgactggaaatataagcataccctgctgcaacttagttttttctccactgaacgtggtttttgaaattctttcatgtttttgcatgtggttctatttcattaatttttattctattgtaggactataatagcacagattgtctatcctattctatccttttttttttttttaaatttgagatggagtttcgctcttgttgcccaggttggagtacaatggcacgatctcggctcaccgcaacctccgcctctgtttaaagcgattcctctgcctcagccttccaagttcagccttccaagtagctgggattacaggcatgagtcaccacacctggctaattttgcatttttagtagagggggggtttctccacgttggtcaggctggtctcaaactccccacctcaggtgatctgcccgcctcgacctcccaaagagctgggattacaggcgtgagccaccgcgcccggccctctatccctgttttattgattatggacaatacttatatgaacatttgtgttcacaattcctgatccacatccatactccctttttgtgttgcaaacctaggaggtttgctgaggtgtgggacaagtgaatcttctgcctcggaggtaaagtcaaagtgtttttaaaaatgattagttctcatctgcacttctatcggcagagttccaattgtgttaaatccttaccagcaccgagttctttgattttattttttttagttgtttttgacccaattgactctttaaagtggtatttcgttgaggttttcacttgcattttcctgattatttttgagaaatcatgtgttttcacacatttatagttgtttccttttctctgtaatgccattgtgagtcttttggctgttttttaatgacttgtcttttacttattgagttattaggacatctttatatattgaggacattaaaatgtggtcagataaattttcccaagccctgctcccactttggagcttgtcttttcatttttcttttgctgactattgattttaaaagttctttatttctatgtagtgatatctatcaacctttttcttgatggtgcataatttttttgccttatttaagaaatccggcggggggcagtggctcacgcctgtaatcccagcactttggaggccaaggtgggtggatcacgaggtcaggagatcgagaccatcctggctaacacggtgaaaccccatctctactaaaaatataaaaaataagccgggagtggtggtgggctcctgtagtcccagctactcgggaggctgaggcaaaagaatggcgtgaacctgggaggcagaggttgcagtgagccgagatcacgccactgcactctagcctgggtgacagagcgagactcagtctcaaaaaaaaaaaaaaaaaaaaaaargaaatccttcccttctctaagttggtaaagataatgtcctttattttcccaagaaaattttatagttttgctttcacatttaatccttcagtctatttgaaattcatttttatctatgatctgcaataggaatcacatttaattttacgtcatatggataatgctgttttagttgtttagtgccatgtaaggaataagccgttttctctctaatatgctgtaccatttctatcatgtaggaactttccatatatgtatgaggctttcttgggttttctctatactattccattagcctatttccattatttatccttataacaaaacctgttactattctatttactgtagacttctaataagtcttgaaatgtgaaaaggctagattcctaccttctttagatttatgcctcctcttggtagtttattctgctatataatttaagaattaagttgttaagttccaccaaaacaaaactattaggattctgacacaattacacaggctatagatcagactgggtagaactgacatctttatgatatcaaggctttctatctatgaacatggtacagactagtgtttatttatgtttcctttaatatctgcccaaaaagtttaaaatttcattaagatttccatatgtttttgtacaaatatttctaaagacctcatttttgtttgtattttgtaaactgcatttactctattttgaagatatgtaaaattcaaatagcttacatcttacaaacttgttaagccctcttattaatttaacaatttgagatattaaaaaatttctctggcgatatcactgcgaataatgacagttttatgtatgtatgtatttatttgctatgtagtttcttttttcttccttttttctggtcattttgcactgtgttgtaccttyagtataatatggacagaaagagtagaaatgtcatttcacaaaggggcataattagaggaatacaaataaatattttggccatctttgtaaacaaattaacacaaattgattggaggttttcatatcatttaattttcccctctactacttttcaagtgatattctgtatctttattcttttagtgcctatcttggatatattgacacagttctttttattgtgtatatttaaagtgtacaacacaatgtttwtatatatatatatataaacacagagtaaaattattcgtcaagcaaattaacatattttatcatttcacataggtaccgtgtgtgcacgcgcacgcaccctgtgtactgctgaatagayagatctctggacatatttatgctacatagctgcgattttgtacactttmacctccatctccccacttccctccacctcctgccttttctactctttgtttctaggcatgcaagttttttggttttgtttttagttgagatttcacatataagtgagatcaagcaatatttttctgttaacacaattatttagcaaagtctaaagttgctgtttttacttccctctaaacaaattcttagcatgttttaatgctaatcttaccatttgaatgccattcctttccagtgttttagtttcattttatattgtctgttacccctaaaatatagaattattattttatgtattcatttttggtttacatttaaccaataccattgtcttggctcactattccttcatattatgccgccttctaagattatttttcttctttctcaagtacacccttgaaaagttgctttggtgtgaactccggattgtaaattctgtttttgtctgtgtgaacatatctttatatcaagcctgttttttagcaatagatttgctaattataaaattctaggttcaaagtaaattcctttcagccgcctggaggcctctgctttctctattcccttgttgcattgacaactctactcgggtccaatttttgcttctttgtttctaatctaaattttccctcaggatcttttatgtttttctgtttctccatatgtttgttttggctaatcatcaggaggcactaccaacccaaactattttaaaataaatccttgccttgcatgttaggatcacacattgggcgtttggggcctaatgcagtgtggttgcccatgatgggtaagggattcctatgtgagagagtttccccttcccccaaagctactggtgaggtggatgcatttccttaatgcctgatttagtggggtgattcttttcaatttcttcttttaagatgtctctgtggttatgtmggacgatttgaggcctgttcaaaaatttcccatatggccttaaaaactaaagttctaggttgctaggtttagcgatgtccygaggaagttctggcttgcacctctttggaatcctgctcctgtttgtttttatggcctcagagaattttccttattttctatccaactcagccatgcattcaatattactttaccccagcttttttgtgttctttgttctgaaactttttgatatctatagtcttgttgaaattagaagtctatcttgtttttttcaatgaaaatatatttaaataattttacattagtacgttcttcttaatgacttcatagtatttcactataaaaatgcacccaaacttacttgctcatttctctacttacccaccttttttctaaaacattgttttcaaaagcaaaagattatggtaaaaacatgtgtgtatgtctcacaattcacatttggtactgtacagcccgaaatgttgagctgctgggtcaaaagcagtattagccttattcttgatgcctccttttctcccatacccttgccatccttgctttccttacctcatcgttgttaagtcctgtggctttgctcacatgtgtccactccactctaatcccattgcatcaacctatctcagacccaaattatcactttttttccttaggctgaccgtttcctaacaggtctcacttttcctcatcaccgccattctgttaccgtataatcaccaataacctgatagtaaccttcagtcttctggaaaagattgaataatgttagtataataaattattaaagtgtgcgactactcattaaaatttatgtttaaaatatagagctaatatattttaaactatgtaaaatatcaaaaatgtgtgtttatttatttttgggagaaggagtccttgctctattgcccaggctggaatacagtggcgggatctcaactcactgcaacctccgcctcctgggttcaggcaattctcctgcctcagcctcctgagtagctgggattacaggcacatgccaccatgcccagctgatttttttttattttttgttttttggtttttttttggtagagacgaggtttcaccatattggccaagctggtcttgaactcctggcctcaagtgatacccccaccttggcctcccaaagtgttgagattacagtcatgagccactgcgcctgacctgaaatgtatttttaaaatataccttatttgcccttcatgttagataatacaaaattaattgcatattttttcatggttaagtctaagctttccttccttaggttctgggtacttggatatgctctgccatgaagaagaatcctgaccaaataaatggttgtgttcttgtagctgaacctcaattacattctttagtgactgacgtgaatcttccagttttttttgaagaaaagtcagccagaaactgagttcaagactagcacttttaaaattttaaaccttttttgttaaagcaattctggtataataaaacccaagggtccatttgtatagttacctaagaaataccaacgtgttgattcagaagtaaatcgtcataacatattaaattgcaccatttaaaattatgatattttctggttaatgtctaaaatctgccagtttattaattttctgcttgacacatgttctaactacatgttacttgggcatttggatcattagggaaataagagttgagtgtgtttgttgtacgttgtctatggtttcctaagtctcctctgaagataagcaacacttgtgagacagatgtgtcacacagtggagggctttggtgtaattaccgctctctgttgtgcatgaataaaatctaagtgaaacactgctaaaccatgttaacttatgagaagggtcagctgggcatggtggctcatgcctgtaatcccagcattttgggaggccgaggcgggtggatcacctgaggtcaggagtttgagaccagccaggtcaacgtggtgaaaccccgtctgtattaaaaatacaaaaattagctgggcatggtggtaggcacctgtaatcacagctacttgggaggctgaggtagaagaattgcttgaacctgggaggcagaggtttcagtaagccgagatcacgtcattgcactctagcctgggcaacagagagagactccatctcaaaaaacaaaaacttatgagaaaagtcatctaactcatatggcaaatggtctcatatcatgtgccaaatctgacagattgatactggcttaatggaagtgtgttttgaggataaatcttaggtcttacctgaattcttgggtttgaaagagtagcatgagtaattagtgatttctgaaatatgatagggaagaattgagtagtagcaagtatttttcctccaatgatttcttatttttttcttcataaagtttatgcttatatttttatagatggaatatattatatattttgtatatattatatatgctatgtttatatgtaagaaataggtatamaatctatagagatttattgtatgttaaaggaaaaccaaacctaaatcacttttggaggaagaatttctttttttttttttttttaaggctgttttgaaagcttgtatacaggcatccctgggagatattacagaccaccacagtaaagcaatattggttccagaccaccacagtaaagcaataaagcaagtcacatgcattttgggggttcccagtgcatataacagttacatttatgctatactgtactctattaagtgtgcagtagcattatacatttaaaaactaygtacataccttaatttaaaatatatttaaaaatgctaacaatcggctgggcgccgtggctcatgcctgtaatcccagcactctgggaggctgaggcggacaaatcatgaggtcaggtatacgagaccagcctgaccaacacggtgaaacctcacctctactaaaaacacaaaaagtagcgcgcgtggtggtgcacacctgtaatcccagctactcaggaggctgaggcaggagaatcgcttgaacccaggaggtggagtttgcagtgagccgagatctcaccactgcactccagcctgggcgacagagcaagagtccatctcaaataaataaataattgctaacaatcatcttagccttcagcaagttgtgatcttttttctggtggagggtcttgcttccatgttgacrgctgctcgctgacaggtcagggtggtggttgctgaatattggggtagctgtggcagtttctgaaaataagtcaaaaatgaagtgtgctgaatcaattgattcttctttcactaaatatttctatatagcatgagatgctatttggtagtattttacccacagtagaacttctttcaaaatttgaatcagtcctctcaaaccctgctgctgctttatcaactaaatttgactttctaaatcttttcttgtcatttcaacaatgttcacagcatctttaacaggaatagactccatctcaagaaatgacttcctttggtcattcataagaagcaactcctcatccgttcaaatttcatcatgagygatttgctgcgatttggtcacatcctcaggctccacttctcattctagttttcttgctgtttccaccatttcttcagttctttcctctgcggaagacttgagcccctgcaagtcatctgtgaggtttggaactcacttcttccaaacttctgttaatgttgatattttgaacccttctcatgagtcaagaatgttcttaatggcatctagaatgatgaatccttttagatagttttcaattgattttgcttggatccaccagaggaatcaatcactacctacagcagctatagccttaccaaatatatttcttaaatagtaagacttcaaagttaaaatgaccccttgatctaaatagatgttgtattagcaggcatgaaagcaaaatgaatctccttgtattaaaaacatctccatcagagcttttgggtgwccaggttcatggtcaatgtgctgtaatattttgaaaagaatctttttttytgagtagtaggtctcagcagtgggcctaaaacactcaataaaccatgctgtaagcagatgtgctgtcatccaggctttgttcttccatttatagatcacaggcatagtagatttagcataattcttataggctgcaggatttttgaaatgatcaatcagcactcacttcaactgaaagtcaccagctgcattagcccctacaaagaaattcagcctgtcctttgaagttttgaagcaggcattgacttctctctagctatgaaactcctagatggcatctgcttcttgttttatctacactgaaaatctgttgtagtgtagccaccttcgtcgattatcttatctagatcttctggataacttgccgcagcttctccatcagcacttggtacttcaccttgcacttttatgctatggagacagattctttctttaaatttcatgaactgacctctattggcttcaaacttttcttctatagcttcctcgcctctcttagtcttcatacaattgaagagaactagggccttgctctggatgaggcattggcttaagagaatgttgtggctagtatgatctaatcggaccactaaaaatttttccatcagcaataatgttgtttttgctttcttgtccttcatttcttcactgaagtagcactttaaatttcccttaataacttttcctttgcattaacaacttgtctgtctcacgcaagagaactagctttcattctctctccactttggacatgcctaagtcactaagcttaattatttctgacttttgatttgtaactcttttttcacctgagcacttagaggcctgtacagtttttaattgtagggttattaactgtatggttattaattggcctaatttcaacattgtagggttattaattggcctaatttcgacactgttgtgtctcagggaatatggaggctgagaagaggaaaagagatgataaacagccttttggtggagaagtgagaacacgaacagtatttattgattgtttgccatcttatgtgggcatagtttgtggtgccccagaacaattttaataaatacatcaaagatcactgatcacagatcaccataacagacaagataataatgggaaagtttgaaatacggcgagaattaccaaagtgatatgacacaaagtgagcacatgatgttgtaaaaatggtgccaatagtcattcractacagttgctgccgatcttcaatatgtaaaaaataaaaaataaaaataaaacaaaaattaatacctacaaagcacagtaaagcaaagcacaataaaagcaggtatacctgcaatgagatgttatagctgcaacacagaagatggttagaaggcatacctaatggatctcatacaattcatggaagtgtttttattaataaagcaatgcatttaggaatatttgttgctctaaccatcaaatgaaatatttacccttttgaactttcctattcccatccatttcccggcatgaaacttcagaggcattcttaactctagattrtctctcacatggctttctactttctatccacattatcataatagtttctcaattgatatgtctgtctccagcctccattccctgcagttcattccccagctgcaagggtgacctgtcaggttttcagggtattgtataaatgtctccattgctttgacagtgttgtttaatatgtctttactgattttctttctaatttatttatcagttagtaagaaggctgtaatctctagttacaacttttgattgtctattttttctttctgttttgtcagttggggaattttgtctttctttcattttatttttcttagtttttgcattatgtattttgaagttcataatacttttttggaggcaaacataggtagaattgttatatcttctttttgaattgatccctttatcattatgtattgattctccttttttcctggtactatatcttgttctgaggtctgatttgcctatttttaatacagctacttcagctttattatggctagtgtttacataatatacccttttatcttttactttaaacctaattgtgtatttatattttaagtgaatttcttttcctagagagcataaagttgagtcttatttttcttatcctgccaaacaatctctggcttttaattggggacatttagaacatttacatttaatgtagtaatgatagagttgagtttaatttatgatctttatatttgtctactatttgtttcatctattgttttccttctttttttctttcccttttttcttattaattagtattttttaatataatcggcccttcatatctgtgggttctgcatgtgtggattcagtcaactgcagatcaaaaaacttcaacaaaaaagggatgttcgtacctatagaatgtgtatagacttattttcttgtcattcttctccaaacaatacagcataacaactgtttacatagtatttatattatattacatgatatttacattattacagagataatttaaagtatatatgaggatgtgtgtaggttatatgcaaatactgcatcattttatataagggactttagcatccatggattttggtatctgtgggataccatagatgaactagtctcccatggatattgagggacaactatatttcatcttatttccaccattggcttatatgttatacatctttgtttaatattttcagtggtcactctagtggtgtgcccctttaatttatcacagtctatcttcaaatagtattacacaacttcacaggtgatgtcagaactctacaacagtatactgtcattctcccttctgttgtttgtgctattgttgtcatatattttacatctacatatgttataaccaaaacaatatattgctcctacttgcatttaagtcattatcttaaaaaaattttaaatgacaaaattgtattttatattcatcctcataattagcatttccagtttatttcactcatttgcatagatccagcttttcattaggtatcatttttattctacctgaataacttccttaacatttctcattatgtagatttacaggtggaaaatttatttagccattgctttcttgaaattatttatttcccatttttgagagatattcttacagaatgtagaattctcagttaacaggttttttttttttctttctgcagttaagatattgttcttttgtcttgtgtttgcatagtttctgacaaggaatctatattagttttccgttagtgctgtaacaaattaccacaaacttcatagcttaaaacaatacaaataataaatttgtaatttcttcaggtcagaaactcaaaatggacaaaaattatattagcagtgctgtgttccttctggagtatctaggggatacatttctttgcctttttttagactctagaagctgcccacattccttggtttatggcttctagctatcttccaagctagccatggctggttgaggttttcttgtgatgtatcactctgtcgctaactctcctacctttctctttcacttacaaggacccagtgattgcaytgggacaacgaggtataatacaagatgagcttctcatcttaaggtcagctgattagcaaccttaattccatatgcaatttaattcccccttaatttattatattatattcccatgtaatatatttacagctggggattaataaattaattcccccataatttattatattatattcccatgtaatataacatattcatagctggggattgggacatggacatttttagagggccattattctgcctaccacaaagtcttgggaatttatatttttgttacttgttataaaatgtgtttccccactccttccccatctaaactctggttgtttttaaattttacctctattgctagtttataggatttttattatgatgtgcattggtatatgtgtatatgtgtttttctctttcttttttgtttcttttttttattttttattattattatttttttagacagggtttcactcttgttgcccaggctagagtacaatggcatgatcttggctcactgcaacctccgcctcccaagaacaaacgattctcctgcctcagcctcccaagtagctgggattacaggtgcccaccaccacacccagctaatttttgtatttttagtagagatggggtttcaccatgttggccaggctggtcttgaactcctgacctcaggtgatccacccacctcggcctcccaaagtactgggattacaggtgggagccaccatgtctggctgtgtttttctctttcttgaggttaattgggcttttggatttaggtgtttattgtgtgtatcaaattgggaaaacttttgaaccttatcccctcagtgatttttctgtctccatctctcggtttgttctgggactaaaatgatacattatgctagaatgtttactaatgtcacagttcatcaatattctgctctcctttcaatcttttcctttatgtgcttcagttggaatagatccaaattttacatcttaaagtttattgttattttcctctgcagtgtctaatcttacgtgatttccattcagtggactttttatttcggatactgtatttttaactttacaagttccactgagttcttttgtttatatcatccattttcttctcattatgttcatgtttttctttaatatttgagggtggttactaaaaaactacattcgtattaatatccttatttgctggttcatctcctgtcattcctgggtctgtgtctattgacttaaagaatgtgattgcgctttcctgatacttggttggtctagtaattttcttattaagtgctagacactatgcacattatgttgttgggtgtgtaggttttgtgcatttctttagaatatttggctttctttaggcagataatttaaacaacatgtgactcagttgatccctttaaggcttgtttttaagctttgcttaggctagtctggggcatccttcatgccagtgataatttggttttactaataatttacctaccccactgaggtctccaagaccatcctgtctcttgtgatcagtgacagctctccactctggctctttagacatcgaacatcttttggccctgtaaaagctttgggaattgttaagcttatattttcttggtggttctttgcttgtacttgtataattttactgtatacaggtgccacttaatacccagctaaaagtcagaaagcttaatgcagatttttgatccttcttttctgcaaagtatttcctctctggaactctgttcctcatcttttagtcatgtcagcctacctagacttctatctgtatttcctcaactcagcaaaactggttggcttatttggggtctcctttctagcatctatgattttaaaattgcttttagacagaaatctaggaagattgaagggcactacacagatcagactcctatactgcttatttttcagtatatgaaaacagtttcatatattaaatacatttttctagttaattacagcaggagggtaagtttggttcttttcaattaagtccggaattaagttcaattaagtggaagttccacttcaattaagttgataaaggatcaacaaaacaaaacgttggtttcttgaaatgataaacaaaatagatagaccactagctagattaaccaaggaaaaaaagtggaaatatttttccactggtttaaatttaacacaattcatcaggtcaacaggatttcactatccaaaatatatatgcacccaatagcagagcacccagattcatttaaaaaaacatattggtggacctaagacaagagatagacagcaatagagtaatttggggacacttcaatacaccattggcaacattagtcagattataaaggcagaaaatcaacaaaggaactctgggcttaaactggactctagaccaaatggaaaaacatttatagaatattctacttcacatcaacagaacatatattttttctcatctgtccatgaaacattttccaaaattgaccatgtgcttagccaaaaagcaagtttcaatgaattttttaaatgaaaataatattaagtgtcttctcagaccacagtaaaataaaattgaaaatcaataccaagaggaactctcaaaaaactacacaagcatgtggaaattcaacaacttgctcctacaaaacctttgggtaaacaacaaaattaaggtagaaatcaaaaggttttttgaaatgaatgaaactagatacaactgctactgggtacatatatattttggataattaaatcctgttgaactgataaattgtgttaaatttaaactagtgggaaaatatttccacttttttcccttggtcaataccaaaacctctgggatgcagcaaaacagtgctaagaggaacgtttatagcattaaatgcctacataaaaaacacagaatgatctcaaattaacaatgtaacattgcatctcaaggagctagaaaagcatgaacaaaccaaactcaaaactagttaaaaaaaaaaaaaagaaatggcaaagatcagagcagaactaaatgagattgagaccaaaaaaaatgataaaggatcaacaaaacaaaaagttacctctttgaaacgataaacaaaatagaccactagctagattaaccaaggaaaaaaagattaaaataagcacaatcagaaatgataaaggtaacaatacaaactgataccaaagaaatacaaaaatcatcagagactattatgagcatctctatgcccacaaactagaaaacttagtaacaagtaatgaaattgagtcagtaatttttttaaaaaaatctctaaacaaaaataagcccagaaccagacagatgaacagccaaattttaccagatatacaaagagttggaaccaagcatattaaaactattcaaaaaaatcaaggaggaggtgttcctttgtaactcattcatgaaaacagtatgaccctggtaccaaaatcaggctagaacacaacaacagaaacaacagaaaacaaaacacacaggggtatatctctgatgagcatagatgcagaaattctcaagaaaatactagcaaaccaaatccaacagcacatcaaaaagataatattatacatcaccatcaagtgggttctattttaggaatgcaaggatggtttaacatacacatgtcaataaataataatttaccacacaaagagatttaaaaaaccatatgatcatcctttttcttttttttagacagattctcgctctgtcacccaggctggagtgcagtggygaggtcttggctcactgcagcccctgcctcacaggttcaagcggttctcctgcctcagccttctgagtagctgggattacagaaacacgccaccatgcccaactaatttttgtatttttagtagatacgggacttctccatgttttccaggctggtcttgaactcctgacctcaggtgatctgcctgcctgggtctcccaaagtgttgggattactggcatgagccaccctgcctggccaatcatcttaacagctgcagaaaaggcattcagtaaaatccaacattgcttcatgataaaaaccctcaacaaagtagacattgaaggaacatatctcaaaataggaaccatttacaacagactcccaggcaacattatatggaatggggaaaagattaaagcattttccctgrgaactggaacaagacaaggatgtctactctcaccactcctaatcaacatagtgctggaagttgtagccaaagcaatcaagcaagaaaaagaaattaaagacattcaaattggaaaagaagaagtcagattatctctcctcactgatgacatgatcttttaaacctagaaaaccctaaagatccctccaaaagataactagacctaataaatgacttcagcaaagtttcaggttacaaaataaatgtataaaaataaatatcatttctgtacacgattaacattcaaactgagaccaaatcaagaacttagtcccatttacaatggccatatacacagaagtaaaacacctaggaatatttaactaaggaagtaaaagatctctgcaaggagaactacaaaacactgatgaaagaaattgtgtagatggcacaaataaatgaaaaaacattctgactcatggatcagaagaatcaacatcattaaaataccggctgggcctgtaatcccagcactttgggaggtcaaggagggcggatcacctgaggtcaggagttcgagaccagcctggccaacatggtgaaaccccacctctactaaaaatacaaaaattagccaggtgtggtggtggctgcctgtaatctaagctactcaggaggccgaggcaggagaattccttgaacccaggaggcgggggttgcagtgaaccgagatcgtgccactgcactccagcctgggtgacagagtgagactccctctcaaaaagaaaaaaaaaatgaccatactgttcaaagcaatctacaaaattgcagaagtgcaattcctatcaaattaccgacatcatttttcacagaaaaaacaatcctaaaattcatatggagccaaaactgagcctgaataaccaagtaatcttaaataaaaagaaaaaaaaacaggcatcacgttttgtagcttcaaattgtaccacaagactatagtaacccaaactgcatggtactggtacaaaattaggcacaatagatcagtagaacagaatagagcaccaagaaacaaagccacatatgtacaaccaaccaatcttaaacaaagctgacagaaataaacaatgagtaaaggacactgtattcaataaatggtgctaggacaattggatagccatatgtaaaacaatggaactggaccccagtctctcaccatatacaaaattttactcaaaatgggctaaagacttaaatgtaatacctgaaactgtaaaaatgctagaagaaaacctaggaaaaattcttctggacattggcctaggcaaagaatttatgacaaagacctcaaaagcaaatgcaacagaataaaaaatagataaatgggacttagttaaatgaaaacgcttctgcacagcagaagagataattgacagagtaaacagacaacctatagaatgggataaaatacttgcaaattatgctcctgaaaaagaattagtatcaagaatccacaaggaactcaaacaactcaacaagaagaagacaatcccattaaaaagttgacatttcttaaagaagacatataagtagtcaacaaatttatgagaaactgctgaacattattagtcatcagtgaaatgcaaattaaaatcacaatgggataccatctttcaacagttagaatggctattattagcaagccaaaaacagcagaggtagacatggatgtgcagaaaagggaatagttatatactgttggtaggtatattagtacaacctctacaaaaaacagtttggggattcctcaaagaactaaaaggagaactaccattcgacccagcaatcaaccccattgcttggtatctacccaaaagagaagaaatcattgtgtaggaaagacacctgcattcatatgtttattacagcactattctcagtggcaaagtcatggaatcaacctgtatccatcaacagcatcacaacagatgactggagaaagaaaaaaaawatatatatatatattctttatatatggaatactactatactatgtgtactaccatatatatatggaataccactcagtcataaaaagaataaaattgtgtcctttacagcaacatggatgcagctgaaggctattatcctaagcgtattaacacagaaagtgaaaattaaatgctacatgttctcactttcaagtgggagctaaataatggctacacatggacataaagatggaaacaatagacctggagtctccaaaggtgggaagaggaagaggagggaagggtcaaaaaactacctattgagtaccatgtttattatttgggtgatggattcaatagaagcccaaacctcagcattatgtaatatatctatgtaacaaacctgcatatgtaccccagaatctaaaataataatatttaaaagaaagaaatatattctaggcaaaaataaataaaatgaacacagttcagcctcttttgctttgcctgttgtatgatcacaccatgagaggctggtgctgcctctgcayagcatttttgccagctcttttccattgtatttccagttttgtctcctttatctttcttcttgacatctcgaactatggtgcacctttgcttctgtgtcttttttcccactgttcattgtttaccctctccggtctctgctcctttttctacttgactaagacttgttcatcattttagtcccaactcaccctgcattgcctttgtcttttccttattgacttctctctcgataggcaaatggatgtttcacttaactgtactcataactaatttgccagtgttaaggctttggagtcagactccatgagttggaatcctgtctcatttatttagtgtttctggaatctwaatcaagttttttaattgctaatttcctgattttaagtgggrataattataaaccctttcttacagggttttattatcttgggttattatatgtaaagaattagaatagtaatatcaacatcattccatattaacattcccatttaaacatctctaaaacatctacatgtatgattatttgtctctctctccatctaccattttcttaaaggaaaaaactatgtaatatttacctgcatatgagtccccaacaaagctagacattcaaatgttgactgaaatattgtaatgttaaattatgtggcttttgtctgtaggattggaatgacctaggctttaagcattgttttggcaagtaagattaggaagaaaagaaacacatcagaagtttttttggctttcttatttttgtttccagcagttttgtgttttgatagtttgaatccctamattgaaattaattggtattgctttcaatatggaaagctcagccctaatgcgtgtatttacttatttttagttaaaggctcaacgaggttttcgttttatccgaaggatttttatttaagttcagcctggtattagtaagtatgtatgcttcatttatattcttcaatagggtagttgtctcttagcaaagaaaaaggaaaggaattggcccaaggcatgtctttatttctatgctacattagtgaaagtccaggagagatttgcttagcctgtaggtagagtaatatatagatttgggtatgatttgatataaaaatttagtttgagttagcaattttctagttggaaaattgttccagctcctttagactgtactgtctactgtactgtctagctcgtggatgcgtattatgttttcccatgtcttctctactttgggtttaaaacgaagatttggagaggaatttcactgaggaccacttcaatacgtacatcaggctgggtgataatagcacacggctttcctgtattttatgtttggctggaagccacatatagaatttttaaagtatgtgtcattttctattatgtatatgtttcttgagtttttaataactagcccccatatgtttatatacacctatatttctagaggcacaatgatatatatatatatttatgtacaaagttgaaataaccctcagtattaaataaaaggtagctgtaaattattgcaaaagtcaggttgacattttatgcctcaaatgctctctttcttcctcctaggagtattccayaacattgttttattgtcctaagaacatgcacagcatagagaaggaagatgcattgggacttagttatttctcttgcagtctaaggaaagatattctgaaagtcatgcactgtgacatgtatgaactacttaaatttacctgacttttagttcattgtcaaaaggaagagtgtgtcaaaaatctcaaaactaaggcaatatatcttcagttaaatgacaactttaaatgagtcagaagaaaggcactgcatctgtctaaaaaatatcccatactggctgcacttaaaagcaactggaatgcacattcatagctaattataaacaaaaactagttaacactttaaataaaaaggaaaaatagcaaaaagatttagagcctagacaaacagatgaaagggttctgagttgccttccatctgatattactcaaatgcaactctgtctccaattacctgggaatatgtggtattccctcatgaaagctcaagatcagaaagggcgtccatttcgtgtctttgcttactcatagccatttggaacaagttcagcagaagtatttcacattgcgaaagagtctggagccagacagcgactacagacactaatcactgggtcaaaatagtaacttagtaggacagcaaccaccagaaagtatttgtggaggtagaaatgtggagtcggatatattagtgccgttggagaagatatcaccaaatgcaaaaatgctgtaacagaaccattaaatcactatttgtaatcagyttcatgttcagtggcacaggactgtctgagccgatggtctctttggtaggatcagacctaaaaggtaatcttatgcccttaactctagaataaatagatggaaagagaattaaccaaataaataaaggctgcctcctaaaacatttggtgtttcttttattgtatggttccaagtacaggctttctttgcctcaaactgcagatctctagcatttgagatttgcggggtgggcaaaaggggaaacatcattgctaaaataataggtgcagcaattgatcaacttccctaaggagctgcaattttaggtctattcaaataagagttactggtattctctgaatattgtcattataaaccacttttcattgttgccttttttcttaaactacatcatcctgttcctttcctccagtgtcagtagagaattgattgctttattttactatcactctactccgctactacttctattttcagtagactctatctcggaacattttccttggcagtggatctcaaactccaagctatgaataattacccacagtatgtttggaataaaaaggtgagctttagaagaggattaagcattttttaaaaatcattcttttagatttcatcaggttctcactaaattcacatgaagtattatcttatcccttgtagcaattttatttactgctatgtctttaaaaagtggggaggggactaaggagctattagcctctgtgtttatcctgtaggcattggacttctccattctatgccaattaaaacaacttcacacacaaattaagtagaaataaaatctattaaatatattttaaagcaatcccgtggttttataaaggtcttgggccataatttctctgttgctgtaaagaggcaaccttattttagcaaagtatatttttaattcaacatctggattctgtatagaaaaattaacaaggaaatatgtgagattcctacaatggaagacttttcacatattgcaagcaatgcatctccatcctactttgtagtaatactgatgtgggcataaaggaaagacaggaagaggatgactagacaccaggtgatttatacattatcttattaaatcatgaaacagctcggccaggcacggtggctcatgcctgtaatcccagcactttgggaggccgaggcgggtggatcacgaggtcaggagatcgagaccatcctggctaacacggtgaaaccccgtttctactaaaaatacaaaaaattaagccaggcgtggtggcgggtgcctgtagtcccagctactcaggaggctgaggcaggagaatggcgtgaacccaggaggtggagcttgcagtgagctgagagcgggtcactgcactccagcctgggcgacagagcaagactcccatctcaaaaaaaaaaaaaaaaaaaagactaggaaaaaaacgtggtgctcaaacaaaaaaaaaaaaaaaaaaaaaaaaaatcatgaaacaactcaatgaaaaagaaattattaccctgctttaatgatgaataaaagttattacatcaaagaagcgattattcaaagttattaaaatctactgcaattcagtggctgcattacaattcaaacccaggtttgcctgactaaagctcatgttctagctcccaacactggaccttgtgggatctgaagatgagaggcagagtgtgagaaagaccttgcaaagtataagcatttacaaaaaagtgtagcttttatggtccgaggtggaggagaggtgattgctctcagagatctgggatgcccttggccagtgatgtccattaggcgtcataaaaatgtttctgtcaaaagtggtctttgggaggctgaggcaggtggatcacctcaggtcaggagttcgagaccagcctgaccaatatgatgaaaccccatctctactaaaactacaaaaattagctgggtgttgtggcatgcgcctgtaatcccaactactcgggaggctgagacaggagaatcacttgaacctgggaggcggaggttgcagtgagccgagatctcgccattggactctatcctgggcaacaagagcaaaactccatctcaaaaaaaaaaaaaaagggggggggtcaagcattgctgggcgacagtagcacagaaagcccggtgatttgatgacaatgtgaagatcaccagccaagccttgtgcctatttgtctattttgaatgctgcttttgctaccctataattatcttgattatgaatgactggaaatctgccatcctgatcatttgaatcatgtcaaaaagaaatgaggtgtctactctaaagagttgggaagttaatcttgtagtagaaaattgaaatcttttttatctcttgtatgcaattcactcggcatactttatttaaatgaagtttattaatagttgattatctgtacataagaaactgctactaaaagttacactggctttcaaaactctgcaaaaccatttatgccattagagattatctgaaaatattttttgtacttctagaaaacaatacatgtataaatatatataaataacaataagttgttgcaaatagaaaatcaccttattttctgtgttaccttcagcaaagtcatgtttgaaagtctgtgcttataacagtggtggtacacagcctataaaagttgtttctcaaactgaaaagcatagctggtctgattggggtcactgcatgtaattagcttgcttgctccataaatgaatggcagatttgttttattccaaatgatatcttaattttcaccgattaaattacattttattttggtttggaaggttcaccctcactatgtaaagcaaccacatcctgcagttgtcactaagttaacaccataagtatgtttaaaagaattgttggccaagcatggtggcttatgcctgtaatctcaacactttgagagaccgagacggaaggattgcttgagcctcggagtctgagaccaccctgggcaacatagcgagacctccatctctacaaaaaatagattgaaaaatttagccaggtgtgttggcataccctgtaatcccagctacttggaaggctgaagcaggaggatgacaggaggaattgcagcttgcagtgagccatcgttgtaccactgcactgcagcctgggtgacaaagtgagaccctgtctcaaaaaaataaaattgtgacaataaaatagtgatgatgcatttatgcaaacaccatcttggaaaaagggtatctctgtttttccataaaatggaattgcaccccaatttttcagaaagtttttcctgagattggtatacaaaggaaatctgttcagttctttgaattgttgactctacatcaggaattgaaatgtgtactctaatgttcttgctttgatctctcatttgactgtttatcaaagctgattacagtttgaatacccaaatcccgttagcttcaaaactatgtaaaataatgtataatagagcattttaagagatttttttcttattccagtttgtctttatgattgtgatatggctattaggtttggtaagaagctttggttttatattttgttccctcgataagaatcagtcttctgccaaattggattaaagtttttgtttcggccaaacttgctcacgcaactaagcaacagctgtttcggtgaacatcaaaagaagtcattatgaacaaatgaaacttactttattccactaaacacaatttaggagcttatgctttttgaaaagctgtatgtgttttctttattgaatataacattggaatataattattagttgacttactcagttaaacattatgtatgatatcactttaagaattttgagatcttcaggtccagaattttccaaggatatttatctattaagtttctactgattattggaggcaccgtgctaagtattttgtacatgttaacagatgaatctgcctaaagtcacagagctaatttaagtggcaaaatcaggaatcgaatacagatctctggcatcttgttctactgtggtgtgtttttaagtttcataaatcatttactttaatcttctaaaatagtctagaaattccttcttctaatctgcctgaatctctgtactttgcaaagaaaaagcaaagatatgtgagggcaactgaaaaaataaccttcctgaaaatagtatgcattgtagtgcttttgttattttgcctaaacaaactttatgtgttcctagaattgtttctggaagcaaatcatcttttatgctaggcaactcagagcagattttgtataaaacaatatgttcgtgctggagccttttcaaagtaaaatcataggatattcattctttttttaatatagttaacaattgayctgtaagtttatacaaacaatctgacatacaaaaagggaaagaaaagaaagaaaaaagtatctgctgccacctgaaatgatccctgtgaaatcctgaaaatcctggcaaagagtggcaacgtgacactgggttatgactttgcagataccatgcaaacctttgaaagaacactgtcttgaggctgtaaaacatgaactagcctaagccgtactattgtgttgtaagtagtgataaagacactgacagttctcgagtgaccatgggttttatttcatgcacagttcccattttttttataatcaatttgccctgctccactgtgtctcctaagttctccaaatggccccacatgtgacccaaagaggaatgataataaaaagacaacttcttctttaactagtcccaggatttattttttacattttactttttttttgtcctgttactcagtgattttcaaactgtgggtcacaaaccattagtgagtcatgaaatcagtttagcaggtcccaactaatgttttaaaatctgatagatagrctaaaaatatcagagagcattgcatgaaataagagtatcttcaaaactttcaggtcaaacatatattaatatgtatggaggtatggggaaatgggtgaaggtgaagtagtacataattcctagaatgcttacttgtcaaaaaaaaaaaatgaagtcacagccatactttaagtgatggagttcttatgttattttaagcagttcgaaatactgatttaatctccttaaatttgacctttgggtttgtagcagatcacaattctttatttttaaataaaaatgatagcaagtaaatgggtatattatcacattcccccttttcagaacagaccatgatctgttcacctgtggtctgatatgaactattgaaatgagttcaaaattcttaacataactgagaaatgtcacataccatttctgtttagggtttttttttttgacgtgtttacacctttgcttgagggaattatttccactaattgttggcatttaaacactgacacatctgatgtaaatatgaaactagtgttttcttttctcaggttaatgtgactgagttaaagaaattttttcagaatctgaaatttttgattagataatatatcttgtctgtgtcaatataataagatcaacttaattaaaattaagtagaatcatttaaatcatgtatctatgacatccatagatttgaaataagcttctggttgtagtacaatagaattaataattaaaataagttacgttatgtagggcagatgttgcttgaaatagtgtaacaacttatcatttatctcatgtacttttattttcttgcactttcagccaaaattgaccaagaggcagaggaaaattcactgacagagactcataaatggtgagaaattactttatttcctcccagaatagcgttataacatgctaagtgtatttcatcttaaggaaccaatttttagttcaattttaattttcaagcataaaacaaaaataaatctaataaaatggtgtgctctaaatctacaatgaatttctgaattttatttttgttaytctgggtaacatataattctgttaaataccaaattattgtgaatagcttagcatcttctcttttacctgggatttagaactatggaaatacacaaaagaaggaagatagcaagaacctgtttcagagtttgggttatcaaaaaaaaactatgtgatttccatattcaaaagtgaagtctaggtaggaagcgatgagcttcccttggatgcaccttcatttccagaatggagacttgcaattatgggtaaacatagaaaatatctcagaaatctccctgcttttctgcctccattttctcttcttctcgcatctctctatatacgtcagggttctgtagaaaaaaagaacaaactggcgatacagatataaacacacacacacaggcatacctcattttattgcacttctctttgctgtgctttgcagataagtgtattttttttttttcacaaattgaaggtttgtggcaactctgcttctagcaagtctatcggtgccatgtttccaacagcatgtgcacacctcatgtctctgtgttacattttggtaattcctgtaatatttcaaacattttatttttattatctatcaccacaggtgatctgtgatcagtgatcttttatgttactattgtaattgttctgggacaccatgacctgacccatataagatggcaaacgtaatagaaaaatattgtatgttctaactgttccaccaaccatctgttcccttgcgtctcccctctcctcaggcctccccgtattccctgagacacaacaatattgaaattaggccaattaattacccaacagtggcctctaagtattcaagtgaaagaaagagtcacacatctctcactttaaaacaaaagctagaaatggttaaccttaatgargaaggtatatccaaagccaagatatgcccaaagctagacgtctagtgccaaacagttagccaagttatgaatgcaaagaaaaagttcttgaaggaaattaaaagtctatttcaatgaacacatgaatgataagaaagcaaaacagcattcttgctgctatggggaaagtttaagtggtcttaatagaagatcaaaccagccacaatagtctgttacacaatagtctgttgccaggggtttggtttagcacagctacttgccacacagaaagccaatcactgagatgagtattgccagggaagaaggctttaattgggtgctgcagccgaggcgatgggagctcagtctcaaatccatctccctgactaactaaaattagggatttatatagcagggaagaaatgtaaccatgtgtgggagaacaggaattagggaggggtaaggaagaggaggtactcagcagcaagcagctggtgggttaggcagtcacaatgggtgaagggtctggcctctcattgtccagatgcaatgatctggtgagtttcagttccttgatactgtcttggaagcctgatggttggtttctggagaaaggaactcaaaaaagacaaatgtaactttctcaagtttcaagaccagaagggtcagtttctatgtttattcaaattaaatcataaacatcagttctatgggaccattgagcctgtttcaattcccttaaaccaaagcctaatccagagcagggccctaactctattcaattctgtgaaggctgaaataggtgaggaaactggagaggaaaagtttgaggccagtagaagtggggtcatgaagtttaaggtaagaaacctctgtaacaaaagagtgcaaggtgaagcaacaagtgctgatggacaagctacaagctatccagaagatctaagataattcatgraagtagctaaacaacatatttccaatgtagatgaaacatcttctgttggaagaagatgccatctaggattttcatagctagagagaagtyaatgcctgactttaaagcttcagagaacagggtcgggcgtggtggctcaagcctgtaatcctagcactttcggagcccaagacgggtgratcacctgaggtcaggaccttgagcccagcctggccaacacggtgaaaccccgtctctactaaaaatacaaaaattagccaggcatggtggtgcatgcctgtaatgccagctactcagaaggctgaggcaggagaatcgcttgaacccaggaggcagaggttgcagcgagctgagatcgcgccactgcactccagcctgggtgacagagtgagactcattctcaaaaataartaaataaataaattttttaaaaagtgaagcttcagaaaacaggatgactgtcttgttaggggataatgcagctggtaactttcagttgaagccagtgcacattcaccattctgaaaatgctagggcccataggaattatgccaaatctcctctgcctgtgctgtataaatggaacaacaaagcctgcacatctgtttacagcatagcttactgaatattttaaacccattgctgagacccattgctcaggaaaaaaagaaaagattgccttcaaaatatcacatctcatggaccatgcacttggtcacccaggagctctgctggagatgtacaaagagaatcacgtttcgatgcctgctaacacagcattcattttgtagctcatggatcaaggagtaattttgactttcaagtcttattakttaagaaatacatttggtaaggctatagctgccataggtagtgattcctttaagagatctgggtgaagtaaattgaaaccttctggaaaggattcaccattctagatgccatcaataacattcataattcctggaagcaggtcaaaatatcagcgttaacaggagtttggaagaagttaattgtaaccctcacagatggttttgaggattccaagacatcagtggagaaagtaactgcaaatgtggtagaaatagaaagagaattagaggtagagtctgaagatgtgactgagttgctccaatctcataataaaatttgaacagatgaggagttgcttcttatgaatgagcaaagaaagtagtttcttgaggtggaatctactcgtggttaagatgctatgaacgttgttgaaatcacaacaaagaatttagaatactacatcaacttagttgacaaagcagcagcagggtttgagaggatttactccaattttgaaagaagctctactgtgagtaaagtgctaccaaatggcatcatatactacagagaaatcttttgtgaaagactgaattgatgtggcagatttcattgttgtcttattagccaccccagccttcagcaaccaccattccaatcaatcagtagtcatcaacatcaaaaagatattaagtcactgaagactcagataattgttaacactttttagtaataaagtatttgctaataaagtatgcattttgtttttcwgatgtaattctgttgcatacttaatagactatagtataatgtaaacataacttttatatgcactaggaaaccagaaaattcgtgtaactctattacaatattcattcactttattgcagtggtctggaaccaaacccacaatatctccgaggttttcktgtgtgtgtgtgtgtgtgtgtgtgtgtgtgtgtgtgtgtgtaaagaaagatagagaattgactcatgcgattgtaaaattggcaagtctaaaattagcagggcaagctgacaattctggtaggagttgatgttgcaatcttttttttttttctctttataaattttaacttttagattaaggggtacacgtgcaggtttgttacatgggtacattgcacgacactgaggcttagaatctaaatggttctgtcatccaggtattgagcgtagtactcagtgggtggtttttgagcccgtgatccccctgcattgttgagtagccccagtgtctgytgttcccatgcttatgtctatgtgtggtcagtgtttagctcccacttataagtgagaataggcagtatttggttttccgttcttgcgttaattctcttaggataatggtctccagctccatctgcgttcctgcaaaggacatgatttcattcattttatagttgcatagtattccatgatgtatgtgtaccacattttctttatgcagtccactgctgatgggcacctgggttgattccatgtctttgctattgtgaatagtgctgtgatgaacatacgagtgtgtgtgtttttgatagaacgcattattttcctttgggtgtatatccagtagtgggattgctgagtcaaatggtattatagttctgttttcagttctttgagaaatctccaaactgctttccacagtggctgaacaactttgcattcccaccaacagtgtacaaacattccctttyctgcacagcctcgccaacatctgttacgttttgactttaataattgccattctgactggtgtgagatagtatcccatggtgattttgatttgtatttctctgatgattagcgatgttgagcatttttccatgtttgttggccacttacatgtcttcttttgagaagtgtctatttatgtcctctgcctattttttaattggattgtttttgcttgttgatttgtttaagttccttgtagtattgcaatcttgagtctgaagcagtctagagacagaattctttcatattcaggaagctgagtcttaaggtcttcaactgattggaggaaacccagcatgttttaaagggaaatctacttttttcaatgcctagtaatttaagtgttaaccacacctaggccaggcacrgtggctcatgcctgtaatcccagcactttgggaggccgagacaggcagattacttgaggtcaggagtttgagaccagcctggtcaaccagcctggccaacatggcaaaaccctgtctctactaaaaatacaaaaaattagccaggcgtggtggtaggggcctgtaatcccagctattcagaaggctgaggcatgagaatcgcttgaacctgggaggcggaggttgcagtgagccaagatcgcacygctgcactccagcccaggcaacatagactccttctcaaaaaaaaaaaaaaaaaaaaaaaaagttaaccacacctaaaaactgctttcacaataccatctagactggtgtttgaccccaaaatgggcactatgacctggccaagttgacacataaaattaactatcacaatttctaaagagaaaccttattagccttgaggaaaaaatgtattaaagaagttctctgccattaattcagtaggcaagatctttttttttttttttgagacataatcttgctctgtcacccagactggaggacagtggcaccatctcagctcactgcaacctccatctgccagattcaracaattctcattcctcagcctccccagtagctagaattacaagcrtgcactgccatacccagctaactttttttttcttgtatttttagtatagatggggttttgccatgttggccaggctggtctcaaactcttggcctcaagtggtctgcccgccttggcctcccaaagagctgggattacagggatgagccaccgtgcctggccggcgacatcttttatattcactgaacagatatcacatatttagtagttcttggcttgatataaaatattgtcttagcaaactagtaaacagaattctccagtttctgtgaaaagcaaaagctgmggtcaaaggcctgaaattataaaatcagaaatttcagtgagttgcatgaaaaaattactagcaaatgacaaaatcgttagtaaaagagccatcttttataattaaacaatgaaccccaaaattcaaaagtaaaaataagaataatgaatcatatgaaacatttgacgtttctccgaagaaataagtctgtgtgccattttctcagcagtcctatgtaaccggggcaacaatcagtagtaattctgtgcaggaaagcagtgtaactctgatcctctggccttttgagtctgaatcttatcttgcctcttacacatgatagctctatgaccttagaccaatcccttcaccccaggaaaatagtatctactttgtaggtgagaattaaatgatctctggcagatgcttagtcccaagtgatcaatagatgttaattgctatgttattttcacattatttttataatcagaaattataaaaagtttagtggtagaattagaaaccagagtcagatttcagactcgggcaatgtatttgtttgttgtcatgtttctcgctgtctccatggattgcagccctgggcagtctcggatggttatggagcatagattttggaatcagctctgtattttggtacctgcaccaaactgctggcaccatggctccraggatttatctcaggttttgaatccatgtccttatctgtgagaaaaagaaaaacaatgtccacattataaatgtggtgatcagttcattacttaactgattaagtaggttaaatgagtaaaatatgtatgtcgagtatcaacttcataagagctcttcacaatttccttttcttccatttaccataatacctgagcttgggagactgacttttagcatgaactatcttcatagcaaccattaaactggaaaaaacaatataaaacagttatttaacatgtctagaaattgttctatggacttgcagcaaatgaggaatcatttgtccaagaaaatctaaatcatggtaagaacagtgagagtctaaggcattcgaatcactccctgttgtgtcctattacgtcttatgggagccgctgcaggagctctaatccagacacttatggtaatgaagataggagcttccactctcccaagctcctacgctgaggttatggcttctcactgagtcagcaggctgccagaattactcattccaccacctccagcttattgcagacgttctgttccagactaacaatgcagataagagggggctccctttctcaacacttccttacttaaagggcagatgctccagctcaggtgtagccaaccgagaatgctgggccccagtgcttccactctagctgattttagggcagagattctacaccaggagggagaatacatgaagactaggggccccccacctcagctccttcttacacagcaggagtgttgctttggaagaagtggaccactgtcctaatcctagctttaaccattgtgcaggtgcacagaagtcctgcccagagctctacagatctgcttgagaaggcagattttgtttggaacagaacatgaagaatttcatacctaagagcttcgtctgaaagaatagaggtctagatggagagcagttgagagggcgttcrcagctccatgatacagcagcaacaagcaaaatggctaagcaatcagaagtttaacagagagatcaagggaagaagatagccaagaaggatccttttgggatcataatcaatcccagaggttggaaggctgtgcataagcttactaggctgcacccactaatgagcatcagatcaggaggtcaggctgacgtggaaacaatccccaagctgtgtagggatccatgaatatatgctgtaagcctcactggcagcagggaactcagcgcaaccgctggccaccactggcagaacaataagatatgtaacccaggggcaactcatgggaagccaggctaaaaaataaaatcacctatattccttcatatagtctgtctaatagccacaaaataagcacaccagcatcagccgagttaactgcttctaggaccttgtatgtaagcaggcagaaacatttctgcctggtgtactgtgggcttccacctgcccggctggctggtaggctgcctcctctcaggcctttgagggaatggtggactttgacccagattctagagtcccaggtctccttcccagctttgaggccttgaatattttatctgccaccccaatctcaacagtggctcaccatatgtactctctccccatgtaaatttctttagaacccaaagcctcagttttttatggagttcttcttttgcttgaattggccaagactttctttacttccccccgaccaccacacacacacamaattgaaacaaaatacatacacaggccgggggcggtggctcacacctttaatctcagcacttttggaggccgaggcaggcagatcacctgaggtcaggagttcaacaacagcctggccaacatggtgaaatcccatctctactaataatataaaraaattagccaggtatggtggcatgcacctgtaatcccagctactccggaggctgaggcagaagaatcgcttgaacccgggggtcagaggtttcagtgagctgagatggagccactgcactccagcatggatgacagagtgacaccccatctaaaaaaaaaaaaaaaaacatagacatgcacatacacatatacagatcctcactgtattttatctctaaatatttcagttgtcttggcaargcctagagggagaggagagctaggagtatgaatttaggcatacatttttcctgtcttccatttctccttttatttttattatagattattcttatcatgttcyatgtatcatattatcacaaaccagatgaaattcactttggaggcaagatttggaggtactcaaaaagttgttcttcattttccagccttccatttagccctttgacgttgagacagaaaatacacggggaagtttcatttctatgaatatatcaaaaggttcctaatccatggaattggctggtgagattctgtttttatctcagtgatgctgtaacagccagacacaatttagttttactttacaccctgtggcaggagatccactgacaaattggtgacaaatttttgtgcttgatttttaaaaatggttgagagttatttacagataattgtgatagctgagttgggctatcagatgccttaaggatcaaagaaggatcatataataactgaacagccttttctgtaccaaaagagaagtttcccagagcttttgaggcaatttggcattccatatgctcaccaaggttatcatgaaagaaggcagggctgcgtggtggacaggacgctgacatttcctcttagyctagctctgccactccagaattacaagtgagtaaaccacagaaagttccccaagttcccgggcctccacttcgtcatatgtaaaaaggaatataacctcaccctttctttcatcctccagggctgtaggaatatggagtaccttgttctttgcaaagcttcttcaagtgtggctcctaagaggcctttcttgaaggcttattcatgtgaaaacattttgtaaacctcacacacacattatcagcttgctttgaaaggaattatactcatttgtctttacattctagtacattttttaaaacatcttgactcttagcccatttaaaatggataagctgaacttttatcaagaaaataattagaattgtcttctataaatagtattaaaaacaaacaatggtgagtatattttttaaatcaagccagatcatttttcatattccatttgttagcataatagttttaaatgtgctaattctgtttattcatgcatttttgctattaatctagaaagtggaactttgagctcctttttcacatgagcaaaactgtatagctttcgaataaatggtttaactgaactctgcagttctcctggaaagtaaggcggctgggcagatgagtcttgaaccatacccaaaatgcaaatgcaaagcagatgaatatattctcatcttcagatgatttcactgggcaagccaagccatcatattgtattacaagayggatttcggcagaatattgttaaggttggcttcatccccattgtgtgtgtttatgtcagcttctgcttctattttatttttaattagcatacacggctttcttcaattatggaaaagtatcaccagaccaaatatgattgtttttatttcctacagagtcacttaatgtctatgtcagctcataggcagagaatgtagaaattttgaatttgtctaataaatgtccattcctttatatttaaatttaaaaaataatgagactgggaatgataaaatctgctttattacttaatgaactaaggctaacttgaaatttttcttcagacttttttcttctatttctttaaattctacaggtaaaaactatattttcaggtgaaattgacttttgacgtagaaaaagaaaaggttttagaaacacagtttgttccagctatcagttgcattgatttcactaatttaattctggcatcaataaagctagtagaaatgactgaatgtaaaatttgaattctattgcaactattcagttagatagcttacccttgttagtcagttgaaggtgacattctggacaaaggaaatcagggtgagaaaggtgtacaccctctgtgagtaatgacaaacaaagtaatgtgtatgaactactcctatcattttaaagcaattgttttctaggaagtttgtgacttttcctacagattaaaacatttagtttaagatgtttatatttttctacaagacatacatgctattgaaatttttatataaaactttaaaaatgcctaggtgcagtggctcacacttgtgatcctagcactttgggaagctgaggcaggcaggtcacctgaggtcaggaattcaagaccagcctgaacaacatggcaaaacctcatctctactaaaaatacaaaaattagcctgatgtggtgacaggcgcctgtaatcccagctactcgagaggttgaggcaagagaattgcttgaacccagggagcagaggttgcagtaagccaagatcatgccacatgtttcaaaatagaagtctttttttttcctccaggagctaaagatatctagaaagattatatataactaatcttctgatgagaccgtaagatgatagtgaatttgtttaataaggaagcaaatagcacaattaaacttagagaattaataagtaatgtgctttatttggacattattatgtgataaagattggactgtatagtttaaaaatgtactcaatggatctcataggatcttttaaaaaatattcttaaagagaatacactacattccctctcctacttaaataatagcaaggcaattggaaacaaccagtaataaaaggcaagaaattgtaatggaagaacgcatatttgtagaagaactttaaatcacacattttaaaaaataaatactatttctgcatgtaatattgcttaagtggtattttagcaaagccaagattgcataacaaatgagttgaaatggaaaattaatctttcatgcaaaataaagacaaaaaaggggaaagaaagaaagcggaatgtgggttccactagtttcatacagtatgtaactattcatttgtcacaggagagaaaatatttaatcggttctgaactgatgcacacatactttatcatgtttagtgacttttagagtgtcagtttgtaaaatgtttatccaaggaatggacttctggcacatggataaaatgaaaagtgaaatgtttagttcataataggcatattttccagaatctttctgagtaactatccggagatgaatagaaagactacaggtctgtgtttatctggcttaggctggccgaccaggcaggctccagcctggtattaaaactgaagtgacatggaatgtctttgcaaaagccccaaacaatgacatcattcccttaataatattgataatgtagaacaaagttagagtttgttatttcccaatttggatttcttagttaactacttctaatcctggcagaagatttactgtctggaggcccagcagagcaaggcttcccaggtggaaagctgttgtttcatgccttttattttcgggccatgtggtaagttttagatacagcaacttttctttgtacaaatggattttcttctgtggctacattatccaacttttataaaatccattgactttcaacagtaggggagcccatgacaccctttgcagattttctggccttggaaagttatacaaaatctgaggtggagatcgctcctgaagtttgtttgttagcgttagcgcttttcaagtagaaggatttcaggattttctgattatgagaattttaatgtttttttccagtcttggttgataattataagagaaacatcaaagaattcctgccctttggaaaagttatgttgtaaaaatggaagctttcctttgtataaacttgagatccttcccaccccaatatttaaaaatatttgttggcctagaacagactaaactgtctccagaagctatgttctccaagttaacagaggttagaactcttaaacttttgtgccctaaaacctaaaggaagagtaatgaaatcactgtgtgtttgccggggattctaatcaccgtgctcttgaaatgcaagtagggcaagggctggagagggcgaagataataccagaaaggaaggatatactattttgtctacagttttgttttttaaaaaaatagaaagtagaaaggataagggctagcaaatgaggttatgaagtgtctttaggccgggcgcggtgcctcacgcctgtaatcccagcactttgggaggccaaggaaggtggatcacctgagctcaggagttcgagaccagcctggccaacatggagaaaccctgtctctactaaaaatacaaaattagcagggcttggtggcacatgcctgtaatcccagctattcaggaggctgaggcaggagaagggcttgaacccgggaggcggatgttgcggtaagctgaggttgcgccactgcactccagcctgggcgacaagagcaaaactccgtctcaaaaaaaaaaaaaaagaatgtgtttaactgtagtatcatgttccagatccattaggattgtccatcttgagaaaatacgcttcaagcaccgcagagattccagaactcaatagttaaataaattgagtctacaatcattgttcagaggaagaaaaaaatttttttctaaggagaatgaaagcatgagttagtgatttatatctacgttttataaggcaaatcagaaatcagctttagaagattgtcattagaagggctcatttgcctacaagttacaaaggatcaattcaattacattacacgcccaaaggcatttctcagaggcctccagaatcccatgcaaagggaagcagcctcaggagtgggggaagcgaagggaagcagcctcaggagtgggggaagcgaagggaagcagcctcaggagtgggggaagcgaagggaagcagcgtcaggagtcggggaagcgaagggaatcagcctcaggagtggggggagcgaagggaatcagcctcgggagtgggggaagcgaagggaatcagcctcgggagtggggggagcgaagggaatcagcctcgggagtggggggagcgaagggaagcagcctcgggagtcgggggagcgaagggaagcagcctcgggagtcgggggagcgaagggaagcagcctcgggagtggggggagcgaagggaagcagcctcgggagtggggggagcgaagggaagcagcctcgggagtggggggagcgaagggaagcagcctcgggagtggggggagcgaagggaagcagcctcgggagtgggggaatgggtcagatgcaagcacagaatctcccccatggcggcgtctagtgcctctgttaagatcgcgctctgagaaacaacgctggcattcaaatccaggtatagccccttttattttctttttcagttttctgactttggggaagttattgaaacttctgtatctccattttcttgtttctaaaatgagggcaatggaacggtgcgtggctagagttagcatattataattacttgatatcattgttacctgatgtttattgtagtgacctgccactcatggctctagtttgaattttcttcatgggtgttaatgcaaattctcaaaagggtgaatgtggttggttcctagataggtaatataagctcatgaaggataccagctcccccagcccggtctatagttgagacaagttttctaaaatcaatgtaaggaaggaaaatggaacattaactttttggggagatgggaagggctagtgaaacaatcaagcttacagatataaccatcctgaaaagagaaaatttggagtatattgagtgaacttgtttaaattgaagttttttcattgtgagagcgttacctcgagaaacgttcgtcgtctcattttttgttgtctactccggcatgcatcacatgtgggtaaactttaaaagtagcatgaagaaatgttttggctgatttccctaccatttgtcttgaaagatgatgtaggtatgggtttggaattgtagaaattacagctacaatactttttttttttttttaagaccaagtctcgctctgtagcccaggctggagttcagtggtgcgatctcggcttaccgcaacctccgctgcccgggttcaagagattctcctgcctcagcctccagagtagctgcgattacaggcgcgcgccactgcaccaggctaattttttgtatttttagtagagacagggtttcaccatgttggccaggctgttctcgaactcccaacgtcaggtaatctgcccgcctcggccccccagagtgctaggattacaggcgtgagccaccgtgcccggccacagctacacttttcttgcaaagttgtaatcggggttggagaagggaaatgactgattccagcaccgttgaagtcctgcatctgcagagagtgtcaaggagggagatagcaagatctataggagattaattaattcttccttcatttgttgtgagaattcaatgtgatcacatgatattttacttaataccataactaaccatgcagtaagcatataataaatgcagatttgttcccctaaagagtgtgcattcttctacctttcaaacagcaatttatttcaaaggtccaaggttttccacagttcctctcctgcctgctcctcctccaaatgttagcccatttgggtgagaccaaggtcacactcccattcctggtcacaaagtctcttaaggagaaatgttagcatatttgcaatgaaaatatgttttaatccctctagtaatactgtggcatggaaagttgcatctatactgatttttgacagagaaagggtattactggcacatgaaaccctagatgagcatgaataaatgtagatttcgcatcctacttccagaaaattgccaaactctattgtatattatttaacccactaaaacagctcccaaagttgactaggggttatttttaaatggtatgaaaatatattcttacaaaataatttacaaaatcttttttgttgtttttgtttgtagtcttgacattgttagcaatgaatcatgagtttttcggggaaaaattgatgaattgatcaaaattatctgatttgaggatattgcacgtaagttaaagagaatagggatatttgacatagttttcaaaattggtctaagaaatatttgagcaactaggccaaacattcttgatttattctaagtcttaagtagattcttaagtctaagactctaccagaaagaaaaggtagaatgaaaaaggcaataagaacaacagagattagaaaataatttcaataaacgggaaaaaaagaggaaattagaaagaggacataataaagacattgtgatagctacttgttcaccttgttttattctaggtttttgcagctgaatatccaaagtatcatatcccatgttttttttctgaactgcaagttagactttaccattttaaagttgatttttatttcaagcattcaatgatggttgaaagtatagtttaatattggtaatataggtactttgtagtcatttatttagagaaattaaagtatggatgcattaaaataaccataaaattatttttttaatattcaatctatgaatcgaggtgctgattgattcatagtttatgaatcaataaactatgattagtttacacgaaaaaaacttagattcttgagtttctcctgaagcctctcagattctccagtggtgtcttaggcaaaacaaaacaaaacaaaacaccagtgccttataggttgacaagcgtattttcaaaatctatattcagggctttctaatttctgttgttgtgagtgttttcaaaactcgtgcagcttagccttccttttcccctttcacatcccatatgctcctggttagacatgcataaattaacataacatcccaaatctctcaactgtatttgaaatatttgttttgtccggtgccctatttaagtggctaagccgtggtctcagatatgagattgtagagtttcaacttccttttctcttatttttttactttttatttttttgagacatagtatcactttgctgcccaggctggagtgtggtggtgggatttcagctccctgcaaccctcgcctcttgggttcaagcgattctcctgcctcagccaccaagtagctgggaccgcaggcgtacaccaccacgcccagttaatttttttgtgtttttagtagagatggggtttcaccgtgttggccaagctggtctcaaactcctgacttcaaaggatcctcccacctcagcctcccaaagtgcagggattacaggtgtgagccactgtgcctggtatcaacttcattttaaaagctacctctatacttagggtgtacgtttgcataagacattttgcatttctgtattgttaaaagtgctatttgtaaataatactgtagaaaatgtgaaattattttttaatagattacaagatatgaattcccaatgtaagtaagtggggtcaaatgtcttttctgtcctttccagtaacatatacaggcacaattattcagcattgtaatatttgtgtagactccataaattatcctgtattgtagtattgtagtattttaatagactaaataatgcccaaacaataaggaaaatagcaagatgttaaatagtgataaatctttattgtctttattggtttactaaatctatagtcagcaaatattacatggaatcagacaatggcattttaaaaataacctattatgtatttcagggtcaaaatgtactagcagtgtgaggacatgtatatctaagtaatttttatattaaaatgttttaaaaatcagtagccataaataattacacactttagtactcttttgaccaaaaaagctagtttttaaagaaaatgtcaaaattcaacacttggtagcttacttaaggtataataagctgaacatttgatgcaaaataaatttagtgaagttaattaaaagatgtacagcaaagttagtaaaagatgaaatatactgtctcccagataacagtacataaatctgaaaaaaaaaaatagaaggtttatagctagtggatatttaaaaaacatcttaaatgtagaaaaatacaagtgtttcttcttttgtaatttttaattccatccaaaaatatatattcaagtcccagatcagaagcaaacactattggtaagcttttctgtttgaaattcctctctgagtggatctaacgatctgaaaaattgaaaatcagtgacagctgcaaaattgagacaatttgcaataattgaagcaaacttttaaaatccataggggcaaactcagccttaggattataaggttctgctagaagtaagatctggatttctggatttccagaatctagacgaagatctagatttctagatttttttcctcagatcatcaaccaaataaattccaaaaggattaaggaagtaaatgttaaaatttcaactttaactagaagaaaatattgagaaattttttgggatttagaaattgggatttttgtcagcatcatagccacagaatattaacatttgtttctatttctgctacttatttctaagtgataaattgtctgcttttctgagcttattgttatcgtcgtgtttttacacatgtatattgcttcttcagttcatttccctttttattcatttttatttctctcaaagttgtaagtgtagacatagttgcaaaagtcaattagtaccacaaggctgataacaaaaagcagcagcctcctgccctagccaaccctaccctctyttatatttttctcagctgttttctctgatactttctaccatggttttcagtaacatacttgtgctgatgtatcattatttatcaattaaggcattttctgttaatttatgataatggttgatgtaatttttatcttactctttcttagtccccatcctacttcttcttcttgtattacaatttttagtcaggaaggttgtctagaagatatacaatataaattttcagacacgcaagttctcaaaacacttccctcacacttatttgatagtttgtctagacatagactcctacttgaaaattattttcctttaaataattgaaggaattacttcattgtcttttagtcttcagggttgcttttaagaagtctaactacattcggccgggcgcggtgtttcacgcccataatcccagcactttgggaggctgagacaggcggatcacgaggttaggagttcgagacctgcctgaccaacagggtgaaaccccatctctactaaaaatacagaaatgagccaggcatgctgtcacatgcctgtaatcccagctactcaggaggctgaggcaggagaatcgcttgaacctgggaggcggaggttgtagtgagcagagatggtgccattgtactccagcctgggtgacagagtgagactccatctcaaaaaaaaaaaaaaagtctaactacattcttattgacatttccttgtgtttgatctgttgttttttttttttctctgagaagcatttcatgttctctctgttggcgtgaaaacatagaacttagggattgcttggtgtgtgcctttttgtttactctgctggaaagttttttctggttggagttccatgtccttctgttttagggttggtcacaaatgatccttaggtttctgatgtggatgattaacatagcatttctaaaattgaaatgaggataaaatgagaagtttgagatggataataagccagccgtgtagaaatgctgagtatttggttcagtgttcaagtccgaagctcaggagtgatgtggcaggcggctgaactttgtacatcctcaatataaacagataggagcagaaagagagagtccacgtgatcaccttaggagatggtgtccacagatgatcagcggcctaagaccgaagccatgagaaataccatatttgagttgctgctagtggaaaaggatcacataattgaagagggatgccaattcaaagtgaaaaggggagaaataggagagtgttacattacagaggtctaggtaaacaagggtagcagaaaagctcaagaataattacaatgtatgcctaaagacaaaatattaatttgtgatattaatgggagatcatatgcacccttaacaaaaattgttttatttgaattttgacgcactttgagtaattgggtcaggagctgtattgcaacggactgaagaaaataaggaaatggaaactgaggataagctacttttattagatatttggagagggaaggaagaagagagattggatggaatgtagagggagacgggtggtccattttttaaaaccacttttggttgctacacatgaagatccagatatactgaaggccataactggagagaaaatctgccttgtagggtagacaattattgtagtcacaaaacacaagaaaatgatgatgtagctaactagcagcagtgaggcagtgaagcagttgagtaaagtgtaagtgatgccagaaactttaaaaaaaaaagtgtgacagaattataggaatacagtggttgggaacagcactggaagaccagacatagggaggctccctttcttgattcctgaatttgggagggtaggagatgggaaatgcaatgcttccggagaagatcattatggatgatatgagtgtgtctggtgaaagccatgctttgattaagaaacagtaggcctggtgcggtggctcatgcctgtaaatcccagcgctttgggaggccgaggcgggtggatcacgaggtcaggagatcgagaccatcctggctaacacggtgaaaccccgtctctactaaaaaatacaaaaaattagccgggtgtagtggtgggcgcctgtagtctcagctactcgggagaatgaggtaggagaatggtgtgaacctgggaggtagagcttgcagtgagccgagatggtgccactgcactccagcctgggcgacaaagcgagactctgtcaaaaaaaaaaaaaaaaaaaaaaaaaaaaagcagcaaataaacataatagagaaggaaagtaggggtataaatgtccttgaccccaaccaaataatcaggatccagagggcttcagaatgaagttggtagagctagtcagtgggtggtttttatggaacccgatccatgggggtgtcattgcaaggagaagaaggggagttgggcttgggaaggagttatatacttatcggtgaggaagggtgggttaaaggctcataggagtgacatgagaactgaagagcatcctgggcagaattattttagtggctagtgccagtaggtggaccaactcatcatgaaatgttgtagctcagcttctgcatcttgacctctgagatatgttggccttaattggcttaggaaaggctaatagagatcctgacttacatttacactgagagaagggcttgtttcctttgggtgagagagaatatgagtacacacagttaaagaaatagaggggcattgtcaggctggaccagagaacatagaaactcagtcaaagtgccccagtagcttacaatggtgtcttcttggtgacattgtcttttcatgtttggacatcataggagatgggccctgtagattcggactagaagccaaagaatttttctttatgttataaactgcattcgtgccttcaaaaatgttaggatgccaaagaatctaattagcttgcaaatacttctatggtagtgcttgttctctgccttaacaactgccgtgaggctccttgctcactcttataagaaagatattccactcagtgtggcaatgctatgcggttttcaacatgccaggaatatcttacaaatatcgttgggctagtgaaacagagatttatccaagcactgaaggaacatttttaaaatgccaaatagtatgtgatgattattattttctttttttagcttcacaatctctgaatttaccccagggtgaaatttaggtttgtgtggacttggttgtggtgagtgcctcctacgtgagaaagggagttctgtcatagttctgattgtcaatgtcaccgaagctaaggttggatcgtctgtgccttttgtatctatatctaagatgaggaggggctgcagggctttggaggccttagccagctggctctccccatgttctggtgatgaatgggtagggtcattcttagtacccattttgcaggtgaggaaatgaagagagagaacttcacgtctgttaaatgacttcaccagtattgtggagtgcggtagcacagagccgagaatggaattcaggccttcgtgaaagctgaatgctttgtgagtaatagtctgctctgcaatcctggaattcaattacgaaattttaaagccaaaataattaataaaatattggcatttgtagggatgttttgctgctattcagttctgccaaataataatttgtcccttttttcttatcgtgtttctgccctgcctaccatctaataaccttctaaggataaaactagcaacagatgttaaaatactttgtaaactgtatggcaacatgtaaataggagatattcacactggtattatttacaagtatatgtgttttgttgcctttaattatatcagtgaaaatgtaaacagatgaaaacaacacaaatggtacttgtaagcttataaaaatctactattttgaccctgtggtggcagagttttatatctagaagtggaacccaactgtaatagtaaagtttgttttttaagacaagtgggaaataggtcatatatcagaagaacttgcttgtctaggataactttatacatctttctgaaaattgcatttgagaataaatgtctgacattagaaatgccatcatctccccaagaaacacccttagcattgatgcagcttagcagaacttacatagcattgaccacaaagcatcctattctgaaaagaaatggctggaaaacttttttaaaaatatgttgaatagcaaagtcttggaaccaacccaaatgcccatcaatgatagactggataaagaaaatgtggcacatttacaccacggaatactatgcagccataaaaaggatgatttcatgtcctttgcagggacatggatgaagctggaaaccatcattctcagcaaaataacacaagaacagaaaaccaaacaccacatgtcctcactcataagtgggagttgaacagtgagaactcatggacacagggaggggaacatcacacaccaggacctgtcagagggtgggggcctgggggagggatagcattaggagaaatacctaatgtagatgaccggttgatgggtacagcaaaccaccatggcacatgtatacctatgtaacctgcatgttctgcacatgtaccccagaactttaagtataataaaaaaaaaaaaaattgaagtctccacctgatgttggtaatctatcacatgtgtataatgattcttgtaatatctagattatgcagcacctgcactcggtgtaaaaacaatactgttagcatcttagagactcagcttctgaggaaagcattagtcataatacacctagaaggtagtaatgataagcatttaattagaagtaggcctgaagtttgcagtgcaatgcagtaagtatttaccgagtgattcatatgagtaaggatgtgatagctgctataagagctgcaaagtttattaagatacatccctgtcctggaaacactgccagcttcgatgagaatacaacaatgttagatatattcgttttggaagatacctttcccccagttattttcatttcacagcttctccagcctccttcagcttctattctccctctttgcttttctgtctcaattttcctgcccagccctaaattcacagagtaaatccaccagaccagagccccttcctctttctgtatgtgaaactactcctgcacacatcagtctccttttctaccaccagcctgggggaagtaactcctcccatcagtatctcatctggatacttctctctcctgatttcaacttctcccttctagccattaatacatttactttattatcataaaataacgacttaagaaagaaacaaaaagcaattccttgcctgtacattccctttccactcttttttttttttttttgagacggagtcttgctctgtcacccagactgcagtgcagtggtgcaatcttagctcactgcaacctccacctcctgggttcaagcgattctcgtgcctcagcctcccaagtaactgggactacagacgtgccaccaccaaaaattagacactggctaatttttatatttttagtagagacggggtttcgccatgttggcccggctagtctcaaactcctggcttcaagtgatcctcccacctcagcctcccaaagtgctgggattacaggcgtgagccaccatgcgcccagcctccctttccattctttgtagccaatcttctcctcctcattccatctgtacttatgtcccttgttgatatttatgttatttaatcttgcctcattttctgattttgtagccagtcttttaggatgtttctctattttattggtctttgaaagaaccagaaattttgatttgttgattatctctctcttcttttttttttaagttgtttttttaattggctttctatttcacaaatttctgctctttaatattctcttatttctgcatcctgtctctcctggctttgtccgttgtatgaatagttcatttatttttaatttttctttttttaaaatcatatactcagagctctagctttgccattaagttcactttaacaatatcccactagtttttaaatgtagaatagattttattgttgttcagttataactttgttattttctctttagctgatgagttacttatgtgtatattcgttgtgtctgtttcaaatgcatgggttttgtgtgtttgctttgctggtaattattttcctattgatttacagtaaattgtattacacttagtttgggatctagtatggaacctgtcttagtaaatatttgtatgtccttgagaagaatcagtttgccctgtgtgtgattctatgatatatattctcatccgcatattttctcaccctttaacatctctgagactggggtacgtcttacagtggatggcatcttataatcgatgtgggctcgatttaaagtcagcttcttccagagaggatttggatttgtgtgtgccattcaactgaggacactatcaatgtgaagctactttaattaaattccctgctttagcttgagagggttttgttttgttttgtttttatagggcctggtactgtgaattcagatggaaaacctgcatgatttctgtctggcttatgagtcatatttgcaagggaactttttttggtgtcatctgtttgcccagtgccagagttgaaacaagtttccttactgtccctttcagcatgggaatttctttctcattttcttttacrtgagtcctttggtatctcagtttatggtttgcatatgggagcaactcctctattaagactcttcatattggactatttgtctttcttagtggtacataaaatattatttttaaaatccatgacctgctaaataagtgaaatacagcatattttaaaataaaatttatttatcgtaaatttcacatctacatcattactaatttgtagaatcttctgctataattgtgaatgtttgtttcatctttcaattccatgacgttttcagacaatatactctatatggttcttatcatcctgatggaatgttcttttttaatcattatacaatgtccttttttattgtcattaatacacttcaccttataatcctctattgattaatgcttcatcacgctttcttttcacattttcctggcatatattgtccatctatttatttttacttttctgggctatagtgattaagacatgtcatttgtaagcagtatttattttatctgaatttttattttgatattcaatctgatagactttgtttaatagttgttttaaattcttttatatttattatgattttttttttttttttgagatggagtctcactctgtcgcccaggctggaatgcagtggcacaatctcagctcactgcaacctccacctcccgggttcaagtgattctgcctcagcctcccaagtagctgggactacaggcgcccaccaccacgcccggctaatttttgtatttttagtagagacgggatttcaccatattggccaggctggtctcgaactcctgacctcgtgatcccctcacctcagcctcccaaagtgcagggattacaggcgtgagccaccacgcccagcctattgttgatgtatttttatttattgctattaacttagtagtgtgtttttaagtttccaaacttaagggattttcgaagttccatttctttcttaattacataaaggttacataaaagaagactgtctgcataagaataattctttgcattttttgagatttgctgtatggtccaaaagatggccaacgtgtataagtatacacagtgttccagtgttggatgtagtgttctattttattattttaaactgactcttaaatattcagtatctttcctgattttgtcagcttctctctgtcagttaccaagagtgtatagtaaagacttatagctgtgcatggtggctcacgcctgtaattccagcactttgggaggccgaggcaggtggatcacctgaggtcaggagttcgagaccagcctggccaacatcatgaaaccccgtctctactaaaaatacaaaaaattagctggacatggtggtgggcgcctgtaatcccagctacttgggaggctgaggcaggagaactgcttgatcccgcgaggcggaggttgcagtgagccgagatcgtgccactgcactccagcctgggcaacaagagcaaaactccatctcaaaaaataaaaaatataaatataaataaaaagacttacaggcagatatgtcagttactccttacacttctgacatttttaccctgtgtattttcaaatgctttcgttttatgcctacatatctagagtttttcatcttcctggttaacctaatcttgttttcagtgctatctcttttctggtaatgctttttgcctaaatttgtactttgccttatgttaatattggtacatatcagctctttttggttcgcatttgtcatagcacctccacaattttactttcaacctttctgtgtccttatgggcaaaaaaaaaagtgtgagggttattcctcaaacacctgagggcatcaatcccagttgtgtacccagagtgggtgattgaccactacaagctgtacttttgccaggattccattacttctgaccgtgtaagctcccgcagtaatggaagtggccatgtggaagctgtgggtctctggaaatcagtgtctcctcagaccctgtgtcctgtggccctcgagacatctgagtatttcccttttgcactatacagtctactgagtgatggctgcaggtttctttgtagaaggactaggggaaacattacagtgtatccttgctaccatgtttcagggtccttcctcacagggatgcaattcctttggtcagggggtcctggatctgaaattggctcagttctgggaactgatcaaggaatcatgattttctatagagcagccacctgtagcctcctgttttcccactcttgcccttttctgtggtcatagaggttgagcagcacacttgtcatttgcccctaaggatgctatgctccactaaccatctccacaatccgctgagagtcaggcctccttggctgccccttggctttttggttattatggtaattgtggtacccgggcttctggtcattgagctttaccacttggaccctattatttaggatcctatcatcccagtggattttaatgagcccagctctgcaacctcttcctacagagaagagctccaactgcactgttcagtgatgctgatacccctcttcctgatgcattctttatggcctctgggtggggcctctgggaacttccatggataatcctttgctcagtttttctggactcacacaatgcatgctggtgtgcctacttctctcagcttccrcattccttcctcttccatctgccagggcaaccccagcacacctactcctctttaaattggctatcactcagaagagacctataagagaagagcctcttcctgaatcgctccactacatggtagctaattcttgcatcaccttccatatatgatctcttaccccttttcaggcctagcacttccctagctgggtcttccagggatgtctccttaattgttgtcctattgtcctgcagccaagagaagagctggtagcttctgagggggcgggccatttgttgcaaggtgtgatggtgttcacaccaggacatttttactaaagatatcacctgagctaacctgataaaatgtgctggtgtggatgccgtcacagctggtgtggacaccaggatattttatcagattagctctagtgatgtcttcagcaatcacatagccaccgtgtgccagagactgcccatgccccacattcccacacaggacagggggccggtaagagaacctgtcccagaactccatctcagtcccggttctcgcagactacttgtgctcctgctgttagttcaggttctacaaaaagcaagtgccaagattggatttatttggaaaaacaggaagggagccagaggaagctgggacagctgttagacctgatgcaggtccaacctccatggaggagagggaaggaaggaaggctgggtgagaaaagtcttggactgcagtgcaattataagaaagttttgtcgaagccaatggggagtccttgagccaaagtcccctttagaggagtcttgtgtctgtaggattgcacttgtatcagtattcttgcagctcactcactaccctgaaacaaacctagacctccgtgcaaatgaagtgattggtttcagagcatggcagccaaggcccttggccaacttttttttcctgcaattggaaatgtggaagatctgaaaggtgtgtacctttcagatggtacacatctgatgctatggaaatgatacatttcatttcgtttaattttaatgtctacctttaaattaacaatatttatttaacatctttgtcccttttccagataatataacacgttcaagttacctaatttttattgccaccattctacaaattgttgaccaataatttaggtctgtctgttttatttttgtgaaagatgggagatcggatgtctatgtttatgttcattttttcttagaatggacatcaaattttccaacaccgtttgttgaaaaaactattctttctccattgagttgcctttgttcctttgtcaaaaaatagttgactatatttgttttgtggggggtgtgggtttggcctggcaataaatattttaatttttcttgtttcattttttattatgaccaataattttcaagtttatttccttgtttgtttaaatacaaatctaaaccacaagcaggtacaaccaagacattttatctcatatttacactcctgtcagatcctcttccaatttgatgaccactgaccaggctagcaggggatgggagaacattttcttaggtagcagtgttgtgaggcctgtggtgggggtgggggaaatcaaggacaaggacaggctctcatacctgtttccacatttacctgggaccaggatgggcaggagacaccaggtcatggctcctgagcaccagcttcctggtttgaagaggcagagagtgagaactggacctgcatggggagagaggagagagccacctactcctcctgcagttggctatatttttatgagtctactgggcactctgttctacagtttcattgatctgtctgtctgttcttttgccagtaccatgctgtcttgattactatagctttatagtaactcttgaagtcagatagtatcagtcctccaacatcattttgcagtatggtgttggctattccagatcttttgcttttccatataaattttagaatcaattgttgatatctacaaaataactcattaggaaagtgattgggattgaaatgagtcaataaatcaagttgggaagaactgacgtcttgactactgagtctacctattcatgaacatggagtatctctttatttagttcttctttccaaaaattgatttctttcatctgagttttgtggttttcctcatatagatcttgtacacattttgttaggtttataccttagtattttattttttggtgatactgtaagttatataatttttatttcaagttttaattattcagtgctggtatatgggaaagcagttgagttttgtatattgacttgtgtcctgcaaccttgctatatttgtgtattagctccgggarttattttgtagatyccttggcattttctacatagacgtattagtcttcaaatagggacagttgtatttctttctttccaatgtgtatatcttttatttccttttttgtcttattgcaataaatataagacaaatatacgctgactataatggtctgattcctaattttaggaacttttcttagttacttgatctttgggatcagcatgggtctcagcttacattgtccctcaaggccagtcagtacctgaaaatgtgtcacttagattttcaaacttctcttccaccttttgtatgaactaatacttgttcttgggttgaattacctttttttctaagagcarttggctgctctgaggtcacaattaccctgaaggtgtaagtaccacagttcttcatttcaagataaaagaaatgccagtttatcctcttaccattctgaattcctctgatttttycattgcctgcaacaaactgagtgttggcataaaaatatctttgtgctttttagaagacatggaggatccctcaaaggcttttttaataataagtgaaaggggatttattcttccttattggagtaataaaatttgttacactttatgtaagttcctatggagggtgggggaaggaggtggaaatgaagacgatgatttaggattccaaaaattaaagttacttgtggaaggctttaactgaaaatagatcttcctcttgagattttagtttgttctgaagaataatattacaaaatccaacaytgcacaataaaaaacgcaaaagcaatggaagatttatgatgatgttcctttgcagttcgtttaaactggtatgctctcttggcctcgtctgtcatactgagakgctttatgatcttggttctgcctatatggattaaattaagttatacatgtgcaattctcattctgcctgtaaagtctcatttggtactcagccttttttgctgtactcccaaaggacaatgatattgggagaagaaagtagaggaaaacatcacagaagaaccagagagaaaggcagagacccccagggtgtatttagattgggccagaactgaattgctgactcgccaaaaggccagtccaatcatagatgtgtgcataagaaaagacctcacgagtcccttcatgtctacccttcaacataaacatcacagtgtctcaaaatagccagaactgctgcattgacagttgagatagggagggaggacattggtcccaaggctggttggcattcacaatagagggagaggaaattaataaatgatctgttcctgtctacacaaagcttggacaccccaacagaacataaaaacaactcagatctgaatcgtgatgttagttttactgataactacaggtatgtttgtggtgggaggaaagggaggttgaattaaacaaatttatttctttcagcatgtctctttgcttaactgttgattctgatacgtctgttaaacaggtggcaggaagctctgtgtctgtgtatacatacataggtgtacatgagcaacatgtcatgaaatatgaaatagagtcatrtgaaagagtcaaaactaaaggatataatttctgattgtccatcttttatgtgattccagggaaaaagattatatttttatttccatataaataaaatgagaaattctcttggcagtagctactgcagactttcttctgagccaagtgagatagactctatagataagtaaggagaaatgggtaagggtgatcaagtcactgtggcactggcttgctgtactcttggaaaccagacatattgacatcagttttaatttatataaatgccatgagttatctcataattatgtggggatatgggaatgagggaaaggaattgctttccttaacttctctgtatgaagaatagattccttgtcttatcacactccaaatacaccaggatggctaaagaaggctcttttatttctggctgccacactgataacagaaccttcactcgtagaccttactgtggacctggcatccccataaggatgctcacaggtgtctgattgggtaggaagtactgtcattcttttataaatggggaacaaagctcaaaaaagttatgtcgacaaagctccaccactctgggttagagacagaactaaatcttagttatccatattcaaagtccacagaagacatggcttgaggttaatagactgcttctaatacgtagtcaaaaaatttgcctccagaaatgtctaggccccttgttcaggagacagtcattctttaagtaaacattcttcaaacaactcctgtgtgccaagcattgttcaggtgcctgagaataaagccatgaacataaatgctaaaaattccttaaagaggttaaatcctagtggagggagagccatagttatcacacatagaaaatatcttgtgtttctgatggcggtcagtgctgtagagaaaaggaaggaatattcaggggtggctgttgtggaaggttgggccaagtgttcagcttttactttggcttctcatgaggatctcactaagcaaggatttgaatgaggtgagagagagagagagagagagagagagagagccgtgagacacttgggtgaagagcattccaggcagatgaaaaacaagtatggcatcaaaacgtcatgctctgtgaggccagaatgacagaagcgaaaactcggtaggtaaagatgggatattactgctctagttggaatgggaagcctctctggcatcagctagccaaaagtaaagtaaaaacacttatgattctgaaagtcagctcatctttagcttactccccccaccccagttgcttttgtggatccattctttttttctatactcagaatcatttccggagctacctgccacacatcaaaaggtgctctcttaggttgtttagatatgcttctggttgtcgtagaataaayatgagacagtgcttatcattttctgaacaggatcatgaaagggtttaccctgatcaggaaagggtttctccttcttgaagcatatatttggtaagcagagaaactgttgagaaggagatccaagattgagagcatatggtaatgtctgccagcacgtgaacctgagggagaacgtggtgaatggctttgttctgtaccttgactctttgatttgttgacccattagraatgtttttcaagaaagtcatcaaccagagcttacacttttctttgtcttcactctgccatgagtagtgcctggcatatagttactacctgctccctgatgaataagggcaaagctgtagtgccctcttctaagactacaacagagtaaacaccactaaaattactggactttaattcaagattttaaataatacttgaacgagagtaaatcctgctcatagatgggaaataactattggtaataccacagtatgctatttaaatagtgtttcatttgcagagaatatgcttctccaaagagatcataacttgtggcaagaaaatgctattttaggataattactagcacctcttttggttgtaataaaaaccaaattttgagtcattctttatgtgcacaattcccagacagagaattgccttaaaaacagatgagaagttgaaaagaatataaaatagttctcggtttgtggtatggcctcttttcaagtaaaaaaaaatcaaagctgtctatttttattatctgtggaacataagtcatcgtcaaaaacaatatccagtagaagtctttaaagcaatattctaccctcttaaaaatatttctagaatgccattttaaaagatgtgtatagctattactttgtggtaccaatgttgtgtgtatatgcacttgtgatttttaaaaatattactctattatggaaaagttaaaatatgtgcaaaggtgaacagaatagtacagtgaccctccattttatccatcactcaacttcaacaactatcaatttgtagtcaatttggtttcctctataaccctacccgcttgcctcctcccatattgtttttgaaggaaatccccaacagatataatttcatccatatatattttagtatgtttctctaaaagatacccttttattttatttatttatttttaagatgcagtcttgctctgtcacccaggatggagtacaatggcatgatcttggctcactgcatcctccgcctcccgggttcaagcaattctcctcctgcctcagcctcccaggtagctgggattacaggtgcgcaccaccatgcccggctaatttttatatttttagtagagatggggtttcactatcttggccaggctggtcttgaactcctgacctctggtgatccacccgccttggcctcccgaagtgcttgggatcgcaagcgtgagctaccgtgccaggcccaagatacccttgttaaaagaaagcatattcaccaccagtttcactcctaaaaaatgattaggccctaatatcaccaaataccaagtcattgttcaaaaattcaattagttcatgtatgttacaactgattttatatatatatatatatatggttttttttttgtttttgtttttgtttttttgagacagagtctcgcctgtctcccaggctggagtgcagtagtgctatctcggctcactgcaagctccgcctcctgggttcacgccattctcctgcctcagcctcctgagtagcttggactacaggcgcccgccaccgcgcccagctaattttttgtgtttttagtagagacggggtttcaccgtgttagccaggatggtctccatctcctgaccttgtgatctgcccgcctcggcctcccaaagtgctgggattacaggcatgagccaccgcacctggccacaactgattttattttggttacagtttgttttgagcaggatatagagaaacgccaaccattataagtagatgatatctcttacattttcacaataggtgcccctatgacacctttttctacttaaaattgattcgttgaagaaatgagatcatttgttctatagagtttctctacagtatggattttcctgattctatctcagtgttgtagtttcacacgatcctctgtcttgtatttcttttagataggtagttagctctagatactcgatcagcttcaggtttgaatattttggcaaaattactttataggtggtatggtgtgttctaccaagaggaagcctgacatattcagttgtccatttttgtgatgtcaccagcctttgggaatcagtgtctatatgttttaactccttataatttgtaaaatggtgactttttattttgttctcagttattccgtgaaatactttttctttaaagaaaaacttttccttatttggcatagagttattcaattgtgtgtttcttatacaggaaatgcaggattctttcctttagtttaccaattttcaaaataatgagcggtgtcgctagcaccttccaccaaaaatgaagaaatcttcttttttccttaagcgttgtaatgaactcatagaattaaacatatttgatgtgttttactcttttgcaattattattgttactgatctccaaaacatttcgcctttttttttttttaaatacagagtttcactctgttgcccaggctagagagtacaatggtaagatcatggcttactgcaaccttaaccccctgggctcaagcaatcctcccaccccaccctcccaagtagctgggcaggtgcacaccaccacacctggcaaattttgtattttgtgtagagatgaggtcttgctatgttgctcaggctggtctcaaactcctggcttsaagtgatcctcttgccttggcatccttaagtgttgcaactgcagacatgagccactgcacctggctaaaatgttccatctttaagttcaccttgagtccttttgacatgaccttctctgctatcttcttggatatgacactccaggttcattttgaacagtttttttcctcgagacctggattgagccatttctccaggcagctctggatctttaatacattgtggaatggctaaattgagctagttaacatatgcattaccttacatacttaccagcttttgtagtgagaacactttaaatctactgtattaatttacaagaatacaacatattgttaactattattactgtgttgtataatagagctcttgaacttatctttcctgtcaaactaacattttgaatcatttttgttatgatgtttctgttccattgccttgattgtcttcagtacaggaggcttttataatacacatataggaatttcttgtcttccatacttacaactttctcttaaatctttttttaaaatttctctttgatttaaaaacttttccttattttatttctgttttcattaagacattagctgttgtacttattaactcttgtgttacttctaattcagttttcatgtgtgagatgatcattttaaatttcagattctttactaagttcttgtaccttatgtctgagtttttaaaattttgagttttgttttcatagcctttatcattttattaatatcttttagcctgttttaaaacactaggcaacagtctttatctgttcagtagacatgtcgtcttcctggcatgtttgtttgatagacatgtctttctctcattggtctgcagagccattattttgctcctgttttctttcaataagtttgtttaggaaccatttgcaatctcctgtattccgtcttttcatctccttattgttctttctttcccacttctctttctctctctctctgtttttcttcctcctttcttggttagttgaggcgtaatttgtaaacattaaaaatgcacaaatcttaagtgttcctttcagtggtttcttttaaaccaaaatattaaaacagttgtgtttcccaatgtatttacttcacacttctctgaagaggtgatcattgttctgattagtcaacatagattaattttgtgtatgcatggacttttataagtggaatcatatggcgtgtataattttggctctgcttttgtcacttatttttttagaggaacttcatattgatatatcagcaacttcttccttttwattgttaagtagcatttcatcatatttatagatcacagtgtatccattcccctgttcatggacatttgggtttccaatttggggttattattagcagggctgctgtgaacattccttttttgtttttttttgttttttttttgttttttttgaggcagagtctcgctctgccgcccaggctggagtgcagtggtgcgatctcagctcactgcaagctctgcctcccgggtccacgccattctcctgcctcagcctcccaagtagctgggactacaggcgcccaccaccgtgccctgctaacgttttgtgttttttagtagagttgggattccaccatgttagtcaggatggtctggatctcctgacctcatgatccgcccgcctcggcctcccaaagtgctgggattacaggcgtgagccactgcacccggcctgaacattcttgtatgagtctgtttgtattcatgtttcatttcccttggaattaataggcgagggtaggttttctgagtcatgttatacatatataaatttatacatatatgtataaatgtataaggaattgtcaaacacttctccaaagtggtttgccattttacactctcaaaagcactgtgtgaaaattttaattgttctacattctccccaacatgtgagactttatcaagtctttttgatttaagccaactcttatgagtatgaaatggcataatggtatatttaaatgaaaggaatttttactttgctaaagtctgatttatcaactttttttctcttttgattagtcctttttgtgtcttatgtaataaattttgtttggcccaaagatgtaaagacttttttaatgttttcttttagaagccttatgtttctgtcttctacatctaaatacttatttttttttattggagtaaggattttttttccaaacagataccccattgttctagcaccatttgattaaaaaaaaaaaaaaaaaactttcctacccccgcattgaattggctcgccaccttttgtaaaaattcagatgaccttgtatgtgcaaatctccttccaggtccttataccaataccatactctattaatgtagctttataataactcttgaaatcagacaatgtaagtccttcacctatgttcttttttttaaaaatgtatttcttttttgctatttcatatgctttacatttttacataaattttagaatcagcatatcagtccctttaaaaaaaaaaaaaactcttgattgggattgccttgaatccatagaacaatttggggcaaatggatgttaacattactgaatctttcagcccaagaatatattatacctttacagttatttcagctttctttaaattctctcaacaatgtttgtagttttcacacttttatttgatttattgttagatagttgatgttttataatagtaatacaaattatattgctttaaaacatgtctttccccagtggtcttttccagggtgtataaaaatacaattgatttttaaatatctaccttgtatcttatgggatcaatattaagttcacttatttagttctgagtaaattcacttattggttctaacaggttttgttatgtttgtaaactccatagtgttttctgggtatacaaccatgttttwtatatatatatatatatacatatatatacacacatatatatgttttatttcttcctttccaattttttcctctattgactggctagagatttcagtacaatgttgaatagaattgggaagagcagacatccttgttttatttytgaactaaaaagaaaatatcaaataccattgcgtatgttaactgtaggtttttcatagatagtatttatcaaattgtgtaagtttacttctaggattagcctgcaaagagtttttcctttttgtaataataaactggtgttgatttttttccatgttttttatacttactaaaattatatttatttttctttattctataaatgtggcaaattacactgattgctttcactgttaacaccaaattgtattatgggggtaaaccctaatttgttatgtattatccactttagaaattgctgcatttgatttgatgatgttttattaaggtttttttttttgcttatgctcatgagggatatttgtctatacatttattttttttctttcataatatcttttttagttttccatatcaacatcagggtaaagctggcttcataaaatgagttgggaagtataccctcttctattttctggatgagttagtttaagattggctttatttcttcatcaaatgtttgttaattcacttgtgaaacaaatagggtcagaattatttggagtgtggagataaatttgattaccagtttataaaaaataattttctatttatggaaaataattgaattgtcttagatttaggggtacttatattttctgtttcttttgtcagttttagaaagttctgttgtttaagtaatttgcttatttcacttaaggtgtcaaatctacaggcataaaattgtttacaacatcatcacattatcattttaagccagtatgatctataaagatgactgctttcatccctagtattgatattttgtattttctctctttttttcttcatcagtctgggtaggggtttatcaattttattaagcttttcaataaaccaacttctgactgagttgattttctgtaagatttagtttttatttctttgttttgtgttcttttttattatttctattcttctactaagttgggtttaatttgctcctttacagtttcttgagtttgatgtctaaataactgattttacacatttctttttaatacattcattttaaagttcaatttctctctaagtacttgctttatttgtatcccgtatattttgatattttttgtttttatttttatttagtttggaatgttttttcatttcttttaggatttctttttgatccatgggttatttatcacaggtttgcttaattgccaaattggatgttacctagatattatttttgttccttcataatttaataccactgtgctcagggaacttactctgtataatttcagtttgaaatttactgagacttgttttatgactcagcatatggtctatgttgaatatttcatgttctcgtgtatattctaccattgatcataatgttctacagatgccaactgggtcagtttttgataataatattcaactcttctgtgtcgttagtgatattttaatctagttctcttgactactgagaaagaggtgttaaaacatccaattcgatgatgatttttcctctttttccttttagtcctgcaatttttgcttcatgaattttgaaactgtttcattagatgcgtatctttatgattgttatgtcttcttgataatgtggatgcttttataattatgaaataacaccctggttatgttctttgtcttggaagtctacttagataataaaaccaggccaactttgctatggttagtgtttttacgtagctttttccactgcagtattttcatcttgcttatttttatttggaattaattttactgaaatgttaggagaaatagatgcgtgaggaaaacatttctaactttagtgctctagagtttcctcttttgtttcttttgcacaatgataagtgcattttacttgcattttctattttctttgttcttgagtttttcctgcacaatttgaattccactctcagcattttctctcaacgcagagcttagccctaaaagggagttttctcttgggtcagtactaagagttcatacagctcagactgcttccagtcctttcagaagttactatacatcctttcttctgttccatgcattcaattgtgtaaaacatcttccagtttcagcacagttctcaggttagccctgacccttttcaggaatacctttttgtaatttgagggttcttcctgcttttaggagagatttcctgttgcttccctctgcttcctcctatacagatgatgttaccaggtgggttttatgtcgtgaggagtttgtccttagctgtaattttgagtttcgttggggacgttagatacctaggtctttgtaggtctgttagctttgatttttaatattagttgctctttccatttttgtgtgggattcagagaaattccaaaatggtcctgcttctgtagctatcattttagagctctgcaggtacctcgattccattgcagagaagtatatttgtactgtctaatgtttgtaacaaaagacgtgtggtgttgatcttttcaaaaaaggaccatttaagaatccagaccacagggatgttgattgttcagtgacatctggagttatctgttattataatcatgcatttttttaaataactgaacatcttttaactactacctcttcatgtgccagggtcatttcgagggagtctcacagaaaagcctgtgtagtaaggaaggtcctaggtaagatgtctgtctttttgtagtgaatcctgtattggtatatggtggctgggatcctccagatttcagatttaaaagaaggaaataattcagaaaagatggaatttacccctcccacccaccacccaagtgggtctctttcgtgttatgcaagtttgaattcactgagggctacctaatgccggacaggattacataaccaaaaatgcctctggcataaaagataccttgataatctgtagaaattattgtcctgttatttgcttgttttttttgttttgttttttgttttttgttttttttttgttttttgtttttttgagatggagtctcgctctgtcacccaggctggagtgcagtgacgctatctcagctcactgcaagctccgcctcccgggttcatgccattctcctgcctcagcctcccaagtaactgggattacaggcacccacaaccacaccctgctaatttttttttttttttttgtatttttagtagagacggggtttcaccatgttagccaggatggtctcgatctcctgacctcgtgatccrctgcctcagcctcccaaaatgctgggattacaggctgcttgtttttttttttaaagtatttacactttctttcagggagtactagtgtacagctgagacagcactcgtgatcctcagataattcttctggacactctacgtcacatactcaagtacacttattctttcaccatggccacatccaaagaaatagctaccagcgaaagtttctttttattgtgactcatgccaataataaggttcacatttgactttaaatcaattgttggatactcatttggctcacaggttcataaagttttaygcaaagaacatttttattgaaaaatttttgcctcttataaagtgaatacatatattactacttcagtttataacttgcaaggtacttttatttaatcttcatgacaaccttgaaaagcaaccacttacagatgaaaaaaactgaggctcagaagttaaattaactgcctaaatctatgtgctttatataacagagccaagaagaaattattgaataatcagaataattatcactagtatcagaagcttttgtgcctactggtaactaaaaaaaaaaaaatcttcagagaacatgatcacatgagaatctgttaataaatcagccccaattgaattagwtataatttagagaatacttttaggaaatatatatttatatttatttaatatgcaatataaaatatatagcatatgtaatataacatatgtaatataaaatacatttgttttgtgttgacacattcaacaracactttggcaattcatttttacccattggacttcagaacaactgttgatgataatctctgttttacagtagaaaagctgaggcacaatgatgttaaatggtttgctcatatagctggtcatagaggcaggattcaatattccatgtcttctcattctaaatcttacattctttgcttttgataccatactacctcgtgataaaactttcaaaatgttgcaagataactgactgggtgaactagctattgcgacttacatatggctacccaaacaggtgggcttgctctgaaataatcagttttatgaagttcaaagaccagagcaatgatgaaaatgaataaatggatagaaaagacttgagacctaacttcagcctaacaggtcatacattctttttaggtatataaggaaaatgaccagttttccgagaaggcatgtatgtgtttatgttatcagttttaataaaatatgacccagatatgtcttagactctgtgtgttctctgccatctactctccgggcagttctgatgccatcaacacattccgccaggtgcattctaacgtcattaccatagcccgtggcagccagatcctcacatagcgtatgcacttcacagcctgactctttctcaggtttaattgactgtactctgtcatttttctagtaggctaactaaggagaaaaacataatacctgagatccacacatttgattaaatcagtcttgtcgtctctgcctagagcttaaaaagctgatatcctgggaatcttgctgctcagagacagccataggcaagtttaaacacagagcagattagtcatacattggtaacccacagtcaagagtagctgtgaatgtttgtttttacgtgtgaatgctctgactcttttatctcctgagcaaaytcaccttaaagatctcagtattttaaaaaattagccgggcatggtggcaggcacctgtaatcccagctatttgggaggctgaggcaggagaatcgcttgtacccgggaggtggaggttgcagtgagctgagaccatgctgttgcactctagcctgggtgacagtgtgagactccgtctcaaaaaaaaaaaaaaactcaatattttaatgctcaaactgtttttcataatagacatttcaaatcagctatggcaagctgaatacacacagagatatgtgtaagtgtatatgttagggtatgtatgtttatatatgtatatatatacttttgtcactgagcaaaatcaagttgcctttgatatttctacttcagagtagatcaaacttgagtttttgtggagcagaaatagtgctggccccaggccagagaaagaaagaaaagacaagcttatttgcatgccactcctttgcagcatctctgacctttctctaaccagttctcttgccacgcgttatcgactgtattggtcaggattcttctcagggcatcactcatgggactggaagacttttgtgaagtcagaaacctaccatttactagtggtatgttctttgtcaaataaccactttgaaactcttctgagctccatatagctgtaatatgaagcagcctctgagtggcaccttctgaaaactggccctgagcaatctaccgtcaaagtcctggctgccatattggtctctactcaatgatagcactgtagtctctgataggagactttgtcagcatctcttgctttttttttttttttttttgagacggagtctggctctgttgccccggctggagtgcagtggtgcaatctcggctcactgcaagctgtgcctcctgggttcatgccattctcctgcctctcagcctcccaagtagctgggactacaggtgcccaccaccatgcccggctaatttttttttctttgtaattttagtagagacagggtttcaccgtgttagccaggatggtctcgatctcctgacctcgtgatccacccaccttggcctcccaaagtgctgggattacaggcgtgagccaccgcgccgggctgggactcttgcttttattccttctaacaatgtaggaaggcaaatagtgtataagcaatataatatagatatggactacatactagtttggggacacatggttaatatttcatttgtttagggtttagaaagaaagtataggcccgccactttcaatatgtctcatcttgatgacaagttcatttctggagtatgtccaacacagagtgattaattttgaaatagaattggtcaaggggtagttattagtatgtggaggattctcgtcagttgctgctgtctgtatccaaaactcttaaccttaaaccataagagagctacygttggtgcttgaagagcttgagtcctcttggtaataataattgtgcrtgaataaaatcagcatttggatagagaaagaatatcccatattggaaagtaatcatggcttttatgcttttgtgtgtgtatgatttgacagctttttggagaccacggcatatttcttcatgaaaccaaaacttggagagaaggaggtgtccccaaatgctttcttcagtatctggcatgaattcagctctgactttaaagacttctggaagaaagagaacaaacttcttctacaagagaggtaggtattttcatttgcacaatggcattttaaaactggtgttttattaggtgtggcaccactgggttgccaattttcgtagcctgaagaaaaaaktagatggccctcaacccggggtagcragttgaagaggatgctgacatttggcaaaatttggagttttaataagaagagtcagcacagaagctgggatgctacagagagtaactagggtgctggcttgccaggaccactgtcgggtaaatcaacttctatcatgaggaaaccacgtaaaagtgaccacgtaagaaggctggaacaaccctgctgcaatggcagacccacgcacttcaaagaacagatagcaaaggctagaagggtaaaaggaatagtttgctcaattcatgggatattgtcagtttaccactcatatcaaaagttcatccagatatcaccaagaaacacagatgtcaaaattttttaaaagacctttcaagattcttgtagaattatgtgataccttctaaaataaatcttttcaggaagggaaatgtcccctcttcagtatatggaataaagtctctgtgattatgaaattccatagaggcatattacatattaagtaatgaagaaggctagccctcccagggcgccatccccaaatagctgcgtctagtgggaaactaaagggaaacgtaatctatactataaagcaagccataatgccaaactaactagtatacttcctaacatcactaacagtaactttgctttagatctttagaaaacttacatcctgtgagccaggatcagtggctcacacctgtaatcccagcactttgagaggccaaggcaggcagatcacttgaggtcaggagttcaagaccagcctggcaaacttggcaaaaccctgtctgtactaaaagtacaaaaattagccgggcattgtggtgggcacctgtaatcccagctacttgcgagactgaggcaggagaatcgcttgaacctgggaggcggaggttgcagtgagccgagatcatgccactgaacttcagcctggacaacagagcaaggctgtctcaaaaaaaaaaaagaaagaaagaaagaaagaaagagttacatcctgagaaactttgttcacaaaattccactgttttctgcttattgtcttcattttggtctgcttacacatgataccatggttgtccacctggttttcagttgtaattcaattttgatacctccttaaattagatgaattaattggttacatttatagagcctgtaaaccatgccagacttgcgcttactcctataataattacttagattccataggtctgtcatagaagaaactatcctcagtgaatagtaggtggaaaaagaaaatggtttgaacagaaggaaaaccctttaaacatgcctgctaaagataatgagcttattctgcttccaaatgcatcagtaacgtaaaatatgagagctttcagttacattatatgcaggtggggtagaagagataattgcttaaaaataagcrtatgcgaatcactgttcttttccttcagactaagtcatatattaagtgatatttaccaaaaacaggcttgctyagtttggaagattgtaaagaggaaactcttttttaactttagcacgtcacacagaacttcccttcatgcccttccctaagtccctacattcctccttttacctctaatctaaacctggtcccctagaaaagggtttgaaacttatttacactaaggttcaaaatgaaaagagtcgtgtttccccttgcgcgattattttcatcatgtctargattagagtcctcaatggagtgtagatggtgtgattttagacatcagcaagatgggactgatgacgttgtcactttggagtagctkgtccgatgcacatcaggtaagcaagtgcatcgctgtcggagaatggcttggtcctgtcgtggaggtcccaggccaggatgctggacaccctccctgtcgctttcttctgctagcatagaccagaatataagctggtgagatgcttcctcagagaaaatgttgagatggactaattcagatgctttgctccctaagcatcctcacagccccrtctartacatgccccatgacagcctcctcagagtcccatctaacacatgctccatgagatagaattgtttctagatgacattatcaataacaacccactgtttggtggcattatgtgcatctgacatgcccagaatgagctttccttcactctctaagtatctcataaaatcagctagatccattttttttggttctttatcctgtgcttgtcatgtcctagaactatgtgatgggctttgggttcacacttggtgamcttacattcatgttagcagtgttgcgaattggcagtttacaagtgctcttgacttcagacttctcagttttctaaatcatttgcttttaataaagggctaaggaagaacacgtggcagatgagaacgctgctttgcccattgacttgcaaaatctattaccctcttggcaattgataaccagtttgcttgaaaaggaaaaccattggttggagttgtttgmagaacaactctgttcctttccttagtgagggaccagctatgtacttcttaggaaacagtgaaaaatgaaaatgcacaatttcttgtataaaaattatttcaagacagcaaagcattaaagcaaccacagagcccttctaagggtggcgccccatctgacatctgactgcccaaatgcacacctatgccctgctttggtgtaaactttttttttttttttttttgagacatagtctcactctgtcgccacactggagtgcrgtggcgcgatcttggctcactgcaacctctgcctcccaggttcaagcgattctcctgcctcagcctcctgagtagctgagactacaggtgcccgcctccatgcccggctaatttttgtatttttagtagagatggggtttcaccatgttggccaggatggtctccatctcttgacctcatgatccacccacctgagtctcccaatgtgctgggattacaggcgtgagccaccacacctggcctggtgtaaactttatattttctatagttaaatggaaaagtatttccaaaatgttttgaatgccctgggacatggataggaaatgccagtgtggtcatttaagagtgtgaaacttcttgtacagttactatcagtgtgagtagaacctcaagtggaattacaaatacttaaaatgggatactgttctccaacctgtttctcacctctgtactcctatcctatttactatcaacctattttcttcaatggctaatcttatactgcctaacaatacgtctattttataccattaattttttgatatttgcatattggtcttttttttttttttttttagttaaccactcggtgttggtcctcatatctggattagtgtcctcatatatggtatagctctcatatctggtatggtcctcatatgggattagtgtcctcatatctggtatagctctcactttcagcaagccacactgcctttcccctctttgtgtctccataagtatttgctgacttgttgcatcattacctttggaacagacatggaaataagaacttagcctagtaaagtaataaacatgttttcttgcataacttgagttgatcattgtaggtaataaaaccccgctctgaatacctcaaagcaaaaagagagagacagagagagagagagaaattttatttgtttagacagtcaaacctcagaagggcaagagtggaacttacttgtggaagtcctgaatgcagaattctacctgctgtgagtgtggttagtcagccacatgtgtctgtacctgtcccttccgtgatccatgtgtctttttaaatgtcctctctctattctttctcctcctttttcctcttctttctctcaccctttcttcccaacccaccacccctctgtagcttagctttaacttcccagctaggctgtttcttagctgtcagccactgccatggcttatattctcataacccaggaggacagagcagtttccatatccatctgcaaaaataccagggaggaactccaaatgaattgtgtccatctctggatcagccctggtggtaccgtggttagcttagcagttcacaaacctgatcctgaagcaagagaagagtgttaccatgatcaacagttcccttcagagcagtgtttttgaaggaagaacagtttccccaaaaaagtaaacaataatctggcctaatttattaagcctttaaaatcacccatgtgattagcaaaatgtcttagcatggtagaaataacctgaaagatggtgttaatggtgtccttgaaatttttctgatagaattttccttggaatagtttggtgtatatagattgaaaaatatcgttaaggttttaaatcctgtattaatctttcttatgccactatttctaatttgcgtctgattacagagtgataataataactctattttcttgcttcatcctgatgacgcatrtgatttgrttgatatatttctcaaaatagtgaatttctacacatccgtgtcggatagggcttctgtctttctagtcaatgtgtttggatttttaagctctgccacttactggctccagaatcgtagaaaatcaattagttttcaagagtcagtttcctaatctgtaaaagagaaatgataatacagtcttgcagtgttatcatgtagactaaatgacataacgtatttgaaktatatagcacagtatctaccttctgaatgcctatactgtttttccatcatttaataaaaatggtatcctggtcatggctccctacaaggtgacataacattgctaaggcacactgaccatcttaagaacatagtctgtaaacacaaagtattattgtgactcagttacattcttggttagacaaaatatcttggttgtgagtccaaggatgaacttttgtttgaaaatgttcatgtaacctacccctccatatctacactaggtgatacaatagacacagatcaagtgatcttgtcacgartcagaaaaattattttttcatctacttggaactagacatgtacaattgttaataagaaatcctccttttttgaaaaaacaatctagacttgtcatcactgagcaacacaaaacatgtgcaagtatgcattttttaaaatttcaatttgtaggccaggcatggtggctcatacctgtaatgagcactttgggaggccagcactttgggaggccaagcactttgggaggccaaggtgggtggatcrcraggtcaggagttcgagaccagcctggccaacatggtgaaaccctgtctccactaaaaatacaaaaattagccaggcgtgttggtgcatgcctgtaatsccagctactctggaggctgaggcagaagaattgcttgaacctgggaggcgtagggtgcagtgagctgagatcacgccactgcactccagcctgggtgacagagcaagactcagtctcaaaaaaaaaawtttttttttcaatttgtctgtattcaccagaagatgggaagggagactaacatttattctaccaagcatctccctaaggtctcacagagcacagttgtagtgggtaaggaaataggcaatcttcatctcttattttcaggaaggcattggcatgactgtcacctagccactaatgaggctctgtggagctaggataacaagagctgtattaattaaaagaaagagatacagattgactaagaatgtgtgtcttttttttaccctgattgagaggctatggtctaggtcctgggaaaggagggttaggcttccagaacaacatcacttctctgttgtaagttgcgctcagttttcaggatgagtgttcagctatataaccatgtgaagctacctgtgattattcactcattccatatggagtcgtactggacactgagacgttcaagtatgttaaatgaaggtctcctcttctttgagctagcagtatagcactggttggtgtatcatgcagtgggaggaaccaggagcagggactaaggaattctgcccagaggacttttgacctagaacgtggagcaagtgtaggattttcacagacagtccagagagctaagggcttttaggcaagaagatctggctctggccactgggcccccagcctcatagtgtgtattgtggcctatcattatttcatttttagttggcctgagacattttaatttaataaatcatgacattagtaagggttatgtttaaagtattgtctaacttaatttactggtttattttactttgagacaggtagtctttgatgatccaagagaaaggatagctacttctctaattgcacaagcatgtggcagtcacgtcttgtttcagcccagctgaaacctgtaattagaggaaaataatttgaatgtttatccttagaaggttatgcgttacattggcgagcccctcgtgccttgttracatttctktttccrtaatttgtattcaagtgatttgtattcaagtgaactrcatgttcagatttatgtatgatattattggagtaagtttaagaaggaagagaccattttcaaagaaaytgaaaatacatctgaagaatggagataaggaaagtttactcttatggaataacgtacttgctggatacgtaagtgaaactgcctcttggactgcaaggtagcattcttgcattgcatgataaatgaatttggccaaccattcackcttttcattcaggcatcaatttttagaaaaatgacccataaagaaatcctcttctcagtgccaactttctgtaaccaaaggtttggcagaagagtcgacaaacaggacagtcaaaatagtggccaatggaggccgagggtgtgagaagatttagctgtattcatgaattggagtaacgcatacacattaagacagtaagtaatgcattcaacaaytttttatgatatgtatgccctactatatgccaggcaacattcctggccatgtggatcttttctcttctcatgagagaaacagacaacaaaaagtaagcgcatatttaagttacaagctgaaatcagtgctatgaggaaaataaacagggagtcatcttgcagaatccaacgggaggaggttcatttagagaggttggtcagaggaggcctttctgaagaggcagcattgctgtggacacctaaagaattcaagggaacagccccatgaaggggcacagtggggagggtgtaatgtgctgtatgagcattccgggtagatggtaaggatgttcacggcaatgtggcaggaaagattaagcactttccaagaaagatgggggccatgcaatgaatttgataaagcaagctgagtcctgagcattcaggccctggtaagtcatggtaaacattgacttttattgtgcattcaataggaagccatcaaagggttttttttttttttctggagagaaaataaccttatatgatacatgtaatgagaagattattggctgccaaatgggtagtaaattggagagtggagagtgctagtaaaaagcaagttaggaagttattttagtgacctaattgagagctaggactctgcagactggggtgaaggcagtaaagattgtggaaaataggtgaatttgagatatattttggaggaaaatctacatagatttgctgttcacaggctcctggatgaaccagtttttggaatcagaaaattgtaaatgtcagctcagatactgaaaagctaatattcactaggatgctagagatcaagaaaacaagaaaacagatttctcctttcttctaaaatgctgtagaaaaagagctgaggaaagatatgaaaaccaggatattaagatatttactttgtaaaatttagttctttttaaaaaatggaaagccctaacgtgaagattagctgggaaagggctttgcatttgcttctttatcttgccgtgttccaagaggtgtttttaaaactttgggaaatcttcaaaatcctcaattcaaaaactgaagaaactctcagtaggtagttctagagaatccggaccaagagctaagaacgtggcttgtccaaagatgtttttagtttggtaaggatttgaacattgtagcatcttttaatgagtgtgtagacacttgtaaggtatctgagcagtttttaattcccctttagcatttgctaaaagggttttttgatgtcatagcaaagtttgcagtagaactatcctggatcaaaatatacttcctggagtgaagatatttaaagttactcttttaaaaaataacatcatgtggcttatgtgggccgaaaacaagatcctattcaagctagatgacgttattttttcaggggcaatttttaatttctttaggatactttcaaatggttataatttgctagaggaagtacagacctgttgaatttgaataatatcaaattaacaaattgttaggtttgcgtggacttctgctagagcctggatttttaagawaatcaaaaacgtaaggagccaaaggcttccccatggctcagtcccaccatgacatgctccrggctaactctcacacctttgggcaaaggaatttccacattcacacactcctcctgctcgactttaggatttcagcttcacacactacccctgttcccattagggggagtggagctttagaaaaatkgaaggtgtttcttctgcacttaaacattagcagccttagggcaaatggataatcaaagactattcctgagagatgagggaagagattgcctccacctagaggtatcgatccctacggcagggttgaagctaacaacagatgttagaccaagacatgttagtggttattttatttgacagacagcaattcgctcacctggttttggctgctggactctggttaaggtttagaagcagctgtaatgagacgttaagctcagttttaaaaggaattatttgtgaaagcatgtgctgggtctgtgtgtgttgggggatgttgggaggttggataccaagaatggacatccgtattgaggtactttgagaatatatatttcaatataggacctacaaaaaataagataatattcaggtatcttggacagagaatgaaaagaaaatggtcctaaaaaatgtaagtagaatggccagtaaacacatgaaaagatattccacattgttagtcctcagggaaatgcaaatcaaaaccaaagtgagatatacttcatactcactaggaaggctgtggtaaaaaacacagacagtaacragtgttgcagatgatgagaatgtacggaactctcatactttgctggtggaaatacaaaatggcttttgccattatttttatggcaaaaactgcaattacttttgcaccaacctaatacgtggggcctgaacgtagattcgtctttgtgaggagctggagtcttggggtacagagggaggaaaatggagagtgactactaatgaagtttctcttgcggggggtacaaaatgccctaaacttagatggttttagaggagtgcacaaacctacgcrtctactcaaaaaaagttgacgttcactttcagtgagtgaattgtacggcatgtgaatgatagctcagtcaggctgttctggaaggaagaagaattaagtagaattcacacattagagttgcatcagagttctaagcatgagagtggaccacagttgaacatactgacaaccttcagtgatcgttattcagagtgttcacagttttgaaaaatctaacatcggtccctcttcttcctgcctggtacaactcctgctacttcccctgtacccgagtaattttgtatgtacccaagaaaacaaaccttgaaactacaaacatgagtattagctaacagaatttgggagataaatctgctggaaaaagctattaaaaaattgcacagctcattccagaatcaaaaaagaccatcatcaacttagataattagtcatttgcagtagtttgactctgtagtgatgaaataggctggtgctttccctgtgtaaacccacttcacgractctaagtcatgttttaaaaatatacacacatgcaaaaaatactatatgtatgcatatatatgtgtgtgtgtatgtgttttgaacaattattcatctattgtgaataaactttttcaaatctaatctccatgggaagagtcctattattcaagtttctgtaatacataggacctttattgctaatggaaagagataaatacttaraaaaaaagaatttggtcaggtgctgtggcacacgcttgtatccccagcactttgggaggctgagggaggacaattacttgagcccaggagttcaagaacagcctgggaaacatagggagaccctgtctctacaaaaacaaacaaacaaaaattagcttggcatggtggtgcacacctgtggtcccagctacttgggaggctgaggcaggagaatcacttgagcatgggagrttgaggcagcagtgagccatgattgtgccactgcactcctgcgtggtcaacagagcaagaccctgtctcaaaaaaatagtaattcaatatgataaaaagtggttaactggcagggtagggtggctcacacctgtaatcccagtactttggggggccaaggcgggtggatggctggagcctaggagttgagaccagcctgggcaacatggcaaaaccccatctctacaaaaaatacaaaatttagttgggcgtggtggcgccttcctgaattcccagctacttgggggcccgaggtgggaggatcacttgagtctgggctgttgacgctgcagcaaacagagatagttccgctgcactctagcctaggtgaagaaagtgagaccctgtctcaaaaaaaaaaaaaagtggttaaagtacataagaagaaaatgaatttgtctgtctttgctatgggtgaagatttgcatctttcccttctgtttaatgaacacttcaccctctctccggaatccttatgccccctggtacccactttccctgcctttcctgtgactttctgcttactgacactgggccccactccatggccttctgaccaagtcaccgctcaggctttttgcttgccatacaaggttggccttagaaacttgaaccgtgggcagctgctaggtcatgagaagaattttgagcccgtggaaaggaaacttttgtttaaggcagacaatactagagacagacctttgatatggtactttctagtgagcagatacccagtgaagattaaccatgctgatgctgaagaacyggctatagaattacagtgtggtcttggatattgacacttctagttcattcaagtttccatcgattaaaccacaatcatcatggcaaattaggatcatgtagcttggagttcttcggtttgtgtgaaaakctattgtatacaatttgttcctccttaaagrgacatgtaaattgtcatcatcattatttaaattattacatatatatgctatttcattttccagatttattgaggcttaattgacaaataaaaattatatgcataaggttatacaaagtgatgtcttgatatacattgttaagtacttatcacaattaagcgttaatatatccattaactttttgcrgtaagaatacttaagatctttaagatctgttatcttagcaggttttaagtgtayaatacatattattattattataggtactgtgctgtacattaggtctttagacttgttcattytataactcaaagttataagtattctttgaccaatgtctccccatttctcatatacttattataatgtcacatcaaaattaaattctaaaattcttggtgttttagggcctatgattttgcaatttttaagagtaataattctgcagagccaaataaatgaaaacagcattacagctaatataattcctaaaataatgtaaaacatttttgttttacaattaggctttctaattataactataatttattaatacatagattagattatgaatacaacagaggtctgtctgcagaatccctttgaatattgtcttatgtgaagcctatgagcattttcatttcatttcattctatttcgatttactttgcttttgtttcctaagatctrtaataaaacacctaggatcccagataccttgaatgtctttctaagtctgaacactttatgtaatcaacctcatctgtcattttatcttgttggtaatactaaacattccctaactaatcttttagcattgtctccatcctctcccacccggccccagccacgttccacctccgattgattatagaggtcgctcccttcctttagggccagcagtgaggctggcacccgagcgtcacatgctctgtakctaratgaaagaaygtgctcctggccaatgtggctccgtagctcattgatctctctctggagaaaggctggtatgtctccttgcacatttcttctttgaatgatttaaaacttgatgctgagctatrtaaagttctgtctggatagctgtgccttacagagggagggtcatcctgaaagatgccacttctgcctttacagaaagggcacgcagaccgttcctagggcaagccacctccaccatggcgttgtgtggaattagctaatggttatacctggcaaagatgaaatgaaggttaacaggacaacrgagktatccttgtgctactgtayggtcagaaaggaattcagccctatcccttggagttatatgcagattcaagttgtctggttttttgtaaggaaatattaatttttaaaagcatttgtcttggctgggcgcagtggctcacgcctgtaatcctagcgctttgggaggccgaggcgggtggatcacgaggtcaagagtttgagaccagcctcgacaagatggcgaaaccctgtctctactaaaaatacaaaaattagctgggcgcggtggtgggtacctgtaatcctcgtgaggctgaggcaggggaatcacttgaacctgggaggtggagggtgcagtgagccgagatcacaacactgcactctagactgggtgacagagcaagactccatctcaaaaaaaaaaaaaattgtcttgaggaggacagaattgcaggtgtgttggctgagtctgtagctgttttgctgtgagcagaatagaaccagcgwcattaggtcagtaccaactctttttgggctttacaatattctgcccctgcagtggttctggggatgagctgggaaatgagatgattggcgtgttccccaggaggaaatgccagcaagccatgttagagaggcccaactgcctgctccccaacaggggcctcatcccctgagtttcattaacctaaagatgacctctgtctccactaacttaggagtcactgggagtagaactagtagagcaatagaagaaagtgcgcttataagcctgatatagtaaaatagtgggtagcagcaccagcagtgagacatgaaggaagtgtagtgttgggtttatttttaaataaacagatagtatctgtcattatattaatgatttagtattttgctttgttattttagcactattaatatttctcttgttttataatggacatctaaagtgggctgcatttaccatgactctgaaaaataaaaaaacttaaaattcagttatatattgggaggccgaggtgggcagatcacaaggtcaggagatcgagaccatcctggctaacacagtgaaaccccgtctctactaaaaatacaaaaaattagccaggtgtggtggcactcacctgtagtcccagctactcaggaggctgaggcaggagagtcacttgaacctgggaggcaggggttgcagtgagccgagatcacaccaccgcactccagcctgggcgacagagcaagactctgtctcaaaaaaataaataaataaaaaatttagttatgtagccattcactctttttcaaaagaatatattgaatattcatgacttaggcattcatttagaatttcaaatacccagaagtgaaagttgacaggcaagaatccccactcctttaattagtcagaaaaaaatggttcagagatgagcctctaaaatgtattgaacaaggaaaaaggacagaggtaaaagtactaactctttaatctttaaaatattccaatgatcattatatttagataatatatatttttgcaaaaattttatcagaaataaaagtgtattcctagatcttaactttacgagacgggtttattttttaaaattaacctctaggttcaaattcctatggcctaaaggtaaaatatttttggaaagtgataaaattccatttggccactttaaatttttccaggtgttcaggggaagtaaataaaatgaggcataaaaaggaaaaagtatgaaaaaggtagaaaaaatagtagaaaaaagtatgtcatcagttaagagatttcatcagttaagagaattgcaggtgctcacagataactcagtagctttcattttaaacatcttactagctgtagatattaatacattcttaaattcatgtgctgtttttatgacagaagcactcataattctatactgagtatgtacacaagtttatttcctacaacctctgattagttttcttaatgttttcgttttacaaaggctgaataaggtatgtagcaagagcacgtgcttgtaggttaaaaagacctggatttgatgtatatctctgagagcacccatgtaacccttgacaaattaatgtactctctgaacctgtttccccatttgtaaaatgaaggtactatacgcacccaattgctgaagtaaattaaaggagacacagagtataaaacatttagcacacgctttcacatatagaaacttcttagttaatgttagttgctgccattatcattaatatattaacgttgtttgaaaagcaataaacttactatgagaaagatttagcactaaataaattcatagaagccaaaccccacataattctattctaccagccacccttccttaggtttgtattcccaaacatgaatcgaagcattaccaatgataagccctttgaccttgggcagttatttaatcttagtgaacttcagttttctaatttaaacaatcgacatatcaatcactaaagtacatggtattgaggctgttaattatattaagtgtcatagtcccaacacagtgcctagttcatcacaggtgctgactattaaaattagtaccaatggtgttttggaaattactactattattataaatgagcccagtgtttttctctccatgaataaaacattgaggaagaactggacagaatgaggaagagcttggaaaaggaggagaatgagagtgggtattaatgaagcatagagatgaggaagaataatggtgcttaaaaatggaaggcatagggccgggcgcggtggctcacgcctgtaatcccagcactttgggaggccgaggcgggtggatcatgaggtcaggagatcgagaccatcctggctaacaaggtgaaaccccgtctctactaaaaagacaaaaaattagccgggcgcggtggcgggcgcctgtagtcccagctactcgggaggctgaggcaggagaatggcgtgaacccgggaagcggagcttgcagtgagccgagattgcgccactgcagtccgcagtccggcctgggcgacagagcgagactctgcctcaaaaaaaaaaaaaaaaaaaaaaaatggaaggcatagaacacatagaaggtaaaagtcactggaaataacttctctatgagggagttcatatctttttgtattagcagcatgatccgccacttaatattttaaaatattcttaccatggaaccctgtgctttcttcactgtggatccgtagcaatcatggcgttttctcttttttgtctccaccaaatcaactcactcttgctgagcatcattcttcattaagatatggctttggggccaggaatggtggctcatgcctttaatcccagcactttgggaggctgaggcaggtagatcacttgaggtcaggagttcaagaccagcctggccaacatggcaaaaccccatatctactaaaaatacaaaaattagctgggcatgatggtacccacttgtaatcccagctactcaggaggctgaggcatgaggcttacttgaacccaggaggcagaggttgcaatgagctgagatcgcaccactacacttcagcctcggtgatggagtgagactctcactctaaagaaaagaataaatatatatggcttccaatcctttagattatagatctcctatttatagtagtgttgtgttgaggtcttttaaaggacaaggattgtgcctcttttgccctctttacacatattgttcttcttagttaagcattaagcaaagctgtcaacatagcatagaaacacagaggttggagttagggatagagaaggggctgggagcattgaaaatagaaagccagacccaagtagcagcaccagagcacagggtatggagcctgaagttgaggctacataatattgatggcaaagataaaggtggaaaagctattgttttttaatgtcatgggccaacaaatgaatggacagatggttagatgaggagttactggaaatgacacaaccattcaagaaagaatacaaacccaagttagcaaagtgatgttattatgaggaaagcttggctcctacgtttaaaagctctctactttattattagttaaaaaaaaaaagtcaaatcactcacagcacactttgccactgattacaatccactagtgtgtcccagacattcaaatgagaaccagggactctgcacaacctcttagcttaagagaggtgagaacatgaccatcggaaagctggtgcataatagtaaagaggaaatgtgttgacttccatataagatatactttactattcattaataattattaaaagcgagtttcggccaggtgtggtggctcaccggggcaggagggttacttcaggctaggagttccagaccagcctagaaaacatcgcaagatccccatctctacaaaaaataaaataaaaagttagctgggtgtggtggcacatgcctgtagtgtaccaccaggaggcacactacaattgagataacaattgctgaagatggtattgatgctgctaatgacattaagtgcaaaagtcccaacgcagtgactagcccatcacaggtgctactaaaattagtaccattggtgctttagaaattactgctattactaccagctacttaggaggctgaggtgggaggatcacttgagcctaggagtttgaggttatagtgagctatgctcatgctactgtactccggcctaggcaacagagcaagactctgtctctaaaaaaataataataggctgggcttggtggctcatgcctgtaatcccagcactttgggaggctgaggagggtggagcacctgagatcaggaattcgagaccagcctgaccaacaaagtgaaaccccatctctataaaaatacaaaaattagccaggcgtggtgacaggcacctgtagtcccagctactcaggaggctgagacaagagatttgcttgaacccaggaggcagaggccgcagtgagccaagatcacgccactgcactccagcctgggtgatggagcgagactgtctcaaaaataataataataataataataataataagttgcataatgatctcagaaaaggtaagagcgacatgttcatatccaaatattcttaatcactattagtcatgtgtcattttctacctgattatgacttctctaacaggaataatggagtctacacactttggggataattattataatagatacagttttattcctaattttatagtccagacccataatctcttatctacaattttgagacccaaaaacctcagaaactgaaagcttattcatatttttgtggcaaatttatctgtcagcaacactcaactttcatgaggctatgtacagtctttactcattctatagtgtgagtgttcatatacttacagaaataycattgtgtttaatcaaacattgattccatgctatgtcagacccttttgatagtgttatgctccatattcctatctgaaactggaaacgttctgaattgtttttattttttatttttatttgagacggagtttcgctcttgttgcccaggctggagcgcaatggcacgatctcggttcaccacaacctctgcctcccgagttcaagtgattctcctgcctcagcgtccccagtagctgggattacaggcatgcgccaccatgcccggctaactttgtatttttagtagagacagggtttctccatgttggtcagactggtcgcgaactcccgacctcaggtgattcacacacctcggcctcccaaagtgctggaatcgtaggcttgagccactgcacccggcggaagagtgctgaattctaaaatccttctaagccctaagaatttggggtaaaggatgatagaatgaatggctggccaactgaactatgtattcactgggccttattctgctctctctagaaccacacagataaatccaatcctttgttccatgtaataaatctgatatttaaggttcgctatgaagattctaccaggttttctattgccctgacataaaccctttgtcctgttcattgttctggagtctcttggacttttctgattcatttagcttcccgctcaccctgggcctcatcatctgatagttcagctataccagcacttggtactatgatttatacaacagattacacctctcaacttaccacttcccaaagttggcaggccagacccttcacacctcttgctctaggaaaaattttctaagctggacaacttcaaaatcaatgttccccaacctaagttagattctctaaggaatggatatcctgagacaaatcctgggaagcatgaggggaatggcaagtcaagagcattttcattccaatttccattttcctctctaatcgttccccgtactgccaccttccacattcttcaaactgtaagcaccacttctgcatgcttcactacgaatgtatgacttgtccgcatacttccctgaggtccttcagtatgtacttattaagtgtctatactaggcagtggagttgtgaataaaaccaaattcctgccctggtggagcttacattatagaagggaggtccagaccatcaataaatatacagcgaagctccaaggaaaaacagagcagggcaaagagaagacagctatgggaggtggtttattttatataaattagccagacagtgcctctgagaggtgatgtctaagcagggactcggagatgagggaataagctaatggatatctgaagaaagaaccttccacatggatgaagcatcgcatgcaaagctcaaggaaggagcatgtttagtcaagtgcctaaagtggctggagcagagtgagtgagagttgagaggtagaagatgaattcggagagggagcattggggccagactatgtagcctagtgggccaagtgaggtcaggcctttaagaaggagcgtattgaggaagaaccrtgcacactactgctagtgctagggtgagaaagatgaggactgagaactgacctggatttgggatcttgggtgaatgagtgacatccrcaagagtagtctctgttgactggttagggacagatgtctgattaactgggagcacaggaagctggggcagtgactctaggtaacacgctcttgaggcattggtatatgtaaagggtcacaatggaaaggaaagctagcaggagggcaagggaattagggttttgtttttgtgtttatttttggtgctgggataaacagcgtatgtgtcactgggtagaaatgatccagtaaaggaaaaattgtgamctttgttctctcttaatatgtgtgtttcgttgattcattcctgacttgtatctcccacatcttatcccttaattaagccattcttcctcttgcataattgcaaattattatgatataaatagctttgttgtactcttttatgagttttacagggaggaaattgcataaactctctataaagtaatttctatgtttaaaagcccttaagttctcccgccccatagcctgaccaaaaaagtcttactaaacaaaaataggatacaaatgatccatacacatcatcctggctagagaagggtcagaaactacagtgttgttagaaccaatagagcttaactttatatctcactggctttaataaaaaacttttctgagctatttgacacaaaaatcactaagattaagaaaatatcttaacacaggtggaaatagtaaaaggatgtttgcatgaaaaccgtcaaatgtaataaacagcactattctctgataataaaagatgaatctggctgtcagatgcaattttataatagcttcgaccatcatgtacggcaggagtatttttttttatttactatcgttaagtttgtggaaccagtgattgttgttttactattttgttaaggaaacctaaaacattcttagaatgtacagaaagaatatggtcattcttataggaccaaagggcgtatcaagtgagctgcttttgtaaataccatgaaaatccaagtctgacatggaattaaaatcatctctactacaagatgcagaaaaaaaccaaactcttttttttctatatcagagacttaaaaatattagtgatgaccaatgtgattagaagctttaaaatcctaacatttatatgaacaaaaatcttcctgttttcagagacttaagcatatcatctgagcattgaaaaaagctcttaatagtacctttcagatttctcatctgttttcagatcccatattaaactccttgtggaagaatgagaaagaaagctactctaaattttacagaatagaattcaggctctttatttacaaaatggagtgtgaaccttgctgtttactcatctaccccctcaagcaattgtgttttccttccttatcagcacagaccatcacagttccaggatttgtctgagatgctagccacctctgattgctattcactggacactcttgtgattgtgatttaagattgtaggccaggcgcagtggctcacgcctgtaatcccagcactttgggaggctgaggtgggcggatcacgaggtcaggagtttgagaccagcctggctgatatggtgaaaccccatcctactaaaaatacaaatattagctgggtgtggtggcatgcacctgtagttgcagctactcaggaggctgaggcagaagaatctcttgaacctgggaggtggaagttgcagtgagctgctatcgtgccactgcactccagcctgggtgacagaacaagactctgtctctaaaaaaaaaaaaaaaaaaaaaaaaaaaaaaaaaaaaaagattgtagaggaagtatgctaactgtcctttcttctagatttttcatttttaacctcatatgagattagatcaccaaaaacctacatggcatacttgaagtgtttgtaagcattactctcctcagaaatgctttcaccaagttaaagtttcgtctcagttttcattgaggatttgtgtgggaaggaaaaaattggccattggaaaatgtctgtgtcttctacattttcagatttatactgactacaattcacatcctttatttagacaatcgtgtcaaaaattcctcctagaaattagagtcaggagaatgtggtggttgttttttcttctccggatgaatcttacatgcttttctttttcaaagatgaacgctatagcccactgtgtttccatgactacttttgcttgaaaagagttcaaaatttatccaattattcaatagaacttctcctctgtatttgctaaaagacatgcatccacttctctagttctcttttaaaataatatcttcagtgttgtaaaagattcagtctttcagaatcaaatgattgtaggccaagcgtgctggctcgcgcctgtaacaccagcactttgagaggccaaggcgggcatatcacctgaggtcaggagttcgagaccagcctgggaaacatggtgaaacgccgtctctactaaaagtacaaaacttagctgggcgtggtggcaggtgcctgtaatcccagctccttgggaggctaaggtacaagaatcgcttaaaccccagtgagacaagatcatgccactgcactcctgcctgggtgacagagcaaaactctgtctcaaaaaacagaaaagactcgaacgattgtaagtgaatagaaacataaataaataaaatacatgtaaatgaatataattaacataaatatataatgtatatataatatgcattaaatataaatgcatatattgatataagcaagaaagtaaaatattaaaaacattctgaaaatcacatatttattaaacaatataaatattgtttttgtttgtttaattttccaaaatattatgctatgttatgctacctccaaacagaggttttcaacatgttctcctgggcaaacattgtcaccatcacctggggacttgttagaattatacattcttgaactcccactctgggcctgctgattatgggggtagaaaccagcaatctgtgtttcaacaagcctttcaggtgattcctacacacagtgaagtttaagagccactgttctgggtctcataataaaaaggtgcctatagttccaaccgcaagctctccgcttacctgcattcctgccttgctatttgcctgccttccttcttgcatcctgtattcccgctttttatccttcctatgtgtgtgcattgtgagagaaaatagtgcaatgatgaaagcgaacgctctggaagtacatgatgtgtgtctggacttgaactactacaagtctgccacaaattagtgtgtgatcctgaacaggtaatttggccattttaagtgtcagtttcatcatctgtaaaagttggacaacaacaatatctaccttagggggttactgcgaaatttaaaggagatggttatctgtaagctctcctagctccgcatttggcacattataaggtcttggtgttagctgctattgtgatgagccaggtgccgtgctgggcatggaatagagagagaaaaggcactctctgccttcagggtgcttacattgcattacatcttttaagatgcttcttctgtgggtgctctctaaagggaaatggatattgaacttgggaaatacattgcaagtcatctattcaaatctactttccactgtaggaatatcattttcatagtaataatggctagacatttaagcccatgattttgtcccctttttagtgctattgtgatatggaaagagtgcagactgtggagttaaccacatctgggttctcttcttcattcttctatcgcgtgacctcaagaggctctctgagccccagcctgctcatctctaaaataggatggtggcatcactcatgtttggtcacaaggtggtcaaatgagatggtgcacatgatatgcccactgtctctgcacaccactgccccactgtaaatagtcattttcttcaaataaaaaatcaacccaggcctttttctgggtatctgtgaatgccaggacagctttccctgttctcagattaaaacaatatctatataaattttaccagttgattatatttcaaccttcctcaatgagacactctttaaaaaaggaacataactgtatataaagtcaatctgttatcttccttgagcatgtttgttcattgtaaattcatctaggtatcctctcatgtagccatcatttctctttctggtccacagatatcccatgagagagtctttaaatgattttttggaatgaaaatatattacatatatgtctcctaacctaggagttagtgaggctaggttgacatgatttcttgctgtatccttacagtctcctaatggtcatgtattgaagacattagttcttctataagatagaagaaaacataatgccctaaatattttataactttaaattttatgtacattcattcaaactaaattgttatttacagatggaattatagcagcaagtcagtaaactcaaaggtcaagtccaataaaatccttagtagtttactcaaaatgtgaattggacatgcagacacattgctgaagagttcaccggaagaaggaggcaaaaaacaagtgatttcaatctaagcctagttgtttaccagaatttatctctgtgattttttaagcttaatcgtcgttttactgtgcatcatcatccattcatttagtcagctattttttaaacatctagtgaatacttgcttgtgtgagctttaatgtaatgccctggaaatataaagatgactatacatgactcctcaactcaaggatcttactatttagcacagtaaagacacagataaatagtcagaagtcatccttaaagtgaaaatctgggggggaaagaagtatgtgaaagcttagaggattacgtaaataagcttgcctggagggtcagatatgtttcctataggaggctaattttgagtgtaacctgaaaggcctcatgggagagcacaggaaaaggaaaaatgagtaggcagtcccaggggaacagattagcagagacatctcataggactgggaggtgcttctgtattgctggagcccagggaacattacagagaataaggggagattaggtgagttggagccagtctgcaaatggcctcgcagacctcgctaaggaactttaaacaatttttgcttggcaaatgagtaagtggctcagatgattcccgtgtttgtaaaggatggatagatttcacacatggakgccagtctgcagggtatggcactggttcaggggacgtgagaaggcttgaaaaacagggacagtggaattagaaaggttgagacagattttaacgtcattactgaagaatgacagaacttgttaactctttgcgtatgcatagaaggggtggggaagagggagagaaaagattcagaggtttatcaaggaactggatggatggttttgaatggttgtgctcttaaccaaggcccaggtgggtgagaggaaggagaatgtcctctaggacctagagcttgggagaaaggtcaaggctagaggattggatctaaaagtcttcaccgcagaagtggtagttagaattacaaagtggaaaattcctacagatactatggaggccagattagagtcctggagggaaagcatgacatttgaaaggaagcttaataaataagcaacagaagagattaaggaaacatgtccagaaagatagttggaaaactcagaagttctctgaaaactgaaggataagtgagttgtcaagaattagggaccagtggccaggcctggtggctcatgcctataatcccaggactctgggaggctgaggtgggtggatcatctgaggccaggagttcgagaccagcctggccaacgtggtgaagccccgtctctagttaaaacacaaaaattagccaggcatggtggggcacgcctgtgctcccagctactcgggaggctgaggcatgagaatcatttgaacctacgaggcagaggttgtagtgagctgagatcatgctactgtactccagtctgggtgacagagggatactccattgaaaaaaaaaaattaaaaattagggattagggactagttaaccatttcagaattgtkagcatggtgaagagtaaagactagaaatcaacaagtagatttgccagttaaaggaggactggtggctttttgtgactaaacacagaaagaggcagatgtgtgtgatgatttgtatgtgtgtacaatttatttgttttgttggtttaaaatgagtgcacagcagcgttcatccacacccatcattactaatctatagccattctaaaattatgggggagagttcttcatttctgagggagctcacccatgagtcacagtgttctgcatcttatagaatctttgacagtcatcaaagagattcagccaccagggaattaatttgattggtcaaatatgttttcttatgagtaaatgatcctctcagctcttttcacccacatatacccgacaaaaaaatggtttcaggaaacacagatacacagaatatctgtgcattaattttatgttcatgggaggaatacatttgtggtttttggaacataagtatagatacttatctaattatcaaggagtcctagattttagactatgaatagtctgtaaaattcggctcctgttgttgataagagtggctggtttgcttcatgtgttactgtgaagggaaaggaatacgatgtgtgtaaggcatccgtgctggccccggacccccagggagctgggggcagacccctccagaccccacagcatgatgtcctacttctgcactgtccattactgagccacattcctgtagtccctccagggctgacacttgcatgaagcagctcaaagatgtttttaaagcttgattttctttgtgttaggaactactttgtgctcattcgagttgtgattcctgatcatttggggtgcaagcgcagtgttttctctgagaaagtcagagattctcagtgatgaaatttataaataggtgcctgaggaagccttgtaagtttttttcctttgagataatgataagtgacttggggttgattttgtttccagtatatctcaggggttttgtggttttgtatgtgtgtattttaagtcactgaggttacaaaggagagaacagagagctcgtaataaacttcaccaaatcacctttaattccaaaagacatcraataaacttccccagatcaccttaattccacaagacatctaatactcacttctgtctttacctggagagaaagactcacagctcctaagctggcttttctaaccagcctttgtctagaatctccaccacctctctctctcctccccacacactccctaccttatgcctccctctgtgtgtgtgtgtgtgtgtgtgtgtgtgtgtgtgtgtgtgtgtgtgtctgtctttctcttttttctctccctctacttttgggtaaaaaagctttaaatttcttagcagacctgatggtgttatgttttagtaaagaatattgtgaactggtagtaacgatcattatatctgctttttgtttactgttagcagatccatctctgctctatcagaacctcagacctgtgacatcccagctccacaatgcacttaacctctcccatgctgggagattccataggcgaacagggctacttccagcaagccgagctgcagccagcaggaaatgaaaccgtctgccacagatacttatttagaccaagctattaatgtttagtggcagaaaagtggctccctttctcattcgattgaatgatgaaagcatgtctgtttccctgataagactgtggccagcttggctttcggtctgaaaggtggatgaagatattctgtctgcagagcgggctgcagggatgtctggtttcttttctctgtatctatgccagagtgtatctcccttcttcatctcacaaaccatttttaaacttaatcacactgaacttttgtatatgtttgcctgacaataaatgggtctggggttacgtagggagagtgtagagaaaaatacatctttattaggagagaaatgagaaactgctgtcgttgtttaaaataacccttaatgtaaatgagcccagttatagtgaggccaaaatgggagaaactttttgttggttttgaaaaataccaaaataaaaataataggaatttaaaacaagttttaacaaattctgtaatgaaaagtattttttattctctcacatattcctctctgatattataaaacttaaaaatagtctaattttcctagactcaagtttttcttttcttaagaacttacttttatgcttaatgccctaaccaaatgaagctgttactacttagaatgtttgcttgtaaggagtaaaaatttatatagatgtttcaaaatttatttagcttctctttaagttacatttacaactttatttttggaaaataaatttattataaagatttttttaaaggtaaatttgaacttaagttttaataagtaaagatgttttatattcatatggtcatttttgcccaagacctagaaaacagcttcaactgaggaataaccttatagtcatattcctcaccaaatgcttcacacctcccaggggtagttctctgtagcatcacaaactctgtcattaccaatcaacaatttcacactttttttaccttgataagcttgaatttcaggttttatattcattccagcattactctatctttatgggaacctgttgaataagccagttggaggatgcaatagcttagaatcttatattctttgaaatgtggagccgcgattccctgcctatctgtaagtcagcctttggggcttccctaaccttctctaggtgcgactgtgaacaatgaagtatgtgggagctgggggctggggagaagcctgcgacaactgaaattactgcctgtaagtccaggaactccattcgttttgttagaaacaaactcggagtcctactgctctcattaattagcttagtcatctggatttctctagagaagacagagattgtgaaaaggaaatagagtttctgcttaaggtaggcatgctggctctatcaagaagtgatcacagcctatcatcctaagaagaaacagaagacataataagtacaaacaaaaccggcaaagtacagtgttgggtcagggactgggcagactgccttacatatctcaggaggccttagtccttaggaagggggccctgtattacagcacattacaacagtgaagtgtccaatgatgaacatgggccatcaactaaaagttaaatcgttcctttttttttttttttgagacagagtctcactctattgcccaggctggagtgcaatggcatgatctcggctcactgcaacctccgcctcccagattcaagcaattctccagcctccgggtagctgggattacaggcacccaccaccacrcctggctaatttttgtatttttagtagagatggggtttcaccatgttggccaggctggtctcaaactcctgaccttgtgatccaccctcctcagcctcccaaagtgctgggattataggcgtgagccaccacaccaggccttccatttctttaagagagagaaaagtttaatttgtttcaagaaagactattcaaaattggttatacaaagatagtaccgtaaagggggcaagtttccattatctgggaattacacattcattgattaatctcactgtttctgagcattgctagaaggaaagtttgcttcgagatgaaatttattttactcacattggacttacctttgaaatttattcagcgtagttttgtttctgaagtttcatagacaataaaagatattgtaaaatattaaaataaacatcaagttttatagccattatctaccatttagtgtccatstcttccatctaaaagataatgctacatttcctgttttctagtctctgctttctgtgttgtttgattttttttccccaaagtcactaaaagtgatgaatgaagtttcttttcattatcatatggtttggttttgctcatattttccttctgttatctggattgctaattagaagttgcaactgttaaaatgagcctatcacagatgtcatcttaaaatttttacttccctttttagttctctaatagggtgaaatcttgattcacaaatgccctgggtagtccccctttgtgtgaatgcatccactaaaatatatatatatgtgtgtgtgtgtgtgtgtccccccccttcccccccttcacccgctcccccgcccccccccnnnnnnnnnnnnnnnnnnnnnnnnnnnnnnnnnnnnnnnnnnnnnnnnnnnnnnnnnnnnnnnnnnnnnnnnnnnnnnnnnnnnnnnnnnnnnnnnnnnnnnnnnnnnnnnnncacagagcacatatatacatatgcacacacacatatacatatgcacacacacatatacatatgcacacacacatatatacatatgcacacacacatatatacgtatatatatctcttcatgaatcatgcacagagctgtgtctctgaacagcatccatagacccccaccaggattagaagttaaactcaagtgcagacacagtttggaagccttttgaccatcttcagccccgctctggtttcctctctcaggacacacttccctcttcatggtgattgcrttctcactctatcaatgaggtattgtccctctttttactttctcctccttcccaaacaggacatattggtcattttaatttattgtttgaaatgttatctccaccatgccttttcactaaaagcctttcaagtctggttgtgacatgaccatcttttttctacttagttaagaaatgttaggcatcactgaatgaggagtgaggcaggagagaaagtggatggaacacgtacaaacagttactcaatagactcagagtggcagctgatgaaatctgccaccgtaaaccaaatggagagcccaagtaggaagatcgaatgttggcagctggctcaggctgtcttcgtaccgacttctccctcattatttttcttatttctgccaactctggcaacatagtcgacctccagggacacattcttttttcctgccgaaagtgtggaaaaatgtcttgttgtcagagttttgttgaaataaaattggcttttggaagcagcaacatttgctgggaagcttaggaggagtgagactcaggagcaagttgatgtggtttgggtttgcaatctggtacaagagtgggaactgaggaagtgtcgttgttttgggggtctggcagcaccgctggggcttcagggagtgttaatgcctcagttccagggcaccgtttctcagggtggtccttacaggccacctacaccagattctgccagatgctacttctgaaagcatcctagagtgactaaatcagaatacctaagaataggcctagagagctgcattttaacaaattctccatgaatctcctgctccgaaattagaagaggaactatattcaaggttctggggctcagttttccagctgcccaggtcatttatgtgtgcataactagaggcgcttagagtgaggtgactgactcatcctagtcacacacataagaaaccgaggcataaacctgaaaaccagttggaactcttgcctccatacaggaatcctatggcagcagaaaggagaactgttcatagttcttgaagctcagtttgctgtttcttgactcttactcaacctttatatgttattctttcatgttcaatccattttccttttccaagagaagtataaacgattaagatgtgcctgttaaacaaggctcggcagtcgcttactccagaaagatctctgtaaacccagccttcccacccaggatcctcctccaggacacagttgtaccttatacgaacctgggtggttgctcttaatgcaacattgtcatttacttgctcatgagtatctctctcctactagacattgaatttcattgtccctataatgttgagctgtgcctagtgctggacctcgagctaatgcttcagaaatgactgaaaaatgaatggatgagctgaaagatcttgtgaggcctccgatgcacattctcctcagtttttgtggtctctgccgtaaggaatgactggatgtttttgtgtaaaattaaaaatgtttgtattagactcggtttcctgtgatccttacaaaaatgtgttttgagaaaaaaataaataggattgggagaaaattaagatgctttgaggatctaaatacttgtaaagtacattttattggaatgccacaaaatgctttaaaaagctccaagtaaatttaagaggagatccactggattttgactaagtgctgaaaaaaaaaaaaaaaaacagtttccttaattccctatccaaatacttcaacttaaatttactggtagctgtttcagagggagatggggatgctgcaatccttagtttgttataaagaaaatgtttttatcttcaaatgtttagaggaaggattaaaggcaatttacggcttgggtgaaaagtaataaaagtggtaacaatgaagtatcttctaagttgtcatcattttctggaattgctaacaatatcaaccaggcaggcattttatatctgaaaggagttactttcatttgtcatgctttaatataaactataacatcaatcttatagctgcaatactgagttgtttgtttgattctattgtttaaaaagaggaattgatttakttgtaaaggagatgaattctgtcattagattttttgccacagggatcaagaaatatatttataattcacttctttcaggaaattaggctataaggtctatatgaaatgcattttattaagaccaagccacagcctctttggtttctccagaaataattcatttttaattcccaaggaaaagtcacagtaataaaaaataaattttacctgttagattattttccttgtcatagctcccctttttattaaaaaaaaaatccaatttacagatttcttactatttgtttaattaaaacaataataaattttatagccttttacaatgcataaagaactttttaaataaaattttactccgtctttgcaactctgtgcagtgataatgaagataatttaatatataatggaaacttttcactctgtgagggaatagggaggttcaggggtacaagaacattaccggtgtcaaatagcagagccagaacttcatacaggactttgctccaaatagcatcttcttttaactatacctctggtcagttcaatgttgttttccttgtcatatatgcttaacaagaaatactagaaacattaaaatgttattactgctcactctcttttttgttatcaaatgattggttcccatgctagatgaagctcagtttttagaaactgctcaagtatttattgcaagtgatttgtatgcatgagtgtgtgtggtataggaagttaatctgaaataattttaagtaagcatggcatgtaaattttcttttttttttttttgagacggagtctcgctctgtcacccaggctggagtgcagtggcacaagtgcagtggtgccatctcggctcactgcaagctcagcctcytgggttcacaccattctcctgcctcaacctccgagtacctgagactataggcacccgccaccacacccagctaattttttttgtatttttagtagagatgggatttcaccgtgttagccaggatggtctcgatctcctgaccttgtgatccrcctgcctcagtctcccaaactgctgggattacaggcatgagccaccgcgcccagccggcatgtaaatttttatgtgacactttttttttggtggggggtggcaggggagagggtctcactgttgcccaggctagagtgcagaggtgctgatcacagctcactgcagggcacgcaccaccatgcccggctaagtttttgtattttttgtggagtcagggtctcactctgttgyccatgctggtctggaactcctgggctcaagcaattcacccgccttggcatcccaaagtgctgggattgcaggcatgagctactccgccctggctgtgatactctttaattattctaatgcttctaacttacgtcatggtgccaatcctatttatataatagaatcaatctcatactctcagctgacaatgaggggtatttcattwtttacttgtrtataagattccttttatataggatgaaatgcatacacactctgcatagaaattcttatgtgtttgtatattactccattcaatcatactatgattccaagttaagaactcctagataaattagcstctgtagctgtaacagttgaggctttcaattcaaatgtcagataacattcttctgtgtattgtattattttctgcagtaattcaaatctttattgagttgaggtttgctcacttactataaggtagaatgaggtgatctaagtaggttttgtttaaatacatgtgtcttctccccatcagagtaaaagaagccgaagaggtgtgtagacagaagaaaggaaaatcactttataaaataaaaccaagacatgactctggaattgtaagtattactgatttttaacttgttattttctttggcttttaaatcctattttcataatatatacaaactcataatattttaattatttttctactaagtgtgaataaataaggagcttctgacttcaagaatctcctttttcttatgcctttaatcaggcccagaaggctaagagtcttgatattgattattcaaaacttaakaattgggctgggggtggtggctcatgcctgtaattccagcactttgggaggccgaggtgggcgggtcatgaggtcaggcgatcgaggccatcctgcccaacgtgatgaaaccctgtctctactaaaatacaarcaattagccgggcatggtggtgtgtgcctgtagtcccagctacttgggaagctgaggcagaggaatcgcttgaacctgggaggtggagattgcagtgagccaagattgcaacactgcactccagcctggcaacagagtgagactttgtctcaaaaaaaaaaaaaaaaaaattaagataaatctactgaatctactgagggtgtgcatttatgtggatatgtgcatgttggcaggggcagggtggggagaccatctttcactttctttgttacacacagatcacggcagaggctgtatttgagccacgagtgatcattctaattggattagatccactgggatgtaaagttggtgggaagcgccaagagcagtgtgacgctttgcccagggtgcccagaccccgtttatatccacagatggctcggcagagttggctgccggagagtggtcagtccagagacggagtttaacaagctcatttaagtttcctgcttgcccactccccgctttaaaacaaaatgccaggttatccaccctgggagggaagggcttggttaaaatgacaaggcttttccttgtgatactgaggatgttttgttgactgttttgagggattatcacttggtaccacagtgtaagtaaatgttttaaatgaaaagttgagttaggccttaggataggaccattctaaattgaattagtctaatgtagtctaaagggaaaagacattaaaataacccaaattgggatatgattaaatagccctgtttttttttaaaaagttaggaattatatcttcatttagaagcagtggtgccttcagtttctctgtatcaaaatgatcttatctaatgataactactacatgatagttcagcttatcttctgctcctgatgattcagtcttataactgtattgaatgtggaggaatagttacttattagtgaacctcaatcttgctattatgagtacagaagataattagagtacatttaccatgaagtgaagcagccacttcagttttcatatttatgtatttgcatgtaggattgaggatgagaatggagagtttgacaccctctcatattggttagaagttaaatttttaaaacttttttttttctcaaaagtatttggcgatttgtcttgataaaagtgctcaaagaaacacagatcccacttatacttttttcctttatggactggtagacctttaaccttgtcccacagaatttgatccaaatgaaaaggtcttttttaggctactctaaattctttccatttttaaaagttctttctaactaaaacttttatctggtgtatttgttttcagaaagcaaagataagcatgaaaacttgaacaatgaaaagcagaatgaaaatgagtcattgcaacgactttcacaaaattcagctgacctgagagtgggagggaaactaccgtcattctgctcatgtttcttcttgacctcttgcrtaatctttttgttttctagacagttcactaattgttgaattttactgtatattcatataaaaatgcaaacgtactagaccagtggagaatttgacaccttttctttttgtaaaagtttatggtattataccgatagaccaaaacagcatgtgtaagaggcagtatctgcactaattctcaacatgctaaacattaactacaattcactgttgtgagaatattcctcgtcacagcaaaaacactttcctttctactgacaaccagtcctccacatcacagcatttagacatatgggtaaaatgttatttctagtgaattgtttgtatcagtttcatgtctaagtataaattttctattttaaaatttaagaaccgtttataatcagtgctttcccaactcttgggttgctctccataactatgtatttgtgaaagaaaatggtcattttttttactgaagtcatataatgacttgggtcagctcgtaatgcattgtgatggttttgtatgagctgggtgtttttttccattacttttaatgatcttcgttgcaagttatagttgtggataaaggggagaatttattgctcttgcaaaccaattatggaaagcaacttaagaaaaccaatgttctaaatcataattgtttgtatttatgtaaagtatggtctcttactttttagtttgtagtttaagtgcaaagaaacagtagtggttttttttctattgttttgtagtcttcctgtccccttcagtccctccagtgtgtatattaccattctccaatgaaataatagggcatttaacaaagatcgctatgtgcaatactgtatttagtgtttctatttcaatttttctaggatgttaatttatatgaaaataaaatgaataataaaagaataaagatacttgcaaaagacagctgtcatatttaacatggggtggggaataagagaaggagggaaaataagttaggcatgctgcatattcacctgcacacacacacaaaaatgtgcgtacagtttcagggacttaagaacttaaagcccatcaatgatacctaagtaagaaatcctggtaaaatatttattcctttgtggcttgaactaggatctctttcctgatctcccaaagatcttctggtcattttcaatcagatatctcaccatgccttaaaattcattatgtgtaaattcaaactcagcttgtcatcttttccctccatacctgctcattcttgtgtattatctatctcagtgaacaaagccactattcattcagaaacccaagttcatcttttgacatattacttatcacaaatgcatacatttgtctctgtcttttctattaaagtcttagttcagaaccctcattaattcctttattaacctactcattgttctcatcttccgagatttgccctgcaacatatttttaaaatttgaatccacctttttctaaaatacaaatctgctcatttgaatttcctacttaaagcattttaatggccacatacactaagatatgtggcctcaaaatgttatctaaatgtttaatatggcagacggagtcccaagcagtgcctacttacattttgagtttagtctcttgacttaacctaccttgaattccagcctccagccaaactaaaatacctctaggctaatttcctctcaactatatgtctttccgcatgtttgccctcagcttgaaacattgtcaacatttcatggattcactaataattgtatctgagtttagaaggcatttgttccaggatatctcttgacactggtctccctggctcctagcgtgtgacagagactcactacatatttgctgatgaaggcaagataggagtgttaactatgccagatgcttcaggatacaagtaggttgaaaatggaatgaagtcccttgtttgctgaaaaagggtagtggtaaaaacgaaggtagtgttaaggaagtagaaaagggaggttcaatacgctccatacttggaagacttctgtcattcaagaaacattgtgctgtgagttaagaatttggatttcccctctgtttccaagtagaaaaataacatgaaatatattttcaaaagtatagatgcagggtgggaagtgggggttgcaagagagtgcatgaacaagaggaatctctatggagtaaagacaactgatcatgccccatttgtagagggaaatcaacccaggatcactaccagagatgtgagacttacctaccagtgaggatccactgaaaacagctgcagaggatgccacaggatatggcaaacattagccagccagacacatggtagcaggagaaggcagactacactgggccagctaacttctgggccatgtctgtacctgcagtgtctctaatgtcactgacacacagcccagtgccacccagaaagccgggttctggactaggaatgggtggacgcaatggaaaatgaccagatacagagagagagaagaggaaaaagaacgtgagcactctctcaagacgtctctgcaaaacacacatccaaagcacggaaggaaaattctcaaggagaaagaataaaacaactcaataaacagcaaaatgaattcacctttaaaatgcaaacaacacggcaaaacttagataatagttatatctagaatctgtaggctaggggtggtggctcacacctgtaatcccagcactttgggaagccgaagtaggtggattatgaggtcacgagttcaagaccagcctggccaagatggtgaaaccccatctctacttaaaaaaaaataaccgggcgtggtggcaggcacctgtaatcccagctactcgggaggctgaggcaggagaattgcttgaacccaggaggtggaggttgcagtgatccgagatcatgccactgcactctagcctgggcaatagagcaagaccctgtctcaaaaagaaaaaaaaaatctgcaaaggaacttcaaatatataatcattgagacacaaaaaacagaagctgaatgagttctagatgggcacacattaagtgacaagtgatttggaaggtagcaccaagcaatttagtgagaccacacagcagagagagaaaatatttgtaaacatgtaagagaagttaagagagatacaggataaactgagagactccaattaaagaggcagtccatatggagaaattaaaggaaatagtagaaaagccaaataatggcttggaggaaaaaaatggctgagaattttccagaattgaaaaaagatatatcctctgcttaacacgtatcaagtgccagacagatatataccaatacatttgcaccaagaaaggtcaaagtgaatctccagctaggtaaagagaaaatttgaaaacctcttgaaagaaaggacacgttagccgggcatggtggctcacgcctgtaatcccagcactttgagaggccaagacgggtggattacctgaggtcacgagttcaagaccagcatggccaacatgatgaaaccttgtctctactaaaaacacaaaaattagccaggtgtggtagtgggcgcctgtaatcccagctactcgggaggctgaaactggagaatctcttgaaccggggaggcagaggttgcagtgagccgagatcgtgccattgcactacagcctgggtgactgagcgagactccgtctcaaatcaaacaaacaaacaaaacgacagaaagaaaggacacgtcacttaaaatgaaacggcagttattctgaaagtagatttgtcctcagccacaatgtatgttagaaaatagtaacgtcttggctgggcccggtggctcacgcctgtaatcccagcactttgggaggctgaggtgggcggatcacgaggtcaggagatcaagaccatcctggctaacacggtgaaaccccatctctactaaaaatacaaaaaatcagccgggtatggtggcgggtgcctgtggtcccagctactcgggaggctgaggcgggagaatggcgtgaacccgggaggcggagcttgcagtgagccgagatcgcgccactgcactccagcctgggcgacagagcgaggctccgtctcaaaaaaaaaaaggtaaaacgtctttaaattgtggaaggagagcagtgaattgagatcattagacccacttgaaacatcattcacatggaaggggagagagagattttcagacatatgaaaagcacaggaggtaactacgcccgaagcctcactgaagcgcctgctgcggggcacatttcagcaaggaaaaagatgcaaacgaagtgagggcctgggatttaagaaatcacagaagccatagaaactggtgaaacaaaatcaaccctagaatgtaaacagtaacaattacaactaatttttcatgtttacaatgggcactaaaattttagatagtaacaacttgggtgggagaagttcagggaatagttcaaacacgcgatggggcatgtgctgctctcttcattcattcaattctgcaaatgtttagagggtcagtgtgtgccagaaactggagtaggctttnnnnnnnnnnnnnnnnnnnntttgtaaacatgtaagagagttaagagagatacaggataaactgagagactccaattaaagaggcagtccatatggagaaattaaaggaaatagtagaaaagccaaataatggcttggaggaaaaaaatggctgagaattttccagaattgaaaaaagatatatcctctgcttaacacgtatcaagtgccagacagatatataccaatacatttgcaccaagaaaggtcaatgtgaatctccagctaggtaaagagaaaatttgaaaacctcttgaaagaaaggacacgttagccgggcatagtggctcacgcctgtaatcccagcactttgagaggccaagacgggtggattacctgaggtcacgagttcaagaccagcatggccaacatgatgaaaccttgtctctactaaaaacacaaaaattagccaggtgtggtggtgggcgcctgtaatcccagctactcgggaggctgaaactggagaatctcttgaaccggggaggcagaggttgcagtgagccgagatcgtgccattgcactccagcctgggcgacagagcgagactccgtctcaaaaaaaaaaaggtaaaacgtctttaaattgtggaaggagagcagtgaattgagatcattagacccacttgaaacatcattcatgcggaaggggagagagagattttcagacatatgaaaagcacaggaggtaactacgcccgaagcctcactgaagcgcctgctgcggggcacatttcagcaaggaaaaagatgcaaacgaagtgagggcctgggatttaagaaatcacagaagccatagaaactggtgaaacaaaatcaaccctagaatgtaaacagtaacaattacaactaatttttcatgtttacaacgggcactaaaattttagatagtaaaaacttgggtgggagaagttcagggaatagttcaaacacgcgatggggcatgtgctgctctcttcattcattcaattctgcaaatgtttagagtggtcagtgtgtgccagaaactggagtaggctttgggagtcacggacaaagaatgtcccatcctcgtgtaacttatgttctaatgagggagacaagcgatgtaaaataataccaggcaatataatatttaagaagggtgacaaataacttattcttcaaaccagaataccattgagagtaaaagtgaggctattacacctggaaaatctccataaattgataccactcccagacaaactctggtcaccctacatataagcactacgtgagctttaagtgttatgaagagacatagaaagccctatctccttaaaaaaaaaaaaaaaaaaaaaaaagaatggtcaagtgtggcgtctcacagctgtaatcccagcagtttgggaggccaaggcaggaggatcccttgaacccaggagacaagcctggtcagcttagggaaaccccatctctaaaaagaaaaaaaaattttaatagccaggtgtggtagcacttgcctgtggtcctagctacttaggaggctgaggtgggaggatgagttgggcccaggaagtggaggctgcagtgagctatgatcacaccactgtactccagcctgggtgatagggtgacaccttgtccaaaaacaaaacagggagaagatggtgataatgaatatgtttggactttgttacaaaaatatgaaagtaaatataaattaaacatttagcactgttcattaaaagaacaaaaagaattaaagaaggaataagaaaaaaaaacatatcaactaaaggtcaatccaatccaactaaaagccagaaaggtaagaaaaaacaaagccaaaaaaaagtatggtaaaaagagaagtgactgtggatggtaggtgggagaactcaagggtaagtggatgggaacaaattgttacaagctctgaaaatcctgtgccattgttccttgaattacaccagctgtcattagcatttccacttcccagctaatcggtgaactcagacttttggaggttgtatttgtttcctgtgaaacacagttaaacaatcaaaagcaatacgaagaggtttgatgttctaaagtggtgtgacaaaggggaccttcacccccttctctctcaaaaatcattccaaagcaacaaggaacaaatatgcatcatttttgatttatcttcaattaaaattagaggtgtcgaaaacccaaaccacaaaatatacagaagatctcccaaatgtgtgggtatggaaaaaggcagagaggatgctcatgaagacacgtctcagaaaaagcaagaaagtctccttctccaaggtgaaaccatacccttaggaggtgttatctcaaaatccttctccaaggtgaaaccatacccttgg

SEQ ID NO: 96686 - DNA, 104269 bp, Homo sapiens
  misc_feature (1)...(104269): n = A,T,C or G
gaacagttctatgattatgaggaccctttcacaactaggatttctatagccccttccttcttcctcatttgctgaaatgagccacatcatccctcaacttctcctgttccttacctccctctcccttctctgtgcaccctactcattgactgagaccacaaatgcttactgaataccaactccggccagctggggaatcactcacgctgttacattaagctgtatcactttgcctttgtggagcttacgttcttaaacttgtaggagagcggggaagacggccaataaacaaataacactaccaggtacagtcaagtgttataaagaacaaagcagataagggtacagagaataatccctggaaaggcagggctgggtaaggtaattaggaaaaagcctatctgaagaatcaacgttgaatcagaaagctgatgaagacagagatcaggcaatgaatgatcagagggaatagttctgcagacacagggtaagtggttgacagaggccaacagtatcttagaaggctaagaacacagctcaattgcagtacccactatgttttagtataactacaggtttataggccagttgtacctctgtgccctctgaaggtaggagctgtgtttcttattcctgtctgcattcactcagtcatatttatctgcccaacattctataaagaatgagctgtaataagcattcagaaaatatttgctacataaatgatatttgtttgatttttcagttgtgggggttaattttattccctgctgaattctgggctttctgaagccccatttagacttctttgtatacccaaaagtgccattgtccctcaacttctgctatccacctctcccttctccatactaaactgctcactacaactactctccccctgttctctcacctctgcctctgcatgaattcacctggactgccttcttcatcacctccaccttcctcacaaactctcaagattaatctccaaatttcattagtgtactgatattatcatttgttcaaatatttccaaatctctcaagttcttcagtaaaacttttccatcaagtaacagaaagtgatgcatcaagtgacaattgcagattgagtggtaaagacagctgaaggacaaatgatctgaggttacttatgtaatttcttttcctcccccaaatatgccatatttcagtgactttctgggctttgcgcctgcagaactagaccagggtacgagggcaggaatgttctcactactgtgggtctgtgcactcaatcactcacccataaaagaaatgccttatttacagcaaacaaaaccaatttaggacaaagctatcacttaacggtcttccccacaaggaaggtcaatagtttagcatctaaattatttgagatggattcccttttctaaaagcagaaattgcagctgtacttcattttaaaaaaagaaaaaagtcaaatatttattctcctaggcaagagggagatacaggtaagtcacaacttccaatgcagccgccacagcctcatttagctgataagaacttgcccataacctttagtccttcacttacaaaagtcatgcattcatctttctcctcccacttccgtaaaggcagaaaattaggctggagccattctttctgagtatacaacagcaggggcatgggtttaagcagtttctttgacaacatacattcctctgtaagtccctggacagaagctctgggctgcacagaaaacatacaacaaggattctaaaataggaggcctggccaggcacagtggcccacatctgtaatcccaacactttgggaggctgaagggggcagatcacttgaggtcaggagtttgagacaaacctgaccaacatggcgaaaccccatctctactaaaaatacaaaaatcagccaggcatggtggcgtgcatctgtggtaccagctactcaggaagccgaggcaggagaatcgcttgtacccaggaggaggaggttgtagtgagccaagatcaggccaccgcactccagcctgggtgagagtgagactctctttcaaaaaaaaagtaaaataaaattggagacctgaaaggcagtgcttctcctacaagagagctccatgaacttccactagccaaagagaggggaaataccctaagagacaacaaaactgtgcttagacttaagaaccatttcaaactcagtgccctcagccaacatttcccctaagacttgactggcagtatgtactcatatcttgcccaccatggcagtgcctggctatattacaccaccaagtactgcacacacttttcacttggctatatggacacagcaacatggcccctgtctaccaggatttaggtctttggaaagacttctaaccatggttagacccttactgctaaattcactgaacaccactctgctaaaagtttcaaagccagcctaacttagatttataacagggggcgtgtacagtacattaattacatgcctgtgctttggctgccaggactgggattcagcctctgtatggtttaaacccctgaaacctccttagcagaccctgcaggtctccacatgatttggcccttgtcttcctctcagacctagtctactaccactttccccctctaattacctagacatgcccagctcattctcatctcagtctttgcacttgctgtctgctctgcctaacacactcttccccttagtctcacctagctggctacctttcatcgctcaggtctcagctcatatgtcaaaaaggccatctccaggatcacttacatataatgctgagcaatgtgaagtatgtgtatgcctacatataatttcacctaaagtacaaaactgaacaaaaccagcgttataagtcaggggactggtgaccctttgtagggtggaggtagtgacaggcaggagcaccagggggcctctgggttgttgttaaatgatcgttttcttcatctgtacctagttagctgggtttgcattcagtttatgaaaattcatcaagttgttcatttgtaattgttcatttttcagtatgtcttatatttcagtttaaaaaattatgccaatcaaaaacacaccatatcaaataggtctcctctgatcatccagtctaaactaccctgctgtgaagcaatccattctccatcccatgaccctgactgattttcttcacagaatctgtcattggctgaaatcattttcattattggttatatgtgtactggctcactctctcccacctccattaaaataaagtatcacgtggccaaagactctgcctgcctcattcaccatccccaaaccccagggcctacaacagtcctgccaaatggtatgggctgaataaaaactatatgaaaaataagaaatgactaaagtggaccctttaaggacgtactatcaatcaaaagtcaaaacagtaaagctaacagcaaaggtgaaaaaaaaaaaaaaacttcaatgacactaagcatcaggaatatgtgtcaaatgttaaatttaaccatagggaggaggtagacaaaatgtcattctatgggtatctttgagagaccagttaaagttatttctctaagcagaaactgggtcttttatttctgtacagacaacagtttttcacaaggcctggtggtataaaataggtctgggccaagagtggcaacagatttctgagacacttggtgaggattcttaagtatgatgagagaagtgggccatgtttaactgcaatgtctgccacgggcaagggactatggaaacgtaatatcaaatcagtgtacatgaaacagatcataggaagcacccaagaatttgaaaatagcaatactcaccatttttatggacaattctaagatggtcataaagaaaaaaataaaaatgtgtcagtggtgctaatgacttggatgttatatagttactactggcatgcagattaatttgcatgttgatataatatattttcatgaggaagtatatactcaccaggaaacagcatggtgtaacggaaacgtaaaggtaagcctttactctggaatgccacaaactctcactgtatcgttgaatatgtcattgaacttctttaggcctcaatttctctacccatgaaatgagctggctggactaaatgattgctaatgtccatttccagttcttggacactgtgtacctttctatctttaaaaaaacctacttttaccttctaagaatttacagaaaaacacatcatccacaaatatgtaaatcacagtaaccagatggggcgtgctaacagatctttttacccagttttcttgacaaaccaagagtatctctccccaaccagattttctcctgtgttgcgttcagcctcttatttcttggttagggaagtaggcttcacatatttcagctaaacactctgcattttcagtttctctgtacaattcatgagttttcactgccctgggccccatgtttctcatcaattcaagtctacactcatggtaagcaccctagttcttgttttttctaacacttaaataatgaataggacttcatctcctagagctattctccttactctattacaacagttattagtgagttttaattagacaaaactgccattccttttgctacctcactatactgtcaagcacctattaagaatattacagtagtaagtattagcaccttttaaatttacattaacaataacagagaaatggggaggcaggaaatgaaaggagaggggtaaaaatagctcacagatgtcataatcaaagtttagaggaactcaaaaaatcattaatcactattttttaaattttctaaaaaactatactatgcacatcctggttaaaattgtatgagtgataatttgcctctcatcaattaaaaatggggaaataggcaaggtcattaactctgctgtggctgaatcccagactgtgctttctttaaaagggaagagagataatctacggagactaaccagttcagtggttgagtgatttctacaagagtcatcaccaactcaaaactttcctgaagtccttctgactattttaacgcttgccatctgcagaaggtaaaaatctgctagaggccaagttccaatcgctatccagcccaccactgaccctctttgatttcattctccatcaacaaggaggacatggacagggtcaatggtctaatgcgttttagtgacagccctgatttttcattggaaagaggagaaagatcgtttcccatttttctccttgacccacggatttgaccaactcaggcacattaaaagtctgcaaaagcaggtagcctgcaggaagttcaccctagggggtgagttcctagttgggctgaaacgggtttccaggcatgtttatcacgtggtctaaacgtgctcagggttagtgccagaagtttgaaaagcagaattagtagagctgacaataaaacctcagggctccaaaacccggtccaagaaacttttcttaaacttgcgtccagcgcctgcttcagcgccttcgccatgagtctgcgcgggcagacagcggagactctagtgcgttgggtcgctcataccccgaggcacccggggctgccgccgcgccgcccctgccccacactggagcggggttccctgctgcgcctggacccggcgccgcgtcacctcccgaagtggggcgcccgaggggccgcgcagggggtcaggcggagaccaagagtagcagggggcgagggaagcccgggcaggccggcgccgctgctggcgcccgcagctcctgcccccacgctcacctgggacccggccgccaggaagcggggccgcagcgctagggctcgcagaagcttcccggcctgcgctgctacgggggacgccatcttaaacaggaaactcggcacggggcagtagggcgggcgcgggcaggggaaggaggcggaggaggagcagcgggaggaggggtcagaggagaagcgggcgcggggaggaaaaggaggaggaggcagaggcggtctgggccgggccgggcctgacccctgygtcccgggggcacaggcgttcttaaggctgcagagccctgggtcccccacccggccccggttcactttgagcggtcccaaggcctgagggcctactgtccagtccccaggttatcgtcctgagcaaagacagaccccgagccctgcggtcttggggctcaaacagtccctggatggccaaacaagcaaatattcgccatggcagtgggtgctggaagggtggctcacggagctgacgccctccgcagagaaccgtggtctagtcctgcggtcacgaggcctatctgggacagtggtgtttgagctgagactttaacgaatagagacaggtgaggttcctgcagcccagggcttcaggtgagtcaaggagaggccattggaggctctccatcccttaaggagttgtgggtgttttgttttgttctatccttaacctaaaatcaatgtaaagctgagagatgaagccgggtgggtcggttggggacttggagaacttctctgtctagctaaatgattgtaaatgcaccartcagcgctctgtgtctagctaaaggtttgtaaatacaccagccagcmctctgtgtctagctaatcaggtggggacttggagaacttttctgttagctaaaggattgtaaatgcaccaatcagtgctctgtgtctggctaaaggtttgtaaacacaccaatcggcactctgtaaaaacgcaccaatcagcgctctgtgtctagctaaacgtttgtaaatgcaccaatcagcactctttaaaaagggaccaatcagcactctgtaaaatggaccaattggcactctgtaaaatggaccaatcagcaggatgagggtggggccaaataagggaataaaagctggacaccggcgccagtagtggcccctagttggggtctccttccaggttgtggttgctttgtgcttttgctttttgcagtagctcttgctgctgttcactgtttgggtccgcactatccttatgagctataacactcaccacaaaggtttgcagtttcactcctgaggtcagggagactgcgaacccactgggaggaatgaacaactccgtatgccccaccttcgagggctgtaacactcactgcaaaggtctgcagcttcattcgtgaagtcagcgagaccacgaacccacaggcaggaacaaacaactccggacgggccacctttaagagctgtaacactcactgtgaagtctgcggcttcactcctgaagtcagcgagaccacgaacccaccggaaggaagaaaccccagatacatttgaacatctgcaggaacaaattctggtcacgccatctttaccgcgagggtctgcagtttcattctggaagtcagcgagacgattaagaacccacgggaaggaaccaattccggacacaaagctattggaggattttaagcccagtaatcagagtgataaaagcaacattcatttggagctgtgaaccccaaatacctgacacaggtctcaatcaatttaagaagtttatttggccacagttaaggacacgtgcctgtgacacagcctcaggaggtcctgacatgtgcccaaggtgtggtggaggacacagcttggttttatacattttagggagatatgagacatcaatatatgtaaaatgtacattggtttggtccagaaaagcgagacaactggaagcaaggaggggcttctaggttatgggtagataagacacaaagggttgcattcttttgggtttctgattggcctttccaaaggaagcaatcagctgtgcgtctatctctgtgagcagagggatgactttgaatagaatgggaggcaggtttgccctaagcagttcccaccttaacttttccctttaccttagtgatttgggagtcccaagattatttccctttcacagagtttacgcgagtctaagcaatgtgcatataataaaaacaacagcaaagttactgaatgtgtgccaagcattagacaaatataaacttgtttagtcttcatagcaaagttttaaatgagtagaagtgtacaatccccattttgcagaagagaaaactgaggtgcacagaggttaagtaacttgccagaggtggcaggtctgataagagatgagattcacatcccttccacccacccccaaattaagcactattttagatttttttttttaaccttactcattcttgagcatatgatcatgaaaaaaggtacaatgtgacataagtagacagctgttgctactagcttctttcctaatctctctctttggaaagtgggggagctgaggatttttattttaatataatttctagcccatttcgagacatagttttacccactagatgtagcatcttttgatgataaggatgatgatgattgtttaaatcaattattgtcacgatggtggcaaagtggcaaggtctaactccatcctacatttattagtctgtattctactcagaaaaactgcactctttccatcatctccattgatgaaagaaaaacttcagctaaattaaatgtaaaggagtttaattgagcaatgaacggttcgccaatcgggcagctcccagaatcacagtggattcacagagactccagcgcagccacgtggtggaagaagatttatagaggaaaaaagggaaatgacttacagaaatcagaagtgaggtacagaacagctggattggttacagcttggcatttgccttacacagtttgaacactcrgcaatgtataaatggttaaaatatggccactgggattgccaagacttagctgttgttttaggtccatacttctaagttaggttttcaatcttgtctacctattaagctaggttgcagttcgtccacaaggactcaaatatagaagtaccgagtcctccttaggccatatttagttcactgtaacactattcgtcggtgaattgttttattcacttgtatcactgtggactcatggattcttttttattaaatggcaaaccgatgctctttcctgatacatacactctgctgcctctgttttcagtcatttaatcttcacaggagccctgcaaatggggtcctactattattcccattttgccagagagaaacttggccacagagttccacatgacatttacatgactctaaggtcaagtaacttgccaagggtgacacagcttgggatcaaatttcccaaagctggactccaatcactcttagcaccctcctcttgacaaaactggatttgagtttccatattgttcatcattacccctactgggtccgccgggatagagcaaagacttgctaatgtttgagagtgaacgtttaaacttggtgagagcttgtgaacattttgccaaaaggaggaagaccacctatagaattaatcaaaggctgtttattcagacgttactatgctaagggagttggctactatcactttccttccaaatgagactagaagtcgtttgaaagaagtgttagttttatagagataaaggagagactcttaagactgtctttgattgatgagtgttcttttaagatgcgattattctattatggggggatttttgaaagtggagtcgggagaggctttctgattgtcatccaagtacatttggtattctttgatttgtttactatctactggtgcgtaacttggggtctttccagggttagcagcctcctaagagttttcctgtctgaattggaagactgtctcatccttggttctggggtccaaatctttcatcagcaattcctcagtgtctttactcgtattatctcattctgccttctctgcaggaaggtggtaggggagaagggacagaaggaagaaagagaaccatttatgtagcacctccagtgtctagcactggacttkgattagaaaaagtaatcaataaacatatgtggaatgaattgcattatagagttcctcgtaagatttctccctatttcatactccccgcttccaccctccaacctcccccaaataggaatctctttgagaacagggaatctagattctaccagagttctgcactgtgctttcctggaacaagcattaagttttcagccaaactggattggattcaaatctgacctccacccccttgaacacctgtgactaggaaaatacctggttcatagggtagtagtaagtagtcaatgatcagatgttgcatgtaaagaccttgcacatagtaaagacttcatagatgttctttttcttcctctagtgggtccataacaaatatttgcttgatatcaaatgtgaaacactagggccaatctgagatgtaggttaggagacccctgacactttgtaatttatcttgatagcactggagaattacagagatgtacaaatgccagacaaaagtattaagagtctaaagtggttgcctccaagaagaggatagagagtagtggtcaaggaaccattacattttgttttagagtttcaaatattcagattcctggtctccacctcatactcatgaaatcagaatcacttaggatggagactgggacctgcattttaaataatctttccaaagtgttctttagtttgagaactaaaaaagcaaacaaagcaaaccatagtggtgaactctgaagatgtttcctggtgaatccaaagacgagttactctgctatcccccatttggttcctaaatataggacaaaaagttgataaatcatagatggagatgatgactggtgctttcagagagccttgacacctggtaccagacccattttctacccgtggtctaaatcggctgcgacatgtagaagcattggcttaaggtgaatgaacagctattctacgcttttgctgtgtcaaaatggcaattgtgaactgcttgaacagtaactatggccataggcaatagcactattgaaagcattctgcactctgatatcagactgaagcacagaggtagacattgcaagtgttgactctgtgatttaaaagctccatgaccctggaccagttacttaacaatctcaattccttgatctgtggaaaggggattatgatagtacctattttgccaatgagatgcatcctcaaacacttgagatcccagtggctgttacctaccataccttcattatttgactaagaactctttttcgtgtgtttatttctttagtatttacatctgtgaacctcagttttcctattagtaaaatgaaggtcaagtatgacatcttatttgagctgtgagttgacagtgtaacacttctcataaactgcatgcatttgaaatatgaagttgtaaaactctacgattaagctttgtatttctagcaccttggctatactgtttcttattcagttaattgttgcaaaaagaaaaataaaaacatcagcaggcctatatgccttcgctttcatcttagcagtgcctgytaacagtgaaataatgtgctcattttcatattcgcactgattactctaggggcgcagatttaccagagagacatatcatgaaacccagcaaagggatactgcatctagcagttctggtggtgttttatcattaccttttcacttgagcataaaaactgtttgacaaatactaattgtaaccagcagagctgaatagaatattttaagaaacaaccctaattttcatgaattacatatttgagttcatactgctgcatgtcaagaatgaaaatcactattacaatgatgaaataaagggcatctgtggatttcatctggttaattttttaatggataacagatttctggaatttacaggagactaaactttttggtctttcattrtatgcataggtaatatcactgttgctatttgtgatagccattttaaccagtgattcagttgtattgtttgccagtggcacagaaagaatggtcattgtgctcaagttatttttccctcttcaataatgcgttaaaatgattaattttgatggtatttctcagcagctttatttaaatgacggtcctctgtatctgtgggttccacatctatgattcaaccaactgcagattgaaaatattctggggaaaaaataaaaaataacaataataaaaaatgatacaagtaaaaaatacagtgtagcaactattttcatagcatttacattgtatttggtattacaagtaatctaaaaatgacttaaagtatacaggaagatgtgcataggttatatggaaatattatgtcattttatatcagagatttgagcatccatgaattttattatccatgggaattcctggaatcagtcctccatggacagtgagggacgactatgtaaggtgcctagaagaaaagggatttatgacaaaaactgtctcctttgccaacactgaagtgtgctcaagagaaattctcactgcatcctggagagaattcacaggaagcaagtttagagcagtggtgacagstcaaagttaagataagaaaggaggaagagtaaggaacatcattaacttagggaaggcccagctggagacaaggtcagtggaagagactaaaaacagagaacaagatgaaatggtggaaacaarggtgatgacattcttttggcaggaagtttggagctggatgaagaagatggtaaaagctgaggaaagaacatttacacaaaggactgtggaggttcttgaaccgaaagagaaaagtagcattagattgactgtggaaaagaagttagaaacaaaacctaaattcttattgcaattggaacctgcggagttcagcaccttcaatattattaagatagcttcttttaaacagtaaagtaaaaattaaaggaacattcttttacaaatgtcctgcctcattataaagtgagcagccacagcagtggttctttttcttcttctcttttttattttttgagattgagtcttgctctgtcacccaggctggagtgcagtggcatgatcatagctcactgcagctttgaattcttgggctcatgcaatcctcccacctcagcttccagagtagctgggactatatatatgtgccaccacacccggctaattaaaaaatatatatttttatacagatgggctcactatgttgcccaggctggtcttaaactcctggactcaagctattctccctcctcagcctcccaaagctatgggattacaggcaagagccactgtgcccagccacaggccatggttcttagcttaggtgtgtaacagaattcctttgggccatcctctccagaagttctgattcagtaggtctgtcttggggcttgaggatctgcattcttataaataatgcccctactccactgtctttgttgtaggtggttcatgcttcatggttggagaaacaccaacatcagccgggcgcggtggctcaagcctgtaatcccagcactttgggaggccgtcactggcagatcacttgaggtcaggagttcaagacctgcctggccaacatggtgaaatcccgtctctactgaaaatacaaaaattagccaggcatggtggcaggcacctgtaatcccagctacttgggaggcaggggcaggagaatcacttgaatccaggaggcagaggttgcagtgcatcaaaggtagcactttggcatagctagagggaatatcagcagctatcccattcccacctttcacattttctcttccctttcttcccctacttctaccatcctcttcaaactttccccagcccctctaaaacctaatttactacatgccagcaagaagtatggactgaggctccaaaagatgcctctatgctcttccctctrtctgaaacacccttccctgttgttcaccagcatgagtttctctcatcctttgagtttcagtcacccccttcaggaagcttccctgaagcgggagctaggggtatctcagtggttattagaggtttgttactgcatttgctacttgtctgcttcatccttcaggattttaaaatctgcaatgacagggaccgtgttcttgcagtgttattattctgcccacagtacagtgcctggaagacaggaggtgcccaactgctattractggatgggtaaataaataaagatgaagctggtgcaaaaatctccctaataagaagatgcaaagattcatgagtgtctggaaatctgccagtagtccccagtgagaaaggaagtggaggcccatgaagggaaataacctgccctgtgtgatgcactacactagtggtttttatgtacagttcctcagagtccttggacaccatagaactccatctcactctctccttctccctgcttttattgaacacttaggtgctttctaaatgctttacagaaattatcttaatcctcactaccgacttattttgcagacgtacaaactgagtcttaaagcagagagtaagtggcctgatgtaaagaataggagaaggccaattccaaccaatctggaattgattctaggccagaattgtccaatagaacttcctgcaatgaggaaaatgttctatatctgtgctgtacattatcatgctatgtggctattgaacatttgaagtatggctggtgcaactgaagaaatcaatttttaatttcatttgattttatttaatttatacttaagtttgaatagccacacatggctagtggctatcatactggtcaacatgggctatctaattctgatgtacagtctctgcatcatcattccattttctaaagtgggtttctcccacagcagttgttaaaacaaggatttggatacaaagagattatttaagaggtgatcctagacagcaggagagggattgaggaggtgagatggagaaggtgaatactagtaaaagactacattgatatgctgtaggcacttgaggtttctgtttgtttgtttgtttgtttttttggaaaccttcgagagacttatggaaaacactgtataattgtttcattgaggagcacggaactgatcatgtttattcaccaactctcatgcctttttggttgaaggatgctcctaggggcattcacacctgctctgaactccttcttcatctccagcctgcctcccttatgggccatttcatgccactgtacctagataaagccttagggccaagagattcaggtgcttgaggctgggtctatccttctgagctgcaaataacttccagggtggatcaagggaatgtggggtcaggatagattatattgcctctcatttacaaccaaccatattagctcatattagtgttttatctggaataggaggagaagcatttgagactgttagaaaaaaggttctgctatttaaaaaaaaagttttgaaactgtagctctaaactacattcctacctgttttcctgaccacctcaattactaacttgtatcgtgttccatattatttctagcacagcatggattctctaacattcttgcagtctgggccctgcaaggtagctgtaaaaatgctgccctgggactttctcagtggagacataagaagactcaagcattccagaaagtgtttgtttggttggcttttattgatgtatataaaaagattagagacagcaagagaagaaaatcagagagaacctatacttggttaaaaaaaaaaaaaagattttacagcagaagtagatagaagtggtgcaaatgatgatttctcctcttctgatatcaagctttgttaagttcctggaaaagcaaacgtgattatggcaggagtaaattgactgaaagccaagtcaaagaggcagatcagcttctgaaggaggtctgctcacttcagcaaagaaagcagggcaaagaatcctaggcttttgasctagttaggcccccagttcctacaaccatgggctgaaataatgtggagaactcttgatattgtaggcaaaatgaatgttagcagagttccatcagagataatggctggccatgagctaaagagagtttagccaccacaaagaagaacctgcctgtagagatatctctaagctaaaaacctctgcaagtttcctttcgaaattctaccttaaaaatttgaaataacctcagatcaaagttaacgcaagagtttccagaagagtgaagttcataatgccacaaggaaaaaaactagaggatgactaaagtaaaatttcattttaaaatttttattcatctagctgaggttggaaagagtaaaatttttacatgaaaatattaagtatctagaaactcttataaaaagaaaaattaaaaagcacaatgatagacaaaaaggatgagaataaacaattcagaaaaaaaaatagaactgatccataaaaagaaaaaaatggccaacttcacttattgcattgaagaaacacaaaataaaatataatactgcctattaaagttgtacatttttaaataaattaattaaaatgcccaatgtgggtacaattgtggaggcagtgagcactcttctacttgttggtagaagtggaaattaaattgttacatccttctaaaataatttggcaatctattaatatattcagatcctagaatagtttaaagcctccagtccaataatttattatatctatatattgtctgttcatatattttctatttatatatatatctataatctgtatctacatatatatctagcctactgcctatctttgtaaataaagttttattggaactcagccatactcattagtgcatggtattgtctatggctgctttccacctgcaatggtagcattcagtagtcgccctggagaccatacaactaaaaacatgtaatatgcagccctttgcagaaaaagtttgctaacccctgcaccagaatataaactctttgacatgtaagctcaatgagtgcaaataatttgtctgctttgtttgctattgcattcccagtggctagaacagtgcctggcacacagtagatgctcaataaatattagtgaagtcatcagttgctcctattaaagtatattcatattgtttttacatttagtgggtttttggttttacaaataatgttgcagtgaacacagatctttgcttacttttgcaattatatcagacacaatattttaaaaaaaatagttaacaactttaacaacctggaaaaatactgttgatatatcaaatttttaaaatagactaaaattttatagatgactctaaattttgtttttaaaagtgtgtgtgcatgtgtgtgcgtgtttgtgttaactataaataatttgaaggctaggaggtgggtggggtgattttgatttcctttcctttcttttctttttgttttttgttttgttttttttttttttttttgaagtggagtctcgctctgttgcccaggcttgagtgcagtggcgcgatctcagctcactgcaacctctgcctcccaggttcaagccattctcttgcctcagcctcctgaatagctgggattacaagtgcacgccaccatgcccagctaatttttgtgtttttagtagagaccaggtttcaccatgttggtcaggcagttctcgagctcctgacatcgtgatccacctgccttgacctcccaaagtgctgggattacaggcatgagccaccacacccgacccatttcctttattttctagactttctacaatgaacacaaattgataggaaaaaaataaaatctatttttctaaaaaaattaaaagatccttttccttttgttacttccatgtcctttttttttttttaactgtaatactttctgttgctacaagtaaaatccaaattcttccacctaatgcttcattctatagagcctctggtttaaatatatgtttctgactgtctctgcaatggctctcctgcactgatggtttatttacccagactgtgatagtctttgtcctcagaaaaggccatatacattctagtttggcacaggtattcacagcttttgaactgtccagaatgccgccctttccaccaccttcctgagctcactgctgcagtgcttagctctttccagtagccttcctcagtccttctcacagtcaaatcctccgtctctaacctcctgcagcatctaaacccagttgccttcaggagacaaagcaaggaaacctaaatgaataaagtaagccaaacaagggaataaggagtcctgggagccttgataacatgtatgtgccctatctaaaggcagtcaaataaaataaaaacattttttttaagaagaagatgaaacaaaggcaaggatgttgataaaatttgccctgtagaccatgaccttatactgcctgatcttataacctacttgaaactttgctttaaagcctgtggaattcaggaatgcagagagagctaggggaaagtaagagttaactaaagttcatcwcagcactgttcacaatagcaaagacatggaattaacctaggtgtccatcagtggtggattggataaagaaaatgtggtacaggtacaccatggaatactatgcagccataaaaaagtatcatttcctttgcagcaacatgaatacagctggagaccattatcctaagcaaattaacacaggaaagccaaatagcacacgttctcacttgtaagttggagttaagtattgggtacacgtgtacataaagatggaaacaagagacactggggactactaaagggggagagaggaaaagggacaaggactgaaaaactgcctattgggtactatgcccactacctagttgatgggatccttcataccccaaacctcagcattacacaatataaccatggaacagacacccctgaatgcacatgcaccccctgaatctaagacaagttcaagttattaaaaaaaaaaaaaaaagatgaagatggggataggttgagaatgaggaaagaacaagaggttttgggattaaaaagaaaggtgaggctaaggctttagaatggagtaaggatgtctgtggtagaagatatacagtaatttttagaatgaaattctggtgttttattttttaagctacaataaaatatctctagtattaatatgggttaataaaaacagcccaatgaaaatattacttcatatttatttatttatttattttgagacagagtctcactctgttgcctaggctggagtgcagtgacatgaactctgctcactgcgacctccgcctcccaggttcaagtgattctcctgccaaagcctcccaagtagctggaattacaggtacttagcaccaagctcagctaatttttatacttttagcagatacagggtttcaccatgttggccaggctggtctcgaacgcctgaccacaagtgatccacccaccttggcctcccaaagtgctaggattacaggtgtgagccaccaagcccagcctcttgctttatcttctatacctgccccaaacttctacttgttgtaacaaaaacaacaaatggctaagctgtgttggatctgtgttatgtgcaggcactgtgctaagcagttttcctggaagtgtctacctcatttcgttctctgaatagctctaagaggtaagtgctattgcactgttacaaaattagaaggaaaacgtacagagaagcaaagtagtttaccttagatggcatggctaggaggtttcaggattgacattttaccttagactccagtctagagtagttccttttgtttctctgaggtgcagctctgaggtaaaagaaagggaagatttggtagcaagggtgtaaatgaggatttcattccctctgcactattgtccttttgggctggaccattctttgttgtggggggctgtcgtatgcataatgggatatttagcagcatccctggcctctactattatatgcagtagcaaatgccccctcctttacacttgtgacaatcaaaaatctttctagatactgtatctttctaaatgttgtaatgccaaatatcccctagaarcatgatatggttttggtgtgtccccacccaaatctcaccttgaattgtagctcccatatccccacttgttgtgggtagttactgaattataggggtgggtttttcccatgccattctcatgatagtgagtaagtctcacaagatctgatggctttataaagagcagttcccctgcacatactctcttgcctgctgccatgtaagatgtgccttttgccttctgccatgattgtgaggcctccccagccatgtggaactgtgagaccattcaacctctttttctttataaattacccagtcttgggtatttcttcatagcagtatgaaaagggactaatacatgggggtggggaggaagagtaaaatctcccctggttgagaaccactattataaatatttgttcttagagcagaaataccgtaacacttaatattgccaatctcacctttttgacctttaataatcctagatatatctcctccctccactaaaaaaccactaaaaacaacaaagattattgcatgaaatgttttattttcatatatctcatcttttagagtggattaattttttaaaattataacaagagggaggcaaaaagttttaactcatgaagcaatcattaaatgaattaaaatagtaattctcatgtcattagtttgattttagccaagccaatgaagcactattctaatattctgcacaaaatagcaaatttcaatttgaaaattctccaagccattaatggtcctgctatccatctgatttagtaagggttcagagcatttgtgagctaaactttctcaggaagtcatttttatactatcagcattagcctgtgccattaagatcagcttttccttgatacaatgagtttttatgttattgtctgtgtcttgtggaaaagtataatttttaatgaaagaaacctaagattctttcattaggctccaaattaggctccaaattcccccactgtgatttcatctcatcagtctgtgcaaggggagagtttggtattccaaagaaaatcaattcaaactactaaaaacaaytgaaaagtgtgaaaaatattttttaaatatttgagtatgactcaaaatacatgctttatttattggtcagcgtgaacaaccccagaaggaaaaagagtgctgttgttaaaggtatctggcatcatggacccaaccatcaccaggagtttctcacttcatctctggtgagtttctctgtttagcattcctttcaaagtaggttttttctcaaggtggggaacctaggagctccagtgtcacatccatacttcattatgaccaaagaggaaagatagccctagctcaagtctcaaaatatctaaaagaccctcatgaggtcagccggagtcccaggtgtattcctggaaatctcagtggccaaagaggtggctgccatgccgtttcaagtcagattcaggtacaagaggttttattaaggaaattttcttagtagaaaatggtaagggtatatgaaggcaggataaagaagagaaaattcctggtcaaagctgcaatttcagatgaagtgccagccttgggccacagagagcttagagcataaattacatgtcagaatttgtccccttccacagcaagggagctgggcaaaagcaacattgtgccagtcattggttacagcttgccttggtcagtgggatgtaaaccctggctctctatatgcatggcagccctgttagctccaaggtaatcctctgaagaaggttgcagatacaaactttgcagcaaaaggaagaagtagttgggggctgggcacacagcatttggtagaggggatctgaaagggctgcatggtgttccctgcacacacctattcctaagtgtccaaaatgttgggtctctatgattggcaaccccaataagcaccatgcttttgagccagggaggagagatttaccaaaagagggactatcctgttgctcttttgaagaagaaagaagtgatgggcagacaaaatctgtatagcttcagctgatttggacttaccaaagttgaccccaagcaagttgcattaaggtccgataaacacacacttagaaaaggacagttgcatttactgcgcacctaatactgttttgtcaacagctttattgtagtataatttgcatacaataatggcacacatttaatgtgcacagtgtgataaattttgacatatgtatacatccatgaagccggcaccacaatcaagataatgaacatctcgcttaccccagaagtttcctgtgccctgtcactcctccgtattcctccatcctcaggtaatcactcatatactttctatcactatagattattatgtattttctaaaatgttatataaatagaatcctagagtatatactctcctttgtctgttgtatttattttgagattaattcatgttggtttctgcatcagtcgttcattcctttttattgctgagtagcattctgttgtaaagacataccacaatttgtttgtctgttcacctgttgatggcctctaacacttttacatgtcatgttgcatttatctgtcatattcttttcacactactgtgaggtaagtcttattatgcccatttaagggaagatgcatttagacttcagagagagaaactaagttacctaattgctcagctaataagaaacagagcttagatctctgttttttaactcagtaaagcctatgttttttttcttacttcaccatctttctaagcacagatctgcacacaaagttagatactcattagttgatttttatctactctaattagcacaacttacatattcagaaaagcttctccaattttatatgcttactttcagctttgatgctgtatttataccacagttgggaaataacctattttcttctctgttttctcttcaaaataataaaccagaagaattcagtatccaaaatttggtcgtttttactctactatactgaacaattagtccattttactatcatgccaaacagctcacactttaacaaatcaacactaagtgtgctctattcagatgccttgaaatttcaaagtaaaatggcaaatgatactagatgaaaaacgttaagaatttcagcagattttgcagtgatgaaactttgtcttacctcttagaaaatgccattgcgctgactttagtgccttaaacttctaaattgcatttgacttacatgttttcacttgtgtgtgtacagtctccccaattcagttgtgaactctttgagatcatctagcaagccaactctctataaaatctgtatgtccgagttcaaagctctaactccactcaacccagatggtatacattcaaatcctgttggcctaacattttcaaatggaaagaatacaattagaaagattttacctgaattatagaagcctcataaagcagtgagagcctagaggctaaggagtcatggggaagttaaataaagtcttagtcatgaagatcctgttgaagctctgtctgtatcccctaagtgcttgcctctgtagtcagcttactgaaaaccctttaattctctccacctaaggtcatttctctgtctttggaagcaagcttggccagcatgcagggcaggctagaagtgcagaaaggttaatgctccaggaatcaatcctaaaccaataacagaaagttggtagataagtaccttagcacctttgcttctgggaaggggtaattctaaagctgttctactttgttttgagttcccccagtgagttgggttctgttacccacagcagtcasctgctcaataaatcaccctttattatcttccttctctgtctcatgtctcagtttttctccctctgtgtcttgggatcacttctcaaataaacttcttgcaccaaaatccctgtctcagaggctaatatgggggaaagccaaagacagacgttaaccaccatggcacgtctatagcgtattgggttaaatattttatatacattaatccattcaatccccataatgaagataagaggtggrtatttttattcttatttgatgaataaatgaagtctgaaaagttaagaaatttacccatgtttacactttatgtggcaaagtcaggtgccctgygcccccaagtgagtgaatcccaaccctatgttttgtatttttgtttttttggtttttttgagacagtcttgctctatcacccaggctggagtgcagtggtgtgatcttggctcactgcaacctctgcctcctgggtttaagagattctcatgcctcagcctcccaagtagctgggattaccggcacccaccaccacacccagctaatttttgtatttttagtagagacagggtttcaccatgttggccaggctggtctccaactcctgacctcaggtgatctgyccgccttggcctcccaaagtgctgggattacaggcgtgagcgaccatgcccagcctcaaccctatgttttacacactataaaaactctcaggctagctcccttggaattgtggagtacagaattaacccaacctcacctgttagcactggaaaatgtcaacatctttttcttatatttatgatagtgcccaggaaaggactgggtacattacagctcccagtaaaagctggttaaattgcaaggattttttctttatttgttgtgactcttgtgaaaccttgaccagcaatttagaatgaacattggctttgctagctgtgtttgcagaagtaatatcaaaatgatatcctattcatgtttctgcaagagtaatgtctaccattcattctggcctcactgatggtgtgctgataagattactataagtgaacattctcattctgtgcctctcattattgaggaaggaaactcaaggagttccaaatatattttatttttttaatatgataacatgcacacacaattttcctcattcttgaatatatgcaatttatctatcagagcaggtttcattttttatgcacttgcatttattcctttctcatccatgtgtcagagagaagggattgtaatcactgaaggagcatttgtataataaaagtgatatctgcaattccttcagagaagagcgtgaataaataatctgtacattcttaatgcattgctccaaatatgagtttcaatttgcacagaagtttcaataaattgttttgtgtccctaaagacctacagatgcctcatgggatacattgtaaaggattccatttagaaagaattttgcttgtgagtaatatattctctatacttttcttccctttgttaatgcctaatgacattgaataatacaatcacttttttcttttaataagtgatagatacaacatgaacttcagtctaaagtttctgacttgttcagaattcatcaacaacttttcattcaaggatttcaaagcacagcatacaaccaaaattgaggtcaaattgtgatgtggtttggctctgtgttctcacccaaatctcatgttgaattgggattttgagtgttggaggcagggcctggtgggaggtgactggaccatggaggtggttataatggcttcgcaccatcccccaagtgctatcttgtgatagagttctcacgtgatctggttgtttgaaagtgtgtagcatcttccccttctctatctctgtctctctctctctctctctctctcctgccatccgtaagaagacgtgcttgcttccccttcacctctgcaatgattgtaaatttccttaggcctccccagccatgcctcctgtacagcctgcgaaactgtgagccaattaaatctcttttcttcataaattacccagtctcaggtagttctttataacactgtgagaatggactaacacaaattgtaacttgaatttgtataataattaactttgcatttaataagtaatgcacactacgctaagttttatgtattttatctttacaatattcctatgatgtgggtgctatactcattttattgataagcaaactgaggctgagaaaggatgctttgcaggaggtcacacaattgttacagtgtttaaatattaatcacaagttttgtcattttatacctttttaatcagtactgtacagacattcccctgcaggttagcctaaatgtcaaataatttctctstaatagttggtacttgttctgaaggcattaaatagcttgtgatttacattatgttgctgaaggttttacataatactttgcttgaattattataaaaggaacggcagttaacattgttgttacatctcaatcaatgttaaccaattcaacttagacaataacatcaaattcttcatgtttttgttgctttggtggtttagaagggttctgaaactctttacatacatatgccaatgattcatttctggattcattgtgctggtagtatggatgaaacatgctgttttaaacataaattaattacaatgggcagaataaataaagattctacctcttaaatttatttatttattttattatgatgataatttttttgagactgagtcttgctctgttgcccaggctggagtgcaatggcatgatctcggcttactgcaacttccacctcccagattcaagtgattttctgccttagccttctgagtagctgggactacaggtgtgcatcactacacccagctaatttttttttgtatttttagtagagacagggttttgccatgttggccaggctggtctcgaactcctgayctcaggtaatccacctgtcgcggcctcccaaagtgatgggattataggtatgagccaacatgcccaacctacctcttaaatttaagtaatttttttagcttaaggatgttatgaagcttcaagtctgttatctaggaagcttataacactctaacattaatagagtatcatttttgtaattgtttataaaatttcatgtgaaaaatgggaaagaagggagccaaaatgttttaaaaaatctttttggacctctaacctgtgccaagcatattccaaggtgttaattacttccattgcattgtggtaacagcttgagaagtggagtgctgatagtccacatccattttatcaaggttatgcgaggtcaagaaatttgcccaagttgaagtcacttggaagtgtcacagtggggattttttttcctttaaaaaattaaaaaaatttttttctttatgatttttttatgcatgtgtatttttagtagagacagggttttgccatgttgcccaggctggtcttgaacttctgagctcaaacaatctgcctcagcctcccaaagtgctgggattacagttatgagctwccgcacctggtccggtgtgggaattttaatcatggacagtctaacttcacagtgcaggccttttctgtttcagcatatcccaaaacatggatgacacaaaccagtaactacaaagatgataattggtgctatgtgaaaattacgtttttatatgggccaaatgaatttggttaacaataggtggaacaaagttaaccgtatttctttactataggatttctcagagcccataatatgctaattcacaaactaaatctgagttatggcaggctcctaggattctaaccccctagcctacctgtcctatctgatcttccactgagtgagggtgggatttgtgaaactgatgggatagcactcctgtgagtaggcgatatgatgtagcaaaagtgaaggatcacaaatcagttgactttacattagtcaaaaaggagaatctcctgtgtgggcctgactaaataagagggactgggctcttcgcactgaccttgaagaacagacagctaagtgcgactgcctgtggagagagtacatctctctctgctgggggcctcagttcagcctctaccaggagctgaattctaccatatgagcttgaaggaggaccctgaattccaggaaagaacatagctaacaccatgatttcacccctgttagactctgagcagaggacccagccaagccaagcttggactcctgacctagataaaaaatggttgctttaagctgctaagtttgtggtgatatgttatgcagcatagaaaactcatatggggatataacattttgttttcaagaaatctttctttttttccccagagtatcttatgggactggtgttccatagaatcaactttgggaaatgctgtgtttttatggcattcttttctccttcagagaaagactgatggttagacacagcctctgctaccaggaatggttggagctcgtgattmagagaagggatgcatgtccctttggtgaacctggtttccatgtgggatgaaggttgaagttgatgagttagtgaggtgaggttgacttgatggttggtagtgaggtgaggtgaggttgagtgggatggtagtgaaggtttagttgatgagttagcaatgtttagtgagagtgatggttaattttatgtgtccacttgactgggctacgaggtgcccagatatttggtgaaatattatttcttggtgtatctgtgagggtatttctagatgakactgacatttgaattggtggactgagtaaagcagattgccctcattagtgtgggcaggcttcatcaaatctgttgagaaggcctaataaaataaaaggctgcagcagaaaaaattctccttctctgtctgttttcaaactggaacatcagtctcctgttgcttttggtcttgggtctccaacttgcctattgcagatctttgaattttcagtctccgtaatcatgcaagccaattccttatagtaaatctatatctatagttgtatctcttattggttctatttctctggagaacctagactaatacagctgggttcacagtgacagagagtggtaggcacctggagtcatgagtgggctactcagataggtcctcacattgtgatatttatcctggggaattatcacagccaaggcacttcccttctcatccttaccgattatgaaattcacgctatcaatgtcccagaattgatgaacgattccttccaaaaacactaaaagaaggaaatcaaagtgcccacaatttacaatgataaacacaagagttggatacaccatctttgagtgggtcttattgggccatcttccccttacaaaacatcacatttgtgatgttttagatatgggtggtaagaaagaagggcacatcctaaacaacatctaggtttctgacatgttaatagaatggttgattcacagtggccattcctgagaaaggatctcagttaagtggagaaagatcattagttaagtcatgctgaacttgagatgcttttgaaacatccaaaaaaaaaaggagctgttgagatctgcctgggcaacaaagtgagaccctgtgtctacaaaaaataaaaaagttagctgagcatgcatacctgtcatcctagctacactggaggctgaggcagaagggttgattgagcctagcagtttgaggatgcagtaagctgtgttcacaccacttcacttcagcctgtgtgacagaacaagaccctgtctcagaacaacaacaacaaccaaaaaaaaaaaactgttaaaattaaatatgtattaaatatgtggtctctcccaggctgagctatatatatatatatwatatatacatacatacatacatacatwtatatrtgtgtgtgtgtgtgtgtgtgtgtgtgtgtgtgcacgctccatctgcataaagataataattgaacctatgatcatgaatgagattatccaaggagggggatcaaaagagaggccctaagattcctgaggaattgctatggctaatgggctggtaaaggaggataagcctgaaaagaagacaagaaccttttgtaaaagcataagaagatagagtttgagttcctacttgaaggataattaagcttctgactatagatatcagtaggaaggacattcagggatagagggaagataatgaactaaatcattcagggcaaagtgagcagggcagatgaaggcaagggcaagttacatagtttgattgttgaggctgagaaagagagaactaaaaaaggagataattgccttatgacaagcagtctgaaatgctattgtacagatttgtattcatccagcagacttgtggttttgaaactcaggaggccaggtgttagtgctctgcacctcctgcccacacatcactgtggcacctttgctgctatcttttcatgtgtggctaacatagtattttgagacatgaagttgttatctatagagtcacagatatgaatctatattatgtttcctctgtgtatttccttcagctcaaataagaatatgctgtatacagtcatggcctgttttgtttttccatagtgaaggccacaggttggaaactcaaattacctagaargatgagacagggaacgtaaacaggtgaagtggactgggtgcaagagaaccaggagatgatgaggtctgtagtaaactgaagagccacttttcttctttaaaggattcaaatctaacttaaacaacaaaaccaaacactgtgcaagccacacaatgcctgtctgtgcgctgtagtcagccccagggccacctatttatgaccccttgatgaaattttggaggaattgggtgaagaagataatagaaaagtaagaagactaaaacttacaggtatrcataccaaaatgtgctaaagaagtaaaggggagcatatgatttcctctccccgtcccccaagattagaggtatccctccacattgtggaggggttggagagaccaaagggaagtttagaagtgcctgaatcctggggctgcctgggaggtagtaaagccttaggacaatggctgtccatgaacagacacagcatggaagcagcagagaccctgtgcactggaagggccaggtgggcaggaagagtgtgggggtaatcgatgctaattccttggtcccacacatcactgagaaaccaggaaagcctgtctattgttgagactttcggctcagctgaggatcccagcaccatggttcaaccctgggaatgtgggagaggtcacgaattagactgagattttcttccctcctaaaaaaaaaaaaaaaaaaaaaaaagaggaacaatcagaaattaagctgttattttaaaaatacaaatacagatatatgacaaattttaccaacctgggtctaaggcccaagattcrtgtctcttatgtacattctggagttctacagaaaaattatctggaaataaactgaattcactgctgtgagtgaccaattacccctatttgccacggctctctcagtctttcaaacctaaaatgctaaagctggggaagttccaagcaaagcaagacaaactgatttctctatcactgccaatgaagcactagcaaattccttccctgaacaagggtaggtttttgaagaggagagtgttatgatcagagctgtgttttgagatcaatctacttgccatgtgtataatgagtgggaagagaaaagaggccctgagaccagttcaagttgggcagtggctctgatgagagagagagggggtctggattaggaaagagggtgtcagaacatagagtagaggcaagattcagatgatgctgtagtgataagtggttatgtcaccaaactgggggatgtggagtcaggttttcgtaactaaataaaaccttagccatactggctgatttttaggcagtatctccatcagcctatgccagtagttctcaaccaaggagagatatttggcaatgactagatgttgttggttatctcaactggtgaatgctactggtatctcataggtagaggccagagatgtgtataaacattgtacaacacacaggacagcccccacaagcaagaattatccatccctaagcgtcaaccatgctgaaattgagaaacgctaagctatgtgaacctgtatgagaaacacattactattattatatagagcatatattctaggtctatgtaatgatgtatgctcttacagaaaatatttgttgcattagacaatgaactttttcaagtcagatatttttgtctctgattttccaaaacctagtacataatagatgctgaaaaattgttcagtgactgaagaacaatagccatcacttttttgagctgttaccgtgtgtcaggaacttctttataattgcatgcagtgttcataacaacccttagtgttaggkttatgatcccctcattttatgaataaaaatctgacgatcagagaggtaagtcacttactattaggttgatgcaaaagtaattgcggtttttgccattacttttgcaccaaccttgtagtaacaaaaggagccagtactgaaacccttgcatatctgactctgatgtttattttgctaaccacaacactgaaccaactctgttttaacctgggtccaaattgtattggccatattcaaatttccaattacccgaatgctctaataaggcctttataagcttcataaactatcctctcctctttatttttttgtttgtttattgccactctctaaacttgctattgccatatgcacattgagtttataaatgtaccacattagtcaggaacattctttttttatagcagaaacatttctagatgtagtcctgggatttatgtgttaatattaccagttggatagtatatttgatattattttagtagataagaaatccttgatgataacagygagcaaaaattaccactcctcttcccgttaaaaaaaaaatctcattctattattttggggtgaaatgtaacccagtgcattttcattttattcactgcttatattgttctctccgtaaatttattcaggaaagaaaaagaaagttaactgagatggggaaaattcaacagcaatgtacggtcagctctaaagaatgtatattgtcgtttaccactgttaggctgtctgatggttgattgctttctgaaagctctaaaaacaggagatcaatatgctgcaaaagtctgttttagcattgcaggaatttttaacctcactatactgctatcggtacgtggctagaatagactaatcctgcaaatagttcatagaaacccctccacattttttaccatctggccccaacctaacttttccatctcatcttctgtctccatctacactcctgtctcacaagatcaaatatcattgactgaatgtgccctaaatatccacctacctggatgttcaggtcttttggtctaaagcgttctactctcctaggtgaagaccagttagttcttcgaagccaaattcaaataccacaccaaatatgaggcctttcctcacctggttctctctaaccagcaatcgttcactcactcgttcaacacatttttattgagccctatgtcaggtactcttgagaaagtggcaaataaaacagatatggttgcaaccctccttgagcttatggccaacagcaacccagaaacattaattactgactttcctggattcccacactgttgctttttgtctctatttatgttctatcatatctttattattttttatcatgggcctacccctgagcatcataaaccattctgtgtcttattaatctttgcattttctcagtcccatccaaacctgtcacatagtagacactcagtagacttctgtgcagtaggattagattttctatgcgatacctgaaatagtacaataagtcaattacataattctatggttccactttaactaatttatttatttttcatttttttgagacatggtcttgctctgtcactgaggctgcagtgcagtggcatcaacctggctcactgcagccttgacctcctggactcaagcaatcctctcacctcggcctccaaagtagctgggaccacaggtgtgtgccaccacacctggctaatttttaaaattttgtagagaagaggttatgttaccatatgttaccaggctggtcttaaactcctaggctcaagtgatcctcccacctcagtctccaaaagcactgggattataggtaggagccaccatgcctggccaacttttatttttctaatactggtctctcttttctctttgactgttgccctggatttaagcagaaaaataagcaaatagttttgtctattcaaggtcccttgtttttttctgatttaaaatgccctaaaatttaaacttgatttattctaatctgtgctactcaatacacgtggccactgatcacctgaaatgtgattagtctgaattgatctttgctgtaaatgaaatccaatggaatatgcactggattttaaagacgtaaaatatctgattagtacttttgtattgattatatattaaaattatagaattttgattatattgggttaaataaactatagtattaaaatttttacctgtttaattttgcattctcaaatgtggttaccagaaggtttttaattgtatgcatggctttcatgatgtttctattggacagagctgctctagatgcttgtccttccccttctctggctcttcttccccgagcagttgctataagggggatcctatctcattctggtatttggggtgacagtccttaatgctggctttgcctgtagctagcttgttgcactttggagtccaaaggtcatatctgctaggcacataggaagacaaaagggtctagattcttggcctttttttttttttttttttttttgtctcccttaagactatacctgttagcagggctttccactttccttcctggaaatatctggttgtgtatcacttctgtctccatctctgcagcaattggtctcagcttcttagcccaatcttcatggcagaagagctgtaaatggggaaagcaacttcctcccaagaagcaaaatgcagtttgatatttcaaactgtcatttccttcatatatgttgattgcttgagtgaaaaactcaaaacattgagccatagcttgagttcatcacatgggaaataaaacttagtttctgtcaaagtctcactcactttcaaggccagaggagttttcaaagaggatgctgcaataagcctcacaagaacataggctttcttgtaaaccactcaatgggtaaatgttagttttgcagacccagagtagtcccttagtaaacccagccatttataatttccccaggatttaaaatctcaagctgtgagaattctcagttttcacttgtgacaggacagaatggaaagattccctctatgactactggttctatatatttcatgccactctgggctccagtttacattctaatttaacaattcagtgtgcaaaatttccttcttttaataccctacctatcactaggttgtagcttcaaataggccatcattatcaaagcttcttggtgaatccctttgaaaatattgttaagcagtcgccattctattttataaaatgtcaaatgattgtccatggatgcttactctgcccttgcaatgactaatctgtataatctgtagtcctatcaatgagctgtttttctcctcccgggccctgttgttgttcatcctatttccctccctggcaaatgtgacagttgtagctgttgttatttttctcaaatgagtttaaattgtgaattacatcagttcgtcacagccaaagcaaacctctttttaattgcagatctcaaatgtcccccctctaaattaaaataaaatgcacaaaatgctgccaactgtttttccgactcttccaaaatggagtatatccaaaatgctactgatggattgagccacattaagacatataaacatttaaaatcacttacaacttttttgctgttaggggaaaatgttcacattttagttgtgggggttgcctgtgaggatgaatgtgagtctgttgattgccatttgtgtccctttgaagtaaaaaagagttttgccaattttcaataattcaccatggagatttctgtgggtttgtagtcagatataagtggctgcattgcctttgagaaaggacattgaggatgtccattttaatagctgtgtaaccttgggcttgtcctttaacttctgtgaacttcatcatcatcattcatagactttgaatggcgatatatgccttgcagaatttggggaataattataaataatgaatgtaaagtacttgacttgaataggtgctcaacaatgaagctgttatcaagatccacagagtgacagcatccaaatgtcacacgataagcagacccctgagccttttgggtttcatgaaccaaaataatttcaaatatttttgtttttaaattaaatttagtttttaatatttgtatggattcagagggtacccgagcagttttgttatgtgggtatatttgttcagtggcaaagtctgggctcttagtgtacccatcacccaagcagtgaacattgtacccaatttcaatttttttttaatggaactgatataaagttgacaaaatttacttttattttcttaagtgaaggcaacaaagaagcaaagccaactaaattctcatcattcttgcaaaagaaagaaatttagcaacaacaacaaaaagggaaggacaaaatctgagaaaataatataaccctttaaattaaataaatgtagattcatgacaaaagttttaaatttttcatttcagcatgaacgaaaaaaaatcatccatattgttgagctgctgaatacccaggaaaggctggaacccatttctttgttcatgtgtttgtccaaatcctgtgtttctctccattgactcttgttttctgaatgaccaacatattagagccatatcttataagggaaatgggatgatggtgagcttctttttcccatggaggctaagtttaaattattttctttcagacgcaccctgccaggctctgttgctttctgatctattttcagtggctcttcatctgacctgaaaacatgcatgggtgcttgttcactgatgttcccatctgtacagatctgctcatagtctcagatttaacaagccttattttatcactttcattttcacttcctatttgcagaatatcacaagtgaactccctgaagattctataatctttggttttgtttactatttctttagaaatgatggtggccccagatatttgtttctcctctatggcttgaaatgatccatttcttaatttttaaggatgtaaatccttcaaagttggacatttggttcaacatatgtatcaagagccaaagaatgcattctgtaaccatatgtgattgtgttccataagaaaggaagactgaggaagaatgtcatattgttatagaattagaatttggaatttaaagttagacttataaacaatagaccaagaccttccgctttagactggaaaattgtctaaggaggaaaaagacctgccaacagtcacgtagatattagaccagggatagatgatgacgtgatttggctgtgtccctacccaaactcatcttgatttgtagtacccataatccccgtatgtcataggaggggccagatggagataattgcatcatgggggctgttttccccatcctgttcttgtgatagtgagttagttagcgagttagttctcacgagatctgatggttttataaggggcttttccccttttgcttggcacttcttcttgctgctgccacgtgaagaaggacgtgtttgcttccccttgattgtaacatatagtaagtttcctgaggcttccccaatcatgctgaactgtgagccaattaaacctctttcctttataaattacccagtctgggctatgtctttattactatgcagcatgagaatagactaatacagatgactatagaactatattgtgaaggatattatattactgattgagctgttacagaatgtttcctattctatcattacttaactagtaatgtgcttagggttttgggttatgacttatctatgatgtatgtgtgaytgtcatgaaatttaaagacatgaaatgcttgtaaactgaaataataattataggacacagtcaagaagagaaatagccacagaggcataaatattccatttgtaccctgaacccaatttctggttagattttaagcatattcactccatggggagatagtacccagaaatggctgcttcagtgccaaaaatactagagtttgaaccctggctcaaaaaattattttttgtatgaacttcaacgattgcttaacctctttaagttttagtttctaatttctaaaatagcaatgccaacctcagaatttttttttacagaagctagtattgtgataataaacaagtagaatgtattcattcattgaagtaagattatatcttgaaggttactgctctgaataatgttttcattaacaagatattaacagagcttttgaaggtcaaagttaggtgatcatatatgacaaaattacagggaaaattacgttaaaatttgaacaaaatgaaatatgtggtgaagccgtatagcatggttcatggcatcatgtataatgatatatggtaataatggtatatgacarggatcaggaatctacaacctaagggcccactaccagtttgtgtaaataaagttttattggaacactgctatgcccatttatttacatattgtctataaatatgctgcttttgtgctacaacactagagttgaatagttgtgacagagattatatggcccacaaagtctaaagtacttacaatctggacttttgcagaaaatgtttgacaatttctggtatataatgatgctgatactatgggttctttttctctctcactgagaaagcagcacagcaccaagcatcctttatatttccttagcattgactgcagtgccttgctctgcattctgcacatgttaagcaatctacacattctatggtgtgctttgctgtcaatttcctataactttaataaaaataaattattacataggatagtgctatggtttgaatatttgtctcctccaaaattcatgttgaaatttaatccccaatgcggtatcattgagaagtaaggactttaagaagggattgggtcatgaaggtgttgccctcatgaatggattaatgtattcrtgaattcatagattcatgcgttaatggattaatgaattattaagtgagtgggagtggtggctttataagatgaggaagagagatctgaggtagcacactcagctccctcaccaygtgatgccctacattgccttgggactctgcagagagtcccagctagcaagaaggcactcatcagatgccgtcccttgactccagacttctcagcctccatatctgtaagaaataaattcctttctttataaattacctaggtttaggtattctgttataagcaacaaaacaatgggtaagacagatagttaaggtggacaaagtatcttccagcatgggtgttgtgaagagctatttccattcctaaaatctggttcacgaaacacttatcctagcacagaccttttgggtttagttcagtgattctcaaacttgaacatacaacagaatttcctgctggtctggaaaaaacacatagttgggtccatccctagatatatgattcaatagaggcagtgtagggcctgagaatttgcatttgtagcaatttcccagtgatgctgatgctggtggttcatgaatcacctttggggacttccacatctggactgcgcagattgatagaatcgtaacctccacaaggggctagacatatgtaatttatgcatttaagtatatccagcttctatcacagggcctggcccatgtttacccagcactcaatacatatctgtcaagtggatgaataaaaagccactgcctgcttggctgccaacctggtaggtgagagacttggtttgaaagctctgcctttggttgtgccaatgactgggaaaaaatatctagaaacttaagaaaatctacatggaactccttgtggtatgctctgaaatacagactatagaggaaatattttagtggctctacaggatacatggtctctgttgcacctactgaattctgctaccatagcaagagagccaccatagaggatatgtaatgaatgggtatggttgtgctcaaagcaggcattgagccagattgtttgctgacttctctgttaaaccatgaattttaaatgattgcatagtatagatggtacatacatggacacatgtaccatcattgccctttaataaattttattgcattataatatacatatagagaattgtatttattgtctgttgcagtttgatgaattttgtcaactggatatatccgtgacagtacccagggtgtaattgccttttggtagatcggaattgtttctaatttgggacttttactaatgaagctattatgagcatagtacctgatatactttattttattactayatctgcacattggttgtattagttttctgttccttctataataaattaccatgtacttggtggcttcaataaatacaaatktattatcttacagttttgcaagtctgaaacctgggttaaagccaagatgttggcagggctgtggtcttttctggaggctgtcagggagaatctgtttccatgccttttccagcttctagaggacaccaacattccatggcttatggctctttttttccaacttcaaagccaataaccttgcttctctctgatcatgcttccatagtcacatctctctgaaccacaggaaaaattctttgattttaaggactcatgagattgaattggacctattggagaatccaagattttctaccctcgtcaagattcttaatataatcacacttgccttttgtctcataatgtatttacaggttctgaggactaaggtgtgaatatttgatgggcggggttggatattagtctgcctagcatgttggttatatgaattaatcaacaaagactactctagtttgtaggaaagctgagttccaagatttttgccaaatttgctttttcaaatttttggaacaataaaaaaatatgcagtagcataatcagttagctaacatagatgatctgaataatagataccctggtaatgaaaatatatattaaggtaccatttactctttcagtgtaatgaaacaaaacccagcctactcaggtagagcataagctgtatgctatgtagaactctaacagaagacattctttagattgctatctatctgttgaccaacacactttctgacaataactcctttatgtcctctcctttcacttgacaatctcttttgcactctttgccttgtcatcacacatcatttttcatgtgatcgtttgttggagactcatatacagatgctctgtctggtctctaatggggcaaaaacacacaggacagaaacacacagcctgggtgtattttctactctgagatcacaagcctgaacattgtcatctttttgaacatcttcccaagggatagtgcaaagggaaaaagggcagagtttctcaagtgtaagaactaatttcaaaaactgtgcaagggtctttagagagctgtcggttagagacccactccccaaccaagatcactctaaatggaaagacaatgaatggaagtgcattcagagaatgcagcctgaccttctggggtactaaggggccttgtaggagggatggctctagaaggtttagctgttcagtctaagacaaagaaaacccaaagtcggttagaggaaggggatagaagagctgtctttaaacatctaatgaagtataacatgaaaaggggtttatgctggttttggagaaagctaaagtagcaattttcaaacttcagttgttcatttgcatcgcttgggaagattctgaatgcagattcctagtctccgcttactgaaggttctgaaagggggtgggacataaagccaaattttgaacaaagtgccacagttgatactgatagaggtatttcaaagatgttatatatatatattcatcagatatttattgagcattttcaatatgacaggcactgttacaagagtgaggatatacaactgaataaaacatactagcttcctgtcctcaaggggcttatattctagagggggaaggtagacaatgaacaaatccattaagaaaatgtatagtatgtcagacagcgataagtgaaaagaaaaaaaaaaaagcaggaaaaggagctaggaagtactggggagaggggtgaagctgatttttaaataagtgaacttaaagtaatttttttttttgagacagtctcactttgtcatccaggctggagtgccatgatgtgatctcagatcattgcagcattgacctcctgggcccaagtgatcctcccacctcagccccccaagtagctgggaacaggcatgcgccacgatgtctggctaatctttatagtttttatagagatggggtctcattttgttgcccaggctggtcttgaacctaagctcaagcactctgcctgtctcaacttcccaaagtgccaggattacagacgggagccaccacacccagccaatttttttttttttttttttgagacaaaatcttattttgtcactctggctggagtacagcagcatgatcatagctcattgtagcttcaaactcctgggctcaagggattcccctgtctcagactcctgaggaactgagagtacaggcacacagcaccatgctgagctagtttttaattttttgtagaaatgaggtctcactatgttgcccaggctggtcttgaactcctgggctcaagcaatattctcacctcagcctcccaaaacactgggattatagtcataagccactgcatccagccagctaatttaaattaaggaactgaatgaaggaagggagagaataagatgtgtggtttctggaggaagagtgtcctatgcagagggatcagcaagcgcaaaataatttcaggagatgtgtgcttaaggagtggtaagatgccagtgtgacctcgcaaactgagcagggaggagttagctaggactatctgtgaggtgagatactctgtttattcaacagggacatgagggagggcagactcctttagaaaagcaattgatatatttattctaagaagaaagaacttcgagctctcttgggaagtttgcattcaagtgcattggtatgcctgttgtagggagaattcaaatatctggttggtggttgtttggtggttgaaccaagccactggtttgcaaacctggctgtgcctcataatcacctggggaggcagaggtgcacatttgctctaacagcatttttttttttttgtctttggctaattatctctccatgatttgaagtgttgatggtactgataattgaaatacctctctttccacggccaagaaacagagatataacccaagtcaagttagtcacattttttctattggaatttaatcaatttaatcttgactagagtgacacatgcatggataacagtaggggccaattcttttttactatgacttgtggagaagccatcttttaagttttgtttcccagactcccataactctcagttcttattctttccaaggtctgaattttaagcattttctttcattctgagagccacactataaacttccaaaatatttattttccccttaaataggcgagagttgttttttactgttctcacaacaacaaaaagacaggtctgatacagagattcacaaaaatacatatttccaggtatcactctgattccattgaataagatatttggggacaacattctaggatttagtattttgaaaggctttttaggtaatgctgattcagttctggtcctgcaaaatacaggctgaaaatcctggacttgatgcttcagacatatccctgccatgagctgcttgctgtgccttctggctgatttggataaaggcgctccaattctgaggctgattgtatttctctccttccctctagtagtcattctcctcccaaccgggttcattaactagtgaaaactgaagccaagtgaacaaattgtctggacctctatgttaagggccatgtgtagataagagtcaaaggaaggaatgtttgcaggaatccccactctgccggggtctggctttgggaggttgggtaacaatttcctgtaacttcacgtacttgtggagagcacactttccaattgtgtttcaggaaaacctatgttttctaagaaaggtacaagggggctattgtggtatatatgtatatgcttatttacttatttattttcagtttgttctatgccttctgcctcccaatgtgagtcccacaagggcagtgtcttagtctgttttcttttgctttaacagaataccacagactgggtaaattataaacaatggaggtttaatttggttcgaggttcttgaggctaggaagtccaaaagcatggtcctggcatctggtaagagtcatcccatggtggaaggtggagtgagcacacaagacagagagaggcaccaggggctgaacttactttaagaggtggggcccaatctcttattaagccccacctcttaacattgttgcattggagattaggttcccaacatgtgaattttggggagtcacattcaaaccatagcaggcagggaccttttcaattttgtttccctctgtatgctcagattctagaatagtttctagctcttaggaagctttcattaagtagttttagagtgaattaatttttaaaacatcagacctttacagaggttttaccaatggttctgttattaaatattattttgaaagcctctccactatagcagtattgttcaaacccagtgctacagacaagctacatcagaattacccaaggaacttaagatgtagtttcctgagatgttcctgaaggggttgtttcagtgagcctggagattcatatggtatgtttatgattattactattatgattgatgttattactgtagtgatggctgttttgaatttgcaaggtttaaatgcacttgactagatgattgccaaagtctctccctgcactgacatcctaacaggatggttctggtgagaaaaataagctcggacttcacctaagtggccctgaaattccttcctttcaaaatttggctctcttcacaaggagttgctatattgcctcagaggattttgcttccttgctttagggatggggaaaagaaatcccctgaaataatttcagggctttgggattaaaaaaaaaaaaaaaaggcaagcagaagggggcaacttcatattcctcttgggactctgggatttctccaagatagtaggagttcttgtttattaaaatgtcttaggtatgcttctcttttgtggcaggcactatcgattaggcagcaaagaaggtagacagattttctgctccacagagcttacagtcttgtggaggagacggatgttagataaacaatggcataaatagggatttaaataaccatcaagaccaattccttatttgggaatatagcagttgaaaaggtggaattaagtatttattcttagtggttcttatatgaactatattttaaaataaccaaaaagcccaaggtgatcaaggaaagtttagttttgtgtgtgaaaaaattcttaccaagaaaggagaaaggagtgatagaatccacaaatcactattttatttcccttaaataaataatgaatgcaggctacactcatcaatgaatggagccattaaaaggaaagtttgtggggaaattggcaatgaaggagttaggctattacattcctactgttacctagcatttattgtctcagtattctggaggccagaagtccaatatctggcagcactgtgctccctccagggattttaggggaaaattcgtttcttgcctcttctagattcttggttgctgccctagtgtttcttggcttgtggctacatcaccgcagtctctgtcttcatcttcataagacctctgtgtttctctttcaaactctctctgcctctgtcctgtgagaatacatatgattgcacatacaatccaccaagatatctagggtaaattcctcttcttaagatgctcaagtgaatcacatcttttgccatgtaaggtaatattcatatctgaggattgggatgtggacatatctttctgaggggcgccattcactccaccacatgtgtcttccagtgggatgcactgtgaagtacatagcctcatttgcaatctttccttgacagaaaagcttttctgtgtttaaccagaccrttggagcttataatcatttatagaaaatattggagatagagaaataaatgaaataatccaggcttagtggctagctcctgtaatcctagggctctaggaggccaaagcaggaggatcacttgaggccagcctgggcaaactagaaagacgcaatctctaaaaaatttaaatttaaatttaaaaaagagcaagagaaagtraaatgactttctaatcaggtaaacacaaaatatggaatgttccataggataattgactttttttttgtgctaatcaatggcatggaacaaggtgaaagtgggctgttctagattacaagatttaaagacacagcaaccaagttttcttgtggaccctgtatgagtacttattagaccaaactagctctaaaaagacatctttgaaatgatagagtaatttgatttagaactgggtgtgagttggtacttaggaattggaatgaatttgattagcagtgacaataacattgtagttgtgtcaagtacttcttgtgtcctgtgtcacatcctctcagtccaccttttcaccccagctgttgcggctacccctagtgttgcccaggtaaagcctgatagcacctcccctaaacttcaccacatgcctttctttctcctctgggtgcctctgttcccctatgggacacctgtggtaactgttccagctattctgtctctttctgaagcattccattgccaatctgggagtgtaagagttaatgctccgtggggtgattcctgaccagtgggtaggagaatcagtggataaatacttcccattgtggtcactcaataaatgatctaaattgcattctacagctcctctgagagtcctcagcagaacccagccccatgtgcccacggaattagttctctgagaatgcataatgcatcatccttgggtaggctttccctccttccctgtttcagtcttctcagccccacactccttgggatcacttcccaaaataacaacttacatacaagcccctgtttccagctctacttttagggggacccaggctgagatagtgttttttttaaaaaaaaaactctcaggctgnnnnnnnnnnnnnnnnnnnnnnnnnnnnnnnnnnnnnnnnnnnnnnnnnnnnnnnnnnnnnnnnnnnnnnnnnnnnnnnnnnnnnnnnnnnnnnnnnnnnnnnnnnnnnnnnnnnnnnnnnnnnnnnnnnnnnnnnnnnnnnnnnnnnnnnnnnnnnnnnnnnnnnnnnnnnnnnnnnnnnnnnnnnnnnnnnnnnnnnnnnnnnnnnnnnnnnnnnnnnnnnnnnnnnnnnnnnnnnnnnnnnnnnnnnnnnnnnnnnnnnnnnnnnnnnnnnnnnnnnnnnnnnnnnnnnnnnnnnnnnnnnnnnnngctgatttttttttttttttgagatggagtctcactcttgttgcccaggctggagtgcaatggtgcgacgttggctcaccacaacctccaccttccgggttcaagtgattatcctgcctcagcctcctgagtagctgggattacagatatgcgccaccatgcctggctaatttttgtatgtttagtagagacagggtttctccatgttggtcaggctggtctcgaactcctaacctcaggtgatctgcctgcctcggcctctcaaagtgcttggattacaggcgtgagccaccgcgactggtcagctgattatttttaagacatgcatattgaagtaattagacatgaaatggcatgatgcctgggttttgctttaagtatttcactaatatcaaagaagaaagagaagaaagagctagatgaaacaaatgtaaatttatgacgactgttgaatctgggtgttgagtacatgggagaatgttattgattattttataatttgctataacaaaacatttaaaaggttaaaagtattacaaggtctgtgaaatagaggaacagactactctgaaagtacatgctagaggacctagtctaggtgggagatcgaaaaagacttgtctgatgaaatggcttttaagctgtggctgaaaggatgaaatggatttttcagaccctttctcctaaggtacttaaggtaccttcgtgaatccggccatagttttagaattacttctgcactctcttgcttagaacataggatcctaagcctgccacccagggccttccagggctggctctctttactgcttttaaatggctcatttcccctgtattgagtatctgctctgggtggcaaatcattttgtgtgaaatatattcattcacctgtagacaccttaccatatctccaagtgactctttgaaatctgactatttcttttatttgttgtgaatgatagagaggaaataggagggctattttagggtggtccaaagttgaatgaactgcctggtaaatgtgactgaataactagcttccttgctatttgcgacatcagaatgcttagatctatttgatgccagcggactcaagccaggtcctctgtgctgtcatttttgtgctgtaaatgaagctgtggggagaaacatttcccctattagagcacattcatcctctatgcccaacagacgaaagaggatttcatagctgtatagctgactgggcgaggaaaatgcattttgcctataattcagtaaacaaccagtcaagtcagtcttttaaatttgatttgctttgtaatgccttatttacagcagttttctccactggtattgacatttaattcccaatgcttattgatacttacctttactatcatgcagtattaccttgcatgtttaacttgctttgtgtaccacaaagggctttcataaccatatctcatttagccctcatagcaaccttgtgatgttttttctttctttccttccctttcttttcctctactttttttctcccttcctcccatccatcttccttgcctcccactcgttcctcactgccttgccttctctccttttccatttccttttctttctttcctttcattccatcattcattattctttctgtccctgtctccttcctttgccccctcccttcctacctttcttaattgtagcaaatattttttaaagtttcgtttgcaagtttgatagcttgagttcaaatcctggttgtgtcattccctatctgtatgaccttaggtaagttacttgagctttaagcttgaatttgcccattcataaaatgagcatcataataatgcactttcacaatgcagtgagtgcttgtttgtttactgggttcagtctctggcagatggaaagcaatcaaaactgttttctattattgttattcccattacttattacactgttcagatacagcaatgactgtgaccaatgtaattaacaagcccatggagtttttaataggcctgtcaagaaaactgaggcatgcagctagtaagtggcagaaccaaggtttcaatttggaccttgttttcaaggtaagagccttcttcgctactctgcttaatgctttagacaaaaaattatcaataactcagagttctttttttctgtttttagaaagtagtctcaggatttgttataattctatgttgttattatacctatatatatgtgtatctaaaaagaattccctaattaccggatatgcagaacttgttactacacagttcaaattcttgcccttcaggagtttgatacctaagaaagaataattgagtcagttatatttttgtaattgaatataatttaaacctgtcttagctatctgcctattgtctgaaaaaaaatttgattcaaaataatgtttttccaagttttgcttatttaatataaggctatattggaaaaaatccataatttcacatgatggctacttgcctgtgacagatgactgcctcgtgccttcaataggaaaagtggatgagactatttagaattagagaatatcctgatgatttcataaattatggcaaccacgtagaatgattttaacctaaacctcttgttcagtaacagtgcttccactggcagcgtctcatcataacctgtgggttgtagggtgtgtgtcccattgccatgttggcactgtggtcgcactgtacaaatgaatatttatacatgccaatcactatatgcttaaaatttttatgcactcaccaactataacatagcagttaagaatgggtaacttataactgccaaaacctctgctttgccctttgctagttacatgaattttctgagcctcagtttctcatctgtaaaattaacaatgggtaatgacttcatggtgttattgcaaagaattaataagaagtgcacataaaacattttgtatagagtttggtatatacggaaaagttattattattcatctatttattcattttttgaatacctcatatatactggacgaaggccaaatgctggagatgcaaaggtgaatgataccctgtttagtttacgttcagagttcacaaaagatggtataaaaaatattttcagatagcaagtcaagattacggaaaaaagtgatcatcgctcaaagtttcccggttcacacagttgcagcaatatatgtcaattatatagtctgacaaggcatttaattttgccgtatgtatttcggtaactgatttcagatctgacagtttcctttaaggtgcagtgtctgatgcttccatttatttcaaagaattgtctttcaaacaatactctgcaaaagttgtatgttagaacattatcaagtaacctaatgcaattagagctcaccgttgctgatgtgatcaatgaaaacctctagcctttgactataacacggaataatttatagttaaactccactggatttttcacattagattccatgttattttagctgagtaggaactttacagagcctcaaggcgctcagaaaatataagcaattgaaaaaagaaaacagagaccgacagccttaccaaaaagcaatcaaatttgaaatttaacagaaacttggcagtcacatattgttatgacaccacttactatcaaatcagtactggccataaactgggtttgttaattattacagcctcttacttctgtgtggaggtcaaatggggaagaaaaaaaagatggtcataaactaaagactcagaagggcatatgccagtttcgctggaaaatatttgctggcttcagggcatagcagtgcacatcctcccaattaatagcgtctttccctcatcagcgatgccagtagaagaaggcacatgttctagtttctttgtttgcaaattagagaatattggaaaattatcctgtantttaaagatcaaaaccaaaatggcctggccaatctgggttgatgcttcagtttcttttttttttcttttcctttcttttagagacggggtctcactctttcacctaggctggagtgcactggtgtgtttatagctcactgcaacctccaactcctgggcacaaatgatccctcacttcagcctcccgagtagcttggactacaggcacatgcttggctatttttttttatttttatttttttgtagagccaggtgtcttgctttgcggccaaactggtctctaactcctggcctccggcactttggcctctcaaagtgctgggattaccggtatggccaccatgccaggcttcagtttcttcgaaatgaaaacagagtttaagtgaaatacaacatgagaaatttgaagtgaattcatctgataagccaagtaatttacagaaatgatccatgaagataatgtgcaatgaagaacagatgccaaattacactggatattttctgttttcagggataaacaatcagtggatctttttcccagtgctggtttgcttgtctccttgcttcctaacatcaccttcgttgcctgaatcctttcctccatcttaaatgaaccattttttcttttatccagctaatctgagcagtgtagtgccaatgtacatttccagactaattttccagctattccctttccactcattctgatttctggctttgtaggacttttacttcctctgatgaccttttaccgtgatcacactttgacaytgaccatcactctctgctgtgcttatttttgctgtgtaataaagtcttactcattctcctccaagacccatttctaacattccctcctctatgaggccttgggtgctgtctacaggttacttgtcccttcgctgttcacattatcctacatttgttcatgtggtttgtgtctgcccaagtggactgtgaactccatgagagacagaacctaatctcattcacttttgtatttctgggacccggcacaggactggcacaaagtaggcgttttatagatgtttgctggatactgggctgctgtgtatgttggttagcatcttgcacaaagacatctagccaagggaaagggcactaaaatccagctcatgaccatatgtatcttggtcacgatacaaccctaaggaggggcacctctcttaaccctaaggaggggcacctgttttgtaatttctttacccagaagggcccctttatgcaatttccatagggacatagtatgtgctagtaactgaccttgttgaatggatgtataaagaaacaagtgaatgaagtttcccgtaatcctctacagctattaataatacaaaacaaataatcaaaaagacaaaagaagccttttcacaagactaaaatcatctagtccagttatcaaaactgatcaaattcggcactgctcaccttatatgctattcaacttctgtttgactaattctgtgaagaataaatcctcacatttgcatcttaggttggataattctcttggcagtggtatctgaatagtattattttgaatgcaagcattttttatgactatgattttttatattgggactgtctatctttctgtcctacacattagtgatacctcttggacattctgtagggatactgaaacgtgtctacaaatggttcatggtctattatgtaagcttctttgtgctcagttgtaaaaaaggatggtcctaaggtcttaattatatgagtcattacaattttaaaaaattcctaggtagaagtcaggctatttagttgatttaaaaatatttttgctagaatggatttcttctagcatgttgaaagtgctgaatcccatgttgtaacacctcaccagaaattatcagtagaccagaaggtaatgttgattatgatctcatttattcatccattcattcacacattcatttactaaaaaattacttacatttctccagtgcttaatgtaatgcttaacatatagtagacaatgaatttgtgttgacttgaatttattcatatatgcattctttcattctcttatcaatatttatggggctgctacctcaggccagacattatgtgatcagtgcagatacagcttcttggcctgtggaagcatcacgccaatccctgtcttcatgttcacatgttgttcacccagagtatgtctctggatccaaactgtatctgcattttctttatctgcgttgatcactaatgtagttccaggacttaacataatgcttaaaataattgatatattttatagttccctctctgaatgacagcaggctttatgaggcatttaatgagtgattgtcagtcctggctgcacattagaaccacctaaggtgcctcttaaaaataccaatacctggggcttaacccagaccaattaaatcaacatcagtgaaggtgagacccaggcatagctaatttttaaagctccccaggatattgtgagctccacccaacgttgacaattactgagttattctgtgccctttttttttatgtcactggttaatgtcacttctctgggttgaattatatccctccaagatttataggttgaagtcctaacccccagtacctcagaatgtaattaccttgtagaggtaatcaagttaaaataggacattagaaggagttctaacttatgtccttataaaaagaagttyggatccagagacacacacaggatgaatgccatgtggacacaaagacagatattggggtgatgctaccacaggccaaggaataccaaggcaaacccgcagaagccaggagagagggacggaacagagtcctccctcgaagtcttcagaaggaatcaacccttgcagtacacgtgtattttggacttgtagcctgcagaaygatcagaaaataaatttccttatttatttattttttttgtagagacagggttttaacatgttgcctaggcaggtcttgaactcttgagctcaagtgacctgccctcctcagcctcccaaagtgctgggattacactgcccctggccaatttctgtttttcgggctccctccacccccgaccatgtggcactttgttatagcagccctagtgaacagtacaatcagcgcctttataaatgcgttttttaaagagctaactttaaaatgttctgcttccttcagtccccattcccttctgaaaatggaccawctcccgtctctgagcccagaccagatgctatctctctacttcttccaaggtggccttatctttactaagagtcagtgttgaaacatgcatgaccagcccacctggagctagagacttacaggctgactccatgatgaataatcaatgtgcgataattccacttgccaagcaaagctcggcgtagacagcggctgcttctggcagatcgataaagtacttgaagacacttgtttcagtggctctttgaattccgcatcatcatttgatttgctccgataacattcaagtcttgcctctttaagttattgttttagcaaattcaatttacaattactttccatatgaaaagcttaagagattcagtttaatgccttattagctgtaaaatcaactgctgtttcaactacgcggtgtgaggagcagtgaaaaggcttcggttcttggcgaaactttccctctgggcttctgacgaggggcagcttcttcagttgtggagctatcttcacaatacctgctttctaagctcctagtcattggacccaaattcaaattacatttccctcccgtgtcagggatttctggggtaaaaataagctactttgaagacaggttgctctcagcagggattttttgctcatcaaatgtgatccatgcaacaggcacctttgaaaactcaccatgacgccgattttatttttaaatggagggactaaatggccattacagraagtcggcctgagtggagtgggggttggggggagagagtttattactgttgtttgaatcatttataataatgtacttttgtgtctctggataactacatgttaggagtgaagaaaatcctcactacatgaaatataaaagaccttcttactatggtgtgcaaagtcctgtaagctctttccagcacctgctgcttggacctcctcttcagtcatgcacccctagttcattgtcctcctgctcgagtccttcctgcccccatgcgtagaagcctgatgccacctcatggcctttgtatctctcgatcgaatgctgttccctcacatatttgcctggctgtcatatcttcttctgattaaatgtcaccaaactagtaaagccttctttaatcatcttctccctccctgcccacctcagtcaccctctgttcctttatcttgttttgtttttatcacagtattcacctctttttgcgtgaaattattatttatttgtctgttttctaattgtcagtcttgcccctctctgccctcagatgtgagaatgtaaactttgtgggagargggacctttgtcaatgttcacctctgtttttccagtgccaattgatgggcacaaggttggcattgaatgaatagttgtgggtgaataaatgacagaaacagtgtgctttacttagtgctgcataacacactacccacaaagtaagtagctaaaaacaaaaactatttatactttttctggatttcctgggtggcaggcagttctgctttctggcctgggtgggcttagctgggacaattagggtgcctggcttctctatctacatattatttcatgctaggcttcttcagacatggtggtctcagggtttaagaacatgagagctggcagggtgtggtggctcatgcctgtaatcccagaaatttgggaggccgaggcaggcggatcacctgaggtcaggagttcgagactagcctgaccaacatggagaaaccctgtctctactaaaaatataaaattagccgtgcgtggtggcgcatgcctgtaatcccagctacttgggaggctgaggcaggagaatcgctggaacccgggaggcggaggttgccgtgagccaagactgcgacattgcactccagcctgggcaacaagagagcagaagttgccagcatcttaagaaggcctaagctttgggacatacacwaagtcacttcttccagcttctgttggtcaagggaagccataaggccagaccaaattcaagcaagtagagaaatacatttggcctcttgagagtggtggcaatggatcatggggccaggaacaggattcattaggggttattactgttattatgtagtgatctgccccaagccccaagtgatatattttttgtgggaaagctcattctgacctacatrtgagtggcaggttttggaacataagattcatatcttatatattcatatcccagacatttgcatttgtgccacctgtcataataccctgcacactataaacaataaaygcctccttrgttttgctgttgctactgtacttacatcgctatatttaggataaattttcatgtttacacacacatcagtggatgtgcagggattatccaaagaccttagtacatcatttcaagaaaatgggagtgaattcgggaataaattatattgattttacttcagacatttaaatttgtttcatctattgcttttgctgtggaagaattgatttcaacaaggcagacagagaaaaaataaattggttttattgaattcacagtgacctgattaaaaaaatagtcattgcaagaaaaatgatcttacttcctattttattacagatttttttccttcaaaaatttattggtttaatatagtaagtgaagaagatgatgaattttatttagcattgtgcagaatggtttgggggctgttagaaaacacatttcttgaactatttcttattcagatgattgtaaagattattttgattaagaaggcacctctcgctgtttgatgcttttatactgaatgaaaaacagtccaaaggtctgtaagacaattcacattggtacagatttagatcattatttcctgaaaagaaatgttgaaatgttagttactactcaaattcttttcttaaaacaaaatgaaacattcgagtttgacttagaaaattactagactgcagaagggaatagagaagaaagcaaaaatcacctgatgtctttaaacttcaccttgagtgtttacaattcagaaataacattcaatgttcaattaaaatttgaatgtctctatttgtactcaggagatgaatagatttggatatactttctgataattccttcactgtccaaactgctgctacttactatctgaaatcaggaactaaatagatttgggaaaacacagagtcctttgttatctgaacttgctgtgcaaactcccaataactgagaactgatttggatagcaagagatacttggatataggttatctatactctttaatgacattggtaaccctctgatcccattgtctatactgtttgtaagttactcttttcactcgaaaatatactgtgaaaggaagattgcagctggggagcatagtttgtcaatctctctaaatccacacataaaaacagagcaactggacagcaaaaccctcatacaatgtttagcacaaaaccacgtcacaaggtctcttcacaaactccatatccactccatggggtgaaatgtgtgtaaacaagcaataaacatggtgtgataaatgctctgttctgagctcccttgagatgagatcagagtacagggagttccttaaagacttcgyggagcttcaaagagtatttacaaagaaaaacggcataatagcaacttaggggacaactttcacatgcacagttcttcattcagcattccccacatgcttcttatgtttagtttactcattcagacattttttcccttgtcaaactttgtttgcatggtcagtatagtactagttgtacatatctggtatgaagttttaagagttgctttttacttttgtaagatcaattatggatctttcaggagaatatgtgatcttgtagatatatcaaggtggattgtaaagactactgaatctaatccttagttaaagtcggattcattctttgtctactcaacgctgactttacttttaaacaatgtttttcaaccaagggcactatacacacaaataattgcaagttttaaatattatttgatgtttagatgcaaaaggagacaatggttaaacccattactcttatcctttagcccttgatatatttcatcttatgttagatagagtttaagagactactaactagttacaaaagcttgtattgtttctttattatagaagtaactcatgttaatttcagaaaaaaatatagaatacatattaagaatgggataaaagattacccaggattccaatttgttgttgttgttgtttagaaaccgggtcttgctctgtcgcctaggcaggagtgcagtggcatcttcttagctccctgcaacctcaaactcctgggctcaagtgatactctcgcgtcagcctcccaaagtgttgggattacatgcctggcctcattttccactttttgacagtgattgctattaatgttttagtatttatcttcttacagagtttttaatgcaaatgtattgttttaccaaaatgagatcatgatttatattctgttttttaacctttttctttttaaaatttcaataaataatgctctgcagctttgttttcaatgacttcatagtattttatcgtatggatgtaccataataaattcactgattatttattattgttaaatattttgattgtttccaaaatatcaaagttttttacttacgaggttgcagtgagccgagagtgcaccattgcattgcagcctggatgacaagagcaagactatgtctcataaaaaaaaataaaaaaataagttgtaataaaaagctgcacatttattttggctaatatgtccaattgcttagctaagagtaactaacagacatggaatttatggaaaaaaatgtacattttaatgttttcaatcagattaccaaaggcccttcaaactgtaacattttatctctaactagtagtatattatgatgctctttcattcatacctttacaagtaatgggctttttctcattgttattttaatttttgtttgcttaactattagtaaggtcgaacatttttgttagtttatatttattatatactagtaaaccaaaggaggagttaatagtaaatgaaaagagcttaattaaattaagccatggagagcttattgactggtccctcactcagcgatttagtatataaatagaagacttttaaaataaactttggcttacctatgttgaaataatatgctgctttgaaaaggaattcagtagccccctatgtactgaagaacaaaaaatgtatgagacacattgtcaagtgtcttaatacttaacataaaaaagtcacaaggtacaacttaaaaagtgcttttaaaattaaatttgtttacatacttgaaaagttaattttattatatattttatttacttattgaagtgaaaaatgtgcaaaaggttatctgtgatgactccctctcacctctaccccagtcatttcattcttttccctggagggtattaggttttgaggttttaaaaaacattcttttagtgatatttcatgcattttttataaaaatggattcatataatatacagtgttctggtccttgctttttttttcatttgacagtataactttcagaccttgccgtatctatttcctgacttgtttcttatggccccagaaaattcttttatatggatgcaacatttgctagtctcttggtaatgggtattacaattttctctgatcttttgctagtactaaaaaagaatgctgaaattaacatatatatgtatgcatatatatatgtatgcatataaaatttgaaaatggatttttaaaaatgtctgaaagttttaacaataaacaaggactacctccatgggagtggggagctggatgtgccaggtaagattttactgtttatttcatgcactgttttgatggtctaaatttttttattgaggttttagtactttgaattttttgaaaatgaattttttttcttgagatggagtctcgcttttttgcccaggctggagtgcagtggtgtgatcctggctcaccacaacctctgcctcctgggttcaagcaattctcctgcctgagcctcctgagtagctgggactgcaggcatgcaccactacaccaggttaatttttgtatttttagtagagacggggttccaccatgttggccaggctggtctcaaactcctggcttcaggtgatccatctgcctcggcttcccaaagtgctgggattataggtgtgagccaccacatccaacctgaattttaaaattataaattagtacagccattatggaaaaagagtatggaggttcctcaaataattaaaaatagatctaccagatgatccagcaatctcctacttggtatatatccaaaggaaatgaaatcagtctgtcgaagagatatctgtattcacatgttcactgcagcactattcataatagctgagatatggaatcatccaagtgttcatcaatagatgaatggataaagaaaacatgtacaaaatggaatactattcagccttaaaaagggagggaaatcctgtcattggtgacaacagcgatgaacttggaggacatcatgttaagtaaaattagccaagcacagaaagacaaatactgcataatctcactcatgtgtggaatccaaacagttgacctcatagaaggagagagtaaaatagtagttaccaggggtcaggaggttgggtgggaagatgttggtcaaaggtcacaaaatttcagttagacaggaggaatgaattcaagtgatctattgtactcactaaaagaatagattttaagtgttctcaccacaaagaatgataagtgtgtgaggggttgcatgtgttaattagctcaatttagccattccagaatgtatacatatttcaagcatcatattgtacacaataaatatatgcaattttttgtcaactaaaattttttaaaaaatcaatagattgaaaaattagtgttttagattcagaattatgatgtggacagataaatacctttgggaagctggcactggaaagaattttgatggaatgttgcccactgctaaaaccagttttccctcctctgggtggtgctggtgctggtgatgatgcagataaatgtattaggtcattgagaaaagaggagtttttgtcctttagattctgagtcctaaaaggaataaagctgaaaacttgattctgttcttttgactttcaaattcctcagctgaaagccaagataactgaaaactggtgggcaaggagttctatagctgaaggaattatatacatgtagacatttaatatccctctaacacaccatctagaggcatatttgtaagtccacaagtaatcatttcctgtgaaaataaagattaatatgtttaaaataatttatctcattacatgttgacatcagactttttactggctcttaatatttcacattgtaatgcttgatcaggttgaatattgaacattagcaagtgtagaaacatttatgaaaaatgacataatttattttgtgaaaccaattccaaatacatgaaaacatggggttagaattaattcatcaagaatatcaataagctgataaagcagagtcattttcatttccatcataatctttaagctatattcacagaaaaattacttattaaagcagccatatgtgtgattaatgggttggtagtggtactaattactcattagaatgcaaggactaaaataccctaggactcaaaaaaacataatgattttttattcaaagggttggctgggtcccaaagtctcaatggatttgtattttgagctataagaacatggttttgatctaaaatgagggagaaattattttaggaaggtcttacttggtactaacatagtgaaacccttctttttcatatgcttattcaatcaaaagttcccactttgagatcaataaccaggttacgatttgcctacatgcgttttcaaagttaaaacattgggatatgtatgcttttcttttctttttctttttttgagacagggtctcactcagttactgaggctggagtgcagtggtatgatcatagctcattgcagcctctaactcctgggctccagcgattctcccacctctgcctctggagtagctaggactacaggtgcatgtcaccatgcccctgttttttcttttgaatgcttgatcatctatggacaaacatttctccatttcccatgagtaattgtatgggtgctgttttacaatggtggcctatgtgactgtttaaataataaccaaattttaaaattcataaattcaattgagcatcaaattagcagcattaatcattattagaatataagtagtgcatgcaagtatttcttacatattaaaaatattttctccatcattatcactgaacactgcagcttggagtgaggatagagattaggtagaataaaacctgctattaagtaaagatgcatcttctgaaacaaatcttaaaaataagaaacaattctaaggaagtcagattattttatgttttggatatcccaatcacgttaaaattctgagtatcaactacaattttcacatgaataacaccactaatttttataagctaaaatgacaacaagaaactctaccccacgaaatattttcattttaattaagcaccgtagagatttgctgtgaatcacagtggtgtttgcttttgacactggagatggaaaggagatctcaatgctttatttttcatcaaaaaataaaaaagtcaagaaggattctaaatatatcaaagaatagctttaaaacattaaaacaccaaggtaacattttgagatgtgagagaatattatcttgtgagtggtgaatctagggaagcttttgtctgtgtaggaaaaagagggtttagcaattctacaacttccttttttcttggggataggagggaagtgtggcaaaagtgccatcaccaacaagcaagtaagaaatagcagaatgatgtgaagcaactataggcattaacttggatgctttgctgcccataaatctcactcaatgtatacttttaaataagattatttaacacaacagttgaatgtgtagcaagccacagttcattctctgaaataggttccttataattttatttatctattttattttacttgtatattggaccagttggactaaaataatatatccttctatagggacagtgggtcaagatttcgttagtaatggaaaactcaaacaatccttcttacacaagaatgtcaacccaaaagacccgctgaaacacctattggttatgcaaaactaaatttgttaaacctactgcagtaacagagaacacaccttaccaaagtcttggtagcatatgaaaataagaaattagatgaggatatgtataggtgtttagagtgtgggctgtgcaattttagggtgagtcttgctaaagaggacactggctgtgatggggcggagtccatgacagaggaggtctgggctggtggatgctgtgaggtgaaaagtgggaaagcagccacagtgagcaagatgttagtcttgctaagtaagcggtcttagtttatgctcttatcttccaggagcaagcctctaagttattttttgttttttcttggtattgtttaatgtagggaaagtatgcccctccccagaattgtttaacttggggtcaggcaaggatgttggtctcagtgttctttaacagggtgagaaggaattatgtggatgcccgtccgcctgtaaggtaccccccagagaaatctgcctgttagtattcatggccttatgtaatcctctccctttgagtgtgggctgggtttactggcttctcatgaatagaataggaaaaaaaaaatagactgtcacttctgagattaggttacaaaaaaccatgactttggccgggcgcggtggatcatgcctgtaatcccaggactttgggaggccaaggcgggtggatcacgaggtcaggagatcgagaccgtcctggccaacatgctgaaacaccgtctctactaaaaacacaaaaattagctgggcgtggtggtgggtgcctgtaatcccagctacttgggaggctgaggcaggagaatcccttgaacaggggaggcagagcttgcagtgagcagagatcaccccactgcactccagcctggcaacagagagagactctgtctgaaaaaaaaaaaccaaaaaagaaacaacaaaaaaaaagaccatgacttctgctttgctgcttcctccctctctctcctgttgctcttgctctgggggaaagaggccatgagtggctccatggagaggtccatgtggcaagaaactgtctctagccaacagataccaagaacacaaggcctgccaacaaccatgtgagagagcttggtcacagatccttccccagtcaagggatgagatgattgaaggcaggcaagagactcagagagagagactcacatgagccgtgcctgaattcttaagccttagaaactgtgcaatgtcaataaagaaaaatcatgagacaagtctcattcattttaggaggtttatttgccaaagttaaggaagcacatccaagagacaggtctatgcctttctctgaagatgattttgagggctccacatttaaaggggaaagggcgggatattgagaagtacacaattttcatgtaagagaggtttgaggaaaaatatgcattcatgccattgtctggctcagtgaatctgcattttttttacataagatgacatagacaaatggggcagaggagaaatgcagggaatctgcatttttacataagataacacagacaaaataggacaggggaacaatcagatatgcatttgtgtcaagtgggcccggggggtgactgcacttgtaaagataagctatcagtttacattgggtgaaatgtaaaattcacccaatgtgaaatatgaaatgccatggtgaaattttaacagaaacactttggggtaaagatctgggagctcactaggaatttccttgtggacaaaatctggggaggtgtatagcttttttcatcttgtagccatcttatttaggaagcaaaaaaagtgggaggcaggtttgcatgacccagttcccagcttaacttttccctttggcttcaccagtttggggtcccaagatttaatttgctttcacggcgatgatagtatttgttattttaatttactatgtttctggataatgtgttatacagcaatatataactaatgcatgttgatgtcatgttttcaggatgcataaatatactttctactgaaatttttacttatttcagaataagcagatttattgtccaaaatattggttaatttactatttttgcatcgaaacttgagagacatacttcatatgtttattatgaacatttcttcattctgctctatagaaactggccatatttgaagccgatagtgactattctgtggagagatagctgaagggaatgatgtagaattaatgcttccctgaggaacacactggattaggaccttggaaagagctactctgtaacctacggagcatttctctgcagctttgtctctttggcacatggcaggcctgaagtctacttgagaagaacagatataaacccaacatctgtatcagatgcastttcccagccttggcctcaaagraggatttctggactctctgttacagtgagtcctgactctccctactgcccgtggttgctcttcctatcacccaatgtctgctgcttaagggagtagttttcttctcccatcaccaacctagggaaattcagttcttgggaggcaaacacaatttccctaagactttatcattgtttaaatttgaaagaaagaaatatcaatggtgttctgaaaaatttaaaaagggatgtatggttactaattggggctaggaaaactggagtgcaaactcagagagatacagcttccttgcttataggggtaattgtgaatggatgattgccagcattgtcctggaaaatttcaagatatatagagtttctctgagccactgttaacaagctaataaattcaactgtttctggtggaggtgagaaagagacaaggacagccaaaatactttcgggttctgcatgtttcccagttggctttggccttagatttggatttgcatagagcagaagctaaattccatttcttccatataktcaacttattttgggccatacatatctacttcgattgtctgctttttggttactgaattttataagctctcctccattactatttttctttcctggtctaccaacttttgtgcccattagttactcatctgcgctccccgccccacccccgctcaagttttgcgacatctctgaacatgttgaacagggaaaaagaaattggttgactatctatagataaatatgcatagagcgggtgctgtgcaaataactttgccatggattaacccatctgccctcaccatagccacatccttcaggatagactcatcttaccgtcaccccgataagctgtgtgccttgttttttctagtctctgagccttatttcccttatctgcagtttcttctgccaacttgaaagcataacaaatctgcaattcacactgagagtctttccaagtcattgctaaagtctttatttatcaaagccagtatttttcccaccctgtttatattttctaacttttaatagtctttactcacaaatgggtctcaacgtctattcacgtaggctgttgctaagttggctgcaaaattggcttcagaaaagcttcaagggccccaaatgtctgcattcccatattgttctgtttgtagctgaagcatcaaaggcctctgtctgaatcattagaaggcaaagatagtgagcctttactagcctacagcctggtgtagatgactctcccgggtaatccagaaaatctaaccaattttctgggaagctggattcaagatgaggggattcaagggggcagagtgtacttagaacctcggatatggaataggcaaagcattgtgaatgaaggttggcaatggaaggcaccaaggtaagtcagagttctaatcaaaaggccacacaagagtgcaatggttcccaaatgaactgtacgttgaaatcacctgggaatcttttaaacaatactgaaggttgcttctattccagacattctgatttaattttctggagtgtgacctggcataattatttttaaaaattcatcagttctaatgtacagaaaaatttgagaaccaatggagtaatggttmaaggcttgcactttgaatctagacagatcttagtttcaatcccggctttaccactarwccacatgactttgggcaagttatttgacccctctgagctccaggtctttttgcaaatcagagataaaaatagtacctggcacttagggttattattaataatactaaatatatgcttagcrcagtgcctagcacacagtaagtactcagaagacactaaccaatattatttaatactagtaccagagtttcaatgttagaagaaggcttgacagtggtcaaggtatacttaataaccaagacaccatggggtggagaaaaacatagcttctcactagccctgcctccagcaatcaggcagtgggaataatagagaaagcttgtgtgtgtgtgtgtgtgtgtgtgtgtgtgtgtgtgtgtgtgttactccccagggattctgccttgcaggatctcatcaatcaacccatttgacttattaccattatgtataattttgaggtttgtgtcaaaggaacaggtttgtcgtggttgctctaattatggggaaatcatgtgtaatacatattacacatgtatttttatggcaggtcttttacgaaacaggcttagtttctaataattttacaaaggaagatgggggtggtttaaagcttaactggaacaattttaaatgcatgttggactgaagacttatggattcagatgtttcaaatctgtgttgaaaactgctgagaatatactcagaatcttcaggatttaattcacacatagatgtgtatattttacattcacattatcctttattttatttttaactagagttaagcataattttacagatattcatattgttagcagatggctgcattcacactaataaacagcattttaaaatttaatttttttttgagataattgtgattatctcaaaatacagattcatatgcagttggaagaaatatcacataccctttacctaacatatttcaaaactatatagtacaatatcacaaccgggatttggatattgatacagtcaaagacaacatttctgtcacttcagtgttcttcatgttgaccttttatagccatgccaacctcccttccaccccctccttaacccctggcaaacattaaattttttgttttccgtttctataattttgtcattttcagaatattctataaatggaatcatatagtaactaaccttttgtgattgacttttatcatcatgcataatttggtatctaggtaatactagcttcataaaatgaattgggatatattctctactcttctattttctggaagagattttgtatagactcagtgtaaattcttctttaaacatatggtagaattctccaatgtaatgatctaggcctggagatttctttttcttggagttttaaaattacaattcaattttcataatagctttatggctattcaaatgatctacttcatattggatattgggtgagttgtgggagtttatgttttttttaagaacrtgtccattttatataaattgtcaaatttatgtgtgtagagttgttcatagagttttcttattatgcttttgatgtctgcaggatctgtagtgatatcccctattttgttcttgataytggtaattggtgtcttctctctctctctctctctctctgtctctttttggtcagtcttattaaggtttgtcaatcatatcgatcctttgaaagaaccaggtttttgtttcattgattttcttcattgttagcttgttttcaatttcattaattgctgctttcatctttcttatttctttcctcctatttgctttgtatttattttgctctttcttggttgttgaggtaggagcttagattcgggatgagcatttcctctctctaatgcttgcatttaatgctttaaacttcccactcagtatgtctttagctgtgtcccacacattttgatatgttgtattttcattttcatttagttcaatgtattttttaaacttccctgagacttcctctttacacatgaattatttggaattgtgttgtttagcttccaactgcttagggattttcctgttatctttctgttattaacttctagtttgatttcactgtggttggaaaacattctgtatgctttcaatttttttttaatttgttgatgtttgtttaatggctgaggatatggtccatttttgtatacgttttgtagatacttgaaaagattatgtattctgctcttgttaggtggagtgttctgtaaatgttgattagattctgtttgttgatggtgttgttgagttctatatcccggctgattttttacctagttgtcctatcaactgttgaagaagagtattaaactttgtaacagtaattgtcgatttgtctgtttgccctttcattccaattagtttttgcatctcatattttgcaattttgtttggtacatacttatttaggattgctatcatttggcagattgacacttttgtcattatgtaatgtccatccctgtctttggtaattttttttgtgtgctgatgtctatgttatatgatataatgcagtgactcctgcattctttaaacacttgagatataattcatgtaccataaaattcctcttttaaaagtatgcagttcaatagttttaatatatttacaaagttatacaacaatgaccactgtctaattccgtgatgttttcatcacttcccttcaaaatatatccgctattagtcatatcccatttacccatttctctagcccctggcaaccactaatttgttttcttcctctatcgtttgcttattataggtatttcatataaatggaattatacaacagtatccttctgtgtctggcttctttaacttagtacaatgttttcaagattcatttatgtaattagcatgaattaatacttccttccttcttatgattgaataatattccattgtatgaatacagcatcttttgcttgttaatttaccagtcgatgagcttttggattgattctattttttaactatttttaataatgtttttatgaacatttggatatagggataggttttcaattcttttggatatataaccaggtgtggaattgctgggtaattctgtttaattgcttgagaaagtgttaaacattttttttttttttgagatggaatcttgctcttgtcacccacactggaatgcagtggcacgatctcggctcactgcacctccgcctcctgggtctcctggattcaagccattctcctgcctcagcctcctcagtagctgggattacaggcacccaccaccacgcccagctaatttttgtatttttttagtaaagatggggtttcaccacgttggccaggctggtctcgaactcctaactttgtggtctgcccgccttggcctcccaaagtgctgggattataggcgtgagccactgcacccagcctaaactttttttttaagtggctacaccattttacctttcattgtatgaggattccaatttcttcacatcctgccaatactttttattgtcggtccttttgatacacgctttcgtagtgggtataaaatggtaccttattgtggcttcgattttcatttcccgagcatcttttcatgtacatattggttatttgtataaatttctatctagcacttttgcccatttttaaattggtgttgtctttatattattaatttataagagttcattatatactctggatattagacctttatcaggtatatgatttgcaaatattttcttccattctgtgggttgtcttttcactttcttggtactgttctttgaagcacaataatttccaattttgatgtattccaacttacctattttctctttcattgctgtcatatctaagaaacgattgcctaattyaaggtcatgaagtttttcacctatgttttcttttaagagttctatagttttagctctcatatttacatcctgatccatttagaggtttttttttaatataaggtgtgagttacagtgtccaatttcatttctgtgaatacatttcttttgattaatgcttccatgacatatatttttctgtatttttactttaacctacctatcttgttatatttaatgcaaatttcttgtagacagcatggattctattcctttatttgctgtatttagaccatttacatttaatgaaattgttgatatgttagggcttaagcctgccattttattttctgttttccgtttattctctctgatttttctgatttcattttgtttctctggtttgtttttctttctgtcatcctgtgggttgcttgaacattttctagatttcattttctagaatttggtttatctatagtgtatccttttattttttgagtcagagtctcactctgtcactcaggctggagtggagtggcatgatctcagctcaccgcaacctctgcctcctgggttcaagtgattcttaagcctcagcctcctgagtagctgggattacaggcatgtgccaccacacctagctaatttttttgtatttttagtagagacagggtttcaccatgttgataaggctggtcttgaactcctgaccttaagtgatccacccaccttggcctccgaaagtgctgagattacaggcgtgagccactgcgcctggcctatctatagtgtttctgaggatatctctttttatagtgttttagtgattgctctatgtattatatgtacacagcctagcatagtctactgacgtcattttaccagtttgaataaattatagaaaatttgtctttctttatttttattttgttttctttatttttatttatttatttatttttttatgttgcccaggttgatctcaaactcctagactcaagtgatcctcccaccttggcctcccaaaagtattgtgattaaggcttgagtcactgctcccagccaagtttctttaccctttctcttttataattgttttaaatattttctgtgcacacatttaatatcacatcagataatgttataatttttgttgcactyatcaaatgtaaatgagaaaattggagaggagaaggaaagtctatttatttatctgtatttttgtttgccatactcttttttcctgcttgatattctacagttcctgcttttgtcatttcctttctgtttagaggacttcctttaatctttcttctagggtagggatgctagagacaaattctcttagttttcttttatctgagaaatgtcttaatttctcctttatttatggaggacattttctctggatataaagttctggtttggcacttctttttttccacacttaaaagacgttgtgagaattccttttggcctccattgttgctgatgagaatgccactgtcatttggattgtttttgtcttataggtgtcatttgttttttgctgctttcaagataattactttgtctttagttttcagaagtatgactatgaagtttcttggtattttggactgaattatctccaccaccactgctcctccccctcaaatctatatgttgaagcccaaatcccccaatatgattgaatttggagataggacctttaaggagataattaaggctaaatgagctcataagagtggggccccaatrctatagaactaatgtcctttcaagaaggggaagaaacaccagatctttctccctttctctctgtctgtggatgtagaggaaaggccatgtgaggacacagtgagaaggtagccatctgcaaaccaggaagaaaggcctcaccaggaacctaccctgccagctcattgatcttggacttgtgaaycccaaaaatctgagacagctttcagcgaatttagaaaatttattttgccaaggttgaggatgcactctactgacacagcctcaggaggtcctgatgacatgggccaaagatggtcagagcacagtctgattttacacattctagggagacatgtgacatcaatcaacataagcaagatgaacactggttcagtctggaaaggtggaacaactcgaagcaaaggtgggaagagtagaagaggggagggggcttccaggtcataggtagataagagacaaattgttgccttcttttgagtttccgattagcctctccaaaggaggcaattagatatgcatttatctcagtgagcagtggagtgacttagaatagaaagggaggcaggtttgccctaagcagttcccagcttgagttttcccttcagcttagtgattttggggccccaagatttattttcctttcttttagcatctggactgtaagaaaataagtttctgttggtgaagccatctagtccgtgatattctgtaatggcagcctgagtagactaatatacttggtgtaaatttttttgagtttatcttgtttgtggtttgctaaccttgattctgtaggtttatgtcttttgcctaattaggaagtttttggtaattatttcttcagatgctttttcagctctgccctctttttcctctcctcctgggactccaatgacgtgaaggttgactcyttggttrtagtcccatgacttcctgaagctctatttatttatttgtrtaatctatattcttttatttagattgggtaatttctattgctttatcttccagttgactgttctttcatctgttctacccattctaattttgagcccatgcgttgaggttttttaattttggttaatgtatttttcaaatctataatttacgtattgctgttcttcatattttctatttctttggagagactttctatttctttgctaaaatgatgttttttcatttgttttaagagtgttcttaattgcttgttaaagcatttttgtggaggctgctttaaaagtttttgtcagttaattctaacatctatgtcaagtttcgtgttggcagctatacattttttaaatttaatttgagatctttccagttcttcatatgatgcatgcttttttattgaaatatgggcattttgggttttatgttatgaagactctggatgttatgtaaactttctgttttagctggcttcctctgatgctagtgggcaaagcaagagttctagctcgccagtggccttatattatgaaaggatgagggactttactgccctgtgggatacaagtcttgccttccagctcttccttcctacacagtagagtgctttgttgtgctttgttaaacagcctctcaggagagaagcctgggcacctcagtcagccttggctgctgtggctcaggaaggggccacagttatttctgtggtatgtggctggagtagaccagttattttctaaaagctttccccttgctgggcagcccatttgctagcctttagctgaagagcagaatttgtggggatacttttgtctgtgcctattagcatttctggatttctggcttcttcagtggcaagtctgaaatatgtgaagtgaaaaagcaaagacccaaaaccccaaaccaaacaaacccagggaacgttccactatgttgttctttgggggttaagttgcctagctcatctgtcttccctctacctttcagactctcctaatgtttgttttatgtataatgcccagggtttgtagttctacttagcaggtggaataggaaaaagtatgtctacatcttccctgatgtggaagtcccctgaattctatcatttaactgctcatgattttgcaattattccawtgtggattttggctgttctagatttgacacagacagtttttcttttcacatgcacatcacctgagccaagagagcaccctaggccacgtgtcaaacaccctgtggcaataagttaacattgtcaagtctccctaatgaagcatgttgacaaatatgttatacawacaattcggtgctggctttatatttctgcatttatatctatgcatattatatagttttatatactgagtagctttttaacatactaccagccacctattccatttggaattaaaacctttctggggtttttaaaaagctgtagaaaaagcagaaattagcactctaaaaatggtttattttatagccaaatgtcaactaattattcccataggttgaaaattcttgctcattttaactagggttatgttcattttcagaggaaaaaaatccccctctgtcaaaacatgaacccccctcccccacaacctctttgttataaaaagttaagtgtttcctcatctggattttactatcatagtcttataaatgaccagattattaagcatagccttcctgggtatgttcatgaaaatgaagattatagttttcagtcaatgggcaactccttatgaatctgtggatgtttgatgtacaagcccctgcctggggctgatgatacagtgagcagggtcttactgagagtcacctgactcagcatctccttccaaccaccgccttttcattcactgatattgtgtccagagcatgctcagttttcctgtctttcactgttcttagctcagttggttacatcttagggaatccctttcttatttgtgctctygcctttaatttaatcccggtccacaactctttcccttccaaatgcttcaaaaatctcagaatcatagttgcttcttatacaagtatgaggcaaagacctggagaaaatcaaatgtgattttgctaaaatatgtatattaatagtggaaagagagaataagatctcttgttctctawcaaaaaaaggtattcctgtctttgttacatttctgtaactctctctttctctctttgttatatttctgtaatctccctgggggcaaggaagggaaaaataaaacaccactaacaatgggtgattaatggcaggaataaacccaaatcaaacaaaaaaagccatgcatagacaagtgaagtttgataaatagccagtgtcctctaatgtgaatcctttttgacatttctggaatacaacccacctggtatcaagctgaagaggaactgagtaggttctccttggtattctcatagaaaaaggtgaaaacatatactattagtygatatttgttgtaaaacaaatgaagtcttttattctggttgaaagtgatggaaagacaataaaaaatcctgaaacataaagggaaaatttttggctcatgtatttatgaaacaagcttgaggcacaggtggatctaggtgttaaaaagttgaagtcaggaattcattttttatattgcttagctttgccatcctgtattggtttaatttccaagtaggcttgtcattaaaaaaaaaaaatgtaagcagcacgaggtttgtgtcttacaaaattagagacccttggggaattaagatattttccccaatagtttcagtaaaagtcatgcacattggctgtgactagaactgctagtgttatatgcacatcttttgacttcctctaattttctgacttcttgacctctgttatggagtcagttctatttaaacataaactgaaagtaggaaaggaattactctcctcctctgcccaccaaaattgaaattctatcagcggaagaagagcaaaggatgccagaaggttaaatcaacatgtatctactacccacagagaagatagtaatgtggatacataatgaggtcagggagaattaatcccatgaacaccaaggctatccttgctattgttggtttaggtatctcttctgaactaggggtaggatcctcaaggttccagttattcttaaaatctgttttagaatctttctaaaagtctttatctatcttgtcctttttaattaaaaggcatgagttttcaagatgcattttaaaaagaaacttttattcaatgttatttcttctgctttgtttaacctgtaccaacaaggcaatatgaaccgtatttgtgtatgctttactctagcaaagttacaggctacataagtttggggactagactggaaacttaaycacattttaaaaccattttttcatggaaaaaamatttcaaatggtaataggatcctccgagccatgtgcaggatataatctcctggtgtgccgtttgttaagcccattggaaaagcgcagtattagggtgggagcaacccgattttccaggtgccatctgtcacccctttctttgactaggaaagggaattccctgaccccttgcttttcccaggcgaggtgatgcctcgctctgcttcggctcacccacagtgtgctgcactcactgtcctgcacccactgtccggcactccccattgagatgaacccggtacctcagttggaaatgcagaaatcacctgtcttctgcgtcgctcatgctgggagctgtagactggagctgttcctatttggccatcttggctccaccctccttttcatttaaggaaatcttgttgctctgtgattcctcacccatcagatccatagccttcataggttaggaatgggcaagtatcacccagaagaaagagatcattgttgattgagtgttgggtttgggatggggccraagaatttgcattctaacatatttttctaacatgctgatstttagagcactttgaaagcaacctagagagataatagtcttgaaagtcaagtttactgagatagaacaaagatttataaattttagagtttccatttccatatcaataccaaaacctggagttctaaaactggttttaccataaatagatgtaagtaggccttgccagacaggacaaaaaatcctgctgctactggacagaggtggggaaggagacaaaatgactaagaaaagatagaatgttcttactcctagccaggtgcagtggcttatgcctgtaatcccagtactttgggaggccaaggtgggctgatcacttgaggccaggagtttgagaccatcctggccaacatagtgaaaccctgtctctactaaaaatacaaaaattagccaggcttggtggtgtgtttctgtagtcccagctactcagggggctgaggcaggagaattgcttgaaccaggaggaggaggttgcagtgagctgaatattgtgctattgcactccagcctggaccacagactgatactgtctaaaaaaaaaactcaataaaataaataaataaataatgttcttactgcctttcccctaacaccatcttagagtctagtgtaaatcattggaagtagcaattagtggttaatttggagaaattaaggcctagccaaagatggggcccatattcttgcctagcttggtttaggcctctcaggaagctctgtgccatcatgaggtgattgcagaactcgccatggtggatggcatccaggggcaagaaaggggtctgagacatggctcttctttttctgtatggcttgtgcatgatgttgaataaatctagaagttcctatgagactctggtggctgagtgaggggatgcaaaggtagccaagaataaagagctggagagtactccagggagtggacacagcacagtgcacggatctgtagaaccaggcagattttgccacttggtagacacgcagagggtcagcagctctcaaaagacaaggagggagactgtccatagggaagaagctgagttccccaggagcgggcttagtattgcccacatggagacaacaggccaaccgcacacacttgagcacagaatgcagtgcatgagggctaggagagagaagcaacaacacaccgggagawtgctgggagcttgcagagaatgtcaacaccagaagcagacagctctttcattccttgggcttagagccattcagggaaaatgagggtaaaactggcaggactgagcacccaaccccaaagctcttggtttacctgaatgtgactkttctaaattgggcaagcagaagtgtgtcttttcacaacaactcatcagaatgggagcgccaaagaaaaaggagggcagataaagaaaacaacagtattctgggagaaggggcggtggtgctagggattacattttaaccctgtcatgttatttccaggacagatataattcagaggtaaytcaacatgttataaataatgtgattttcatatatttgtttaaaatgccacactcttgtaatcttcaccttttatttagttccaaaatttcaacaaatgaccctgaagagctctctattgatactttgggccaagatcttgctagacactggaatcttaggtggcttccaccatggctgggatctaagctggggcctaggcactgctgaccattaggccttgggcatttctggagaatttctggtgaactggtgacgggggctaagggaaatctgcctgaggggtctaaggaaccacctgagggggagttcgtcttacggaaggaaagcaggcagtctgcaaatgtccctttcacaaagctgtggttgtcgagggaggagaagggatggtgtagtgaatgatattctaatttattcctagtctggctcttggatgtatctctttattttcaggtacagtctcaaaaaactctttaaatgcygttgtacattggggcccaacagcgctgctttcaggcttttgttctaagcagaaggacaggcgttcttcttgctttgtcrctgaatactgagatctttgccttcttgatgggtggggtggccatggagaatgctggctttcagaggagaaattagatagagtctgatgtcccatttggccgggcagcatagccacagagcctggtagatcacagttatttgggagcccacttgaagtacccgataaggacttctaaggacttccaaaaaatgtgacaggccttctgtgaagtacaaatggccctaaatgaacaggtgagggcaaaatgaaaatttagtcaccaccctgagaatcactaattcaaacattttatttagaataatcttttttttttttttaaaggattttagtacttcaaaggctggaaaactgcctttttatcaaggctagacttgcaaggcccagtgcaaactgaaaacacagcgtccatgtttagaaactaagactttcaaggcagcaacagcagagcattaaagcaactgcagtgtgcgcctgcgtgcagggccctgtgtgactgtgcaggttgcacagccatgaagctggccctaggatcacttaccagccagaacaaacagacaaaaataaaatattctttatccatctcccactttttctccatgctgcacctcaggttctagccaaattaactttagattctttgaaagtgtctgaagttgggttccctgaaaggtgtatttacttggaggtgatttttttgaggaagcgctccagggaggccagtaagagcctggaggaagcaggacaagcagagggggaagctgagcaaatgtgtcatctttcttttctctctctctcttttttttgtacaattttaaaattcattttattttgctatgtttccatctttctgtgtttccctggctggtctcaaactcctgagctcaagtgatcctcctgtctcagcctcctgagtagcccagccaagtgtgctatcttgataccaggagaaggcccataaagggaaggcttcagcttgagtccccgagggaacttgagtgtaatttcatctcagagttatcccaagctaagataagggagatgggtattcacatccagtgcactgactagtattggttaatagctgcctagtgcctctgggcaaacctgctgggctcccgaagactagcagcaggttctggccattgaaaggcagggagtggtaactcccatttgtctttcaggtcaccccttagcccttgcatctctgagaagcctttcttccctgattcctagatgtccccagatgatgcaagcttcttgaaaaaatgtccttgtcttgttcatttttgcacttctaaaacctaggaggcacctaatgagtatttgtgtaatggatgaagaaatgaaggtacctcatctaatgagagagcatcagcccaacaacttttattctcttctaaaccattttgggcttgttagggagacatagtcttaaacttctctttcagggtggttcagtgccccagactattactattagattttttccaatatattaaaaagctaataaaaattaataccttcaaaacccaaagtatagccacataaataattccacatacatgagccgtgaattcaccagtgacttaaaatataaccatacctccagtgaatccgcattttataagccattaaatctctcttttttatgtgaacagaaggtgcatccaggacttytaattgttaagaattttccttttgtttcccagtgagggcaaaagctatattctttttgaaatgggtacaaccctgtaatggcatgctttcctatttggatatgacagatatcctctcaggaactaaactcatttctgcatgacatacttgagacttggagaagtaaactacaatttatctcctctaaattgcactccccagttcagagcaggaggcagataacctcaatgtgaactttgcctatggatgtttatctacaggctccaaataatatggatttattctggtaatatacagaccatttggtagataacgttgagagcaaatattttattgctgatttcttgtaaattatacatggctgtgttttagtggattctccttccaaaccacagactcacaacatgagtagttatacagatttttattatgatcttgaatattgacttttaattatgcactggttaacaaaacaaataagrctgtcacttccatcaagggagcattaaggatggagggtatccttttgacatctcttctatctttccatcccagtgctacttgctttaatatcacccatgccaggcataaaaagggaaaaatttcacattactttaagaagaccctagagcagtttgtagttatgtttattgcaaaagatacagggcttacagtaatggtagctgaaggacaccttaacaaccttattcaagagtaaggagggaaattcaaagagacgtgaggcattatttccatctcagtagaagacagactggacacaaaatacatttatattgaagccaaagaaggtagacaattgaatgaacttcctgactacaagaatattaggggaaagaagtcatcaaaaaatccaagagctaaattccactctttttgatatcttttggttcttaacatggccttatagaagactcagtaactcagtatctgacagcaatggcccaaaagttttgcagatctgaggtcagcatccagaaacggtgacccctctgacacccctcgcattctaagactcagtgatctcatccttggagataataagaggtgatgagaaacttctatgtgacgtgtatatttttagattctatttctaagtatgaggagggttaaaggcttttgaatttcttttctggcaattcaggcaagaaaataggtcaagagctcagtaggaccaagaagatcagtgatttatttctgtacggcggttggtgttctttttaaccctttctcacaagaatatcctgaaatatatcctgtgagaaaatgttaatggtgaagataaatgcagaatattgaggtcttggtgaatgttaattgtgtaataaatcttagtagaaagtatgaatgtgatccagtgactctttgacaatagtatagtttggatgcaatcaggttaatgtattttgtttagacttatagaaaatttgagctggaaaggacctcagaaatcaaatctaattatattattattcatttagtttttactggtggagcaactgagtcatttgccatctggataatagcatgggtgctgcaaattcaatccagtgtgatggtgtttccattccgttactctcttctaggatgccagttctctctgcaccttaccttatggaaaaagctagaattttgtagttgtttattttttatccctatagcaaaaaatgtaagaagatagtttttttttctcaatctgtgaaaaatgtgaaaaatggcaactactttaatgtcttgtaccaggttaaaatttttccatcaattcggtgccaccatggcaactttctaaacaaaagagcaataaaagggtggtgctcattattcttaaaaatcatcattacagaaaacaattacttggtcagtactatgaaacaatatttttacaaaccctagccaagcaacaggaaagctgtcaccatataacatcatctatatgaagatccactgggctccttcttatttcatcaattgacttccctgttctgttgtttgaaatggaattaaatcctgagtatattgaggaaaattggggagttcatggaaaatggtcactttgagtggagaatgtatgtattttggaagccaacattaaagtgagggtatttttcctaacacagaagagctttaaggttgcctccatacttttgcagaaataagtgccttcccagtagaatttcagccaccctagccaattatcaggaattatttctaccttgacaatgaaataaaccctcaataaggaaaaaaacataagcacactgcaatttgaggaacccgtgtgtatttcagagtctccaggaacaatgtgttgttaaacaaaatataaaatgtgcaataaactttagttataaaggactttgttggctataaaattttattttactgctatcctcctatggctaaacatgttggagatcagtaaagtattaaaatatttaagatgacagaacatgaagcctaattctagaaatatagcagtgagaaagaatgacaaggggcagacacagaatgcctattccatcagctgcatactttccatcatttcagtgtatacttaatcttaaaagatacagagggtggagtgagcatgcgtggttgaccatcttaattacactctacacagagacaccagttgaaactgagagtgacaactttgtgtcagaatcacagtgttggagcaagtcccacgtggtcacttctttcttgcttaaacacacagtcaggatgttggagaattttcctgaggctcaacttactgttttcatgagtctatgggagcttataaaaatacatactgtttaaattttcctaaatgtgcatggaggcaaagatttttattctgaaatggaraacctcttgttttccattgttaaggaaagactttgttacagaaataagtctccctgtggaaaattatagttttcaggtgagctatccctactaatcagactcaaggttgattggaacattacaaaattgtatgattttttcctttggaataaaaattactgaatgagagaagcaaaatcctaaaaatgagaagatgatggtgttttctactgaaccatttccaaagtagaattagaaaattatttgaatattctgctagacttacatgcatgattaattaggatggcaccgccaaaaccagattccttgcttttagagtgtctgtattaaatttgaacttgattttttcaatctctaattttcagttatctacacatggtttattgtggttttgttgctttttttgttgctctgtgtgtagagacatgtgtgtggatatgtgtgtgtgaatatgtgtgtgtggagagtgggtgtctcattattgtattcttagtttgtagcaaacttcctagcacatagtgggatattaactaatatatcttaaagaaagacacttgagtacatttgcttttgtcctgtatttataaaagtaatactcattttagaaaaatataaaggagaataaaaaaatagacaaggaaactaagtttactcgtaatcttaccaaccagtaataatgttattaatcttttggtgtgactccaatcatctaatttatatatatatatatatgcatacagacagatatttctagaaacacacacacacacaccagacactcacaattggtttctgtattagttcattttcacattgctataacgaaccaactgagactgagtaatttatgaagaaaggaggtctaattgattcacagttccacatggctgaggaggcctcaggaaccttacaatcatggtggaaggcagagaggaagcaaggcatgtcttccatggcagcagaagagacagcgagtgaggggggaactgccaaacacttttcaaccattagatctcatgggaactcacccactatcatgagaacagcatgggggaaattgcctccatgatgcaatcacctcccattaagtcccttcctccacatgtggggattacaattcaagatgagatttgggtggggacccagaacaaaactatattagtaacaaaccaaatattcagctatgtagtcttttttcagtttaaccttaatgagttgaaaaatattctatcaaatgaaaaattctttataaagtttaccatgcccacttatgaaaaaactttaaaaccatgagctccacaagctagggttgaagaaagctcccctgtgtttcctttactggccagtagtgatgtttattgaacactcactaagtgatagaaactcttctaagcacttactcataatgtccaggtttaatctctacaacttttgaagtagatgccattaggatcgtccttttatgaactagagagtgtgacaaatttgctcaaattcatatagcaggttagagagctgaattttggacacagttttgctgaatctagaccctgaggtccaggtttgctgaacctagacttatgaacctctgggcatattactgccttccatggctatggtatacatctggacacgtctttagtcctttcaccctttgatcacttggtcctatttatcctgttggtaaaatgtctcctgttctccaacctcccatcaataccttaactcactggatctcaaccagggccagtttgccctcctggggacatttggggatgcctggagacatttttgtttgtcacaacttgaaggcagatgctactggtatctactgggtagggaccaaggatattgctaaacaccctacaatgtacaggacagcccctgcagcaaagaattatgcagcccaaaatgtcagtagcatcaaagttgagaatgctgccttagctcatttcctcaacctcttttgtctgaacataaatagccttctaatcagtttctttacctttagttttatccttatccacactgctgctatgactagctctttaaacacaaataaatcatgctgttctcttgctctgtttagctctgtcactctggatggctacctgggttcaaattatgattcaaacagttcaggatcatatgaccttgggcaagtgattcgtagcacctggctcaataatgttcttgtgaggattttaacactttgtagctagcataaattaagtcttcaataaatgctatctaccattttaaaaaaatctttgaaggctttctactgcctacagaagaaagcctatccttgtcaacatgatatyccttcactgtgttttattactcagagcctcttctctgggatactgccctggttgccctgtgtccagtcctgcaggactggaccctttagattaatggagacttgggtatcaggtgtctttgctcagactctgctgccagcttgggaagtccatctccagctcctccgcttggacacatctgtcttakccaagactcaggtcaaatgtaaccgtttctgtttaaccttatctaatagctagtcagatttatttactccttcccctacattttcacaacattttggttatatcatctctctttccatccatctatccatccatcctttgatcctttcatccatccacccacctattcattggctgtcatacatagtaattaagagggcaagctctggaaccagattttcttagttcaaaagtcagattccaaaaccaaactgagtaaccttgatcaagttacttgatcatgaagccttaatttccttgcatctcaaataagtataataatattatgtaattaataaattgacagtgagggttgaatgtatgtaaatcatttattatattgtctgttatgtacaaaccctaactaaatgttagctctcacccatttgtatttgttaaattcctactctgtgatgggtcctctttacatgatgccttgcattataataagttgtgcatgtgcccaactctccgattaggtgatgagcttgcagagtaaaggccccctccctgccccttaaaagtaatctcctctccactccagcacttgaaatataggtgaaaaaatcatttccatcaacatctagcctgtgtttcataatgtccttgctgggcagtatttctctcttaagatgctatgcatctactaacgtgagaagtatggccagtcaaaaggagcctgctattctcctggattggttgcatcctactcccacccctctcctcagcatttccaacccacatttcagctgcctctctgggagtcatacaatcacagtgaatctcttcctgattataataatggccttcagcctcctccattatsctggagctgaagagatgatgtcagtgacatattcctgtaggaagaactcagtgactgcttaattttccatgtaggtttttaatgctttgtattttgttaaaatccagatcacaatcttccactaagcaagtggtccaatctgattaatatagtacattctcctttgttgccaaacattgccaagggcaaggtattacttagggaaccaccccctcctccaaacatacacacatataaatgaaaaataagtagatctgtacaatcattattgagctaaaatagcacttagaaatgtatttttattgtgaaaaatggccaaataagagttgctgactatttgtagccctgtaatgtaagtcagataaattggtgcccagaagtctgacatttcaaaagcccaggaatatgtcgcattttttctggtatgccatttttgtaattctcccagctattttcctttagcaagaagcaattcttctgtgcccaagcagctcaattagagcattgtaaaagttgtcataatgactttaacataagtgcccctgagcaatagggataattttggaggggagcaagttccgctgttactttcctggtatggaaaatggtaatagcttgcttggagaagaaatgcaccatctgtaacttaactcagttaacctgctcggagaactaaaaacacactatctcacctgaagtggttttcctgttttggtcttttcaacatctttgtaccttctgtagccaacagcactctccttttcctctcagtgcacatatattaggtgactccacctctgtggtggtttataacagtactccccagccttttgggcaccaggcaccggttccatggaaagcactttttccacagatgggstgggggtgggggatggttttggaatgaaactgttccatctcagatcatcaaatattagattattataagaaatgtgcaacctagatcccttgcatgtgcagttcacaatagggttcatgctcgtatgagaatctaatgccctgctgatctgacaggaggtagagctcaggcggtaatgctcacttgcctcctgctgtgtggcccagctcctaacaggccacggattggtactggtccatggcctgggggttagggacccctggtttagaatatacctacaaattctccccttgaatatcaactggcctccgtgatttacttctaataaatagaatgcagcagaaattacactgtctgacatttgagcacaggtcagcggtcagcgcattttttctgcaartgctcacattgtaaatattttcagcttcacaggccatacccacatggcctctgtcacaactccatagctctgctattgtagcatgtagcagccatagataatatacagacaaccttggctattttctgatgaaaatttatttcaccttgaagccaccatgctagagaggttatgaggaaagaatacatagagatagaaagagatgctcatgaagccccagcgtccaagccatcttcccttgcaggtatgtgaggaggaggccttcaagatgagtccagcttagccaccatctggatgcaactacactgtgagacccccagtgagaacagattagctggtgcagtcaactcccagaactgtgacagatgatgataatgacaataatgatataatggctttgggatgggcacatgatctagacctcacttatccgtatattttaactccctgccaatattactttgtagaggaagggacacgtgcctcagtttgatccaatgagatgcagttccttgatcttgaggaagagtggaggaactctccttttgctatrtttctaaccagacaacctgaggctgctcgtggacattttgataccacatgggaagagcctgtccaagataataaccaacaaagaagaaaccagggcagataagcagagagctagagagacagattctgaaggcatcgtttgggtatcattacagagttgttcctgaacactaaccatgtgtatttcagttataggagccaattgtttaaacttttcattatagtaagatatatattcataaatcataagtgtataggttgatgattttaacaaactgaccacagccatgtagccaggacccaggttaagagaccaaagtttgccactcttccaactgcctatctcttgcctcttttcagcttttctccaaagataaccactagctttgacagcatatattagttgttttactttttgtgctttgttccaatgtaatcatacagtatgcactcttttgcatctgacttgttattttctcccttttatttttggttgacacataatagttgtacatatttatgggatacagagtaatattttaatacatgtatacaatgtgtaatgatcaaatcagagtaattagaatatccatcaccttaaatgtttatcatttctttgtattgtgaacattcaaaatcctctcttctagctttgtgaaaatatatgataaattattgttaactgtatttgccctatagtgccatagaacatgagaacttattcctcttattatctagctatctagctgtaattttgtatcttgaaccaacctctccctatccttccctgcctcctactcatcccagcctctataaccacaattttcctctgttcagttsttcaactcccacatrtgtgtgagaacacatagtatttatttttctttgatgacttatttcacttaacataataccttccagactttttcatgttgccacaaatgacaggattttattctttttaatggttggatagcttctattgtgtatatataccatattttctttatctattcatctggtgatgaacatttaggttgatcccatatcttggctatgtgaatagtgttgcaataaacatggggggcagatatatgcttgtaaaagaattgccttttctctgcatcctcttctgcatttgttattttttgtctttttgataataaccattctgatgggagtgaggtgatatctcactgtagtttggatttacattttcctaatgattggtgatattgagcatttttttcatatacttcttggccatttgtatatcttcttttgagaagtgttttttcagatcctttgcccacttttaagtcaratctttttttgtatgaattgtttgagttccttgtatattctggatattagttccttttcagattaatagtttgcaaatattttttctcgttcaacacattgtctctctctcatgttgattgtttcctttggtgtacagaagctttttagtttgatatagtrccatttgtctttttttgtttctgttgcttgtgcttttgaaatcttagycataagttttttgcctagaccaatgtcctcaagtgtttcccctatgttttcttctagtgattttatagtttcaggtcttatatttaagtcttcaattcattttgagtttatttttgtatatggtgacagacagggatcatttcattcttctacatatggatatccagtttttctaccatctctttttgaagaggttgtgctttcctcaatatgtattcttggtgcctttgtcaaaaattagttggctgtaaacatatggatttaatgctaggttctctgttactttccactggtctgtgtgtctgtttttataccaatactatgctgttttgtttgctgtagctttgtagtacattttgaagtcaggtggtgtggtactttcagctttgttctttttgctcagcatagctttggctactcaaggtcttttatggttkcatacaaattttggaacagtttttaaaagttcctgtaaagaaggtcattgatattttgataggaattgcattgaatctgtagattgttttgggtgtataatcattttaacaatgttaatttttttgttctatgagcctgatatgtctttccatttgttgttgttgttgtgttgcctcttcaatttcttttatcagcatttcgtggttttcattatagagatctttcaccttcttggttaaatttatatctaggtattttacatattttttgtagctatggaattgcagtttgatttctttttcaactagttctttattgatgtatagaaacactactgatttttgtatatattgatgcagtattctgccactttactagatttgtctgtgctaagggtatttatttatctttaggtttttctatatacaagataatgtactctgtgaagagggacaatttgactttctattttctaatttgaataccctttaattcttctcttgctaattactctagctaggacttccaatactgtgttgagtagaagtggtgaaagtgggcatttttgtctttctccaccttttagagcgaaggctttcagctttgcccygttcagtataatgttagttatgggtttgtcctatatatggctgtttttgttttgaggtatgttccttctatatttaatttgtttaaagtttttaaaatcattttataaaatattttttctgtgtttattgagatgatcacatgatttttgggttttattctgttgatgtgatgtattacattcattgatttgcaaatgttgaaccaaccttgcatccctggggtaaatcccagtttagcatgatgtattatttttttcaatgcactgtttgattcagtttgctggtattttgttgagaatttttacagctttcttcatcagggatattgtcctgcagttttctttttttgttatgtctttttctggttttggtatgagggtaatgctggtctcatagaatgtgttaggaagaatttcctccgcttcaatttttgaaatggtttgagaagatttaatgtgacttctttagaagtttggaatttagcagtaaagctattcagactaggctattctttgttgggagactttttattaacaatgaatctcattaattattattggtctcttcagtttttctatgacttcctgattcagtcttggtaggttatatatgtccaggaatttatacatttcttgcaggttttccaatttgttggtgtataattgttcataacagtttctaatagtcctttgtatttctgtggtatcagttgtaaagtctccatttttttgcttctgattttatttattagggtcttctccttttcttaatttagctaatggtatgttgattttgtttatcttttcaaaaaaacctgctttttgctttgttggcctttygtattttttttatctcaacgtcttttagttgtgctataatctttattatttttttccttctatcagttttgggtttggtttgttcttgcttgtctagttccttgaagtgcgtaattaggttgtttatttgaaatccttgtacatttttgatgtagtcatttattgctaaaaatttccctcttagtactgcttttgttatatcccatgagttttggtatgtttctattttcatttgtttcaagacttttttttatttctttctcaatgtcttcattaactgaataatcattcagaaacatgtttaatttgcatttacagttctgtaagagtctcttaggtccattttgtctatagtgcagtttaagtccaatgttccttgctgagtttctgtctaggtgatttgtgcaatactgaaagtgaggtgttgaagttcccagctcttactatattattagagctaacttgttatatacctgggtgcttctttgttgggtacatatataattgttatatcttctttttttattattatactttaagttttagggtacatgtgcacaatgtgcaggtttgttacatatgtatacatgtgccatgttggtgtgctgcacccattaacttgtcattaacattaggtatatctcctaatgctatccctccaccctccccccaccccacaacatatatcttcttgctgaatttgtccctttatcattatataatcaccttcttgatttcttttttttttcacttaaagtctgttttttctgatataagtacagctgtttctacatgcttttgatttccatttgtgtggaatacctttttatatcccttaactctaagtctatgtgtgtatttatggrcgaagtaccttctcacaggcaacatatggttgagttttttaaaacatctattcagccagtctgtatcttttaaccgggaattcaaactttacaatcaaggtttttattgatggaagagaacttactcttgtcattttgttcatcgttatctaattattttatatatcctatgttccttcatttatgtcttgtgatttatctttgtgatatggtggttttctgtagtaatgacattctccaggtgtcaagatgatgttttactttgggacctcaattttctgatggatccaagaaaagccattgattttcartttgatcagctttttattgttgttttaaggatggaaatgattggaatgtgactaccactttacatatcagaactgaaatgggaagcttatacattaaagttttagaggactcactttttattctttttggaatcttttttgtgtttttttgatactaatttacaaaattcgtgttttttagtacggattagtgacactggaatgatagtcaagtcacttttaacttcattgttctaaatttcttttaaaaaattgttttgaaacaggttcctgctctgtcacccagcctggagtgcagtaatacaatcatagctcactacagcctcgaactcctgggctcaactgattctcttgcctcagcctcctgaatagctgggacaacaggcatgtgccaccacacccggctaatattttttacgttttgtggaagtggagtctcactatgttacccaggctggcctcaaactcatgagttcaaaacatactcctgtcttagcctctcaaaatcctgggattatagatgtgagccaggataactggcccattattctaaattccaatcattcatgagtctatgaaaaatttataacaaatgactactttggagttcaataagctgagtaactcagcctcagtcacacaactaactaaccccagagaagagacccaaatctctctggtcctctggacacattgctcagtgatcttgcctctgcatctttctaaggtctggtttcactctataattttctttcaaaccatggtatgactgtgaacctagtgtactttctgttatcttgttggggaaaaattataatacataattcaatagcatacacattatttgctttcctttgtagattccagggagtctaccaacttataacacattaaaaaatcatttaaaggtattagaaaggtattttttggttgagtaaaagtggaaatgtatgaacagtttaaaattttttttttggttgttgagtgatcttcactttgaatactgaaggagtctgatttcattctattggtttttcaatgacaggtatgtccttaaaattcaactatttatttaggctgtcactaaagaaaactgctgacatggtaaaagcccatggtataagtaccaagcctaaaaatatgtggagtgtttagagagaatataaaaaaaaaaaagatatgtaaaagaatgtgaattaagccagcagtttgtctttgaaaaagagagtgttgatttggggcttctgatctgtatgctaccccatttctctactgatatttctctactgatagtaaagatgttcaaaggcacctaaaagtctgaactattaagaagctatactccaaaatcaatgttagttttgtctctcactccttcacagacaggctttttttttttttttttwtttttttaaatcaattcctgtttggggctaattgtttaaaagccatgacttcattttcaggttaaatacatgtctcttccattctgagaattaaaaaaaaagaaaagaaaaaaaaaacagtctttgagtactatgttcaatttactaaaaatatctagaaaactaaagtattcccaaaggcaaatctttggtgtgacagatgtaaaataatatccacaagctgaagggtctgtcttagaaaagcattctgcaactgcttcaacaagagtactgggtgtcatttataattcatgcaagtatattgaagctttctgctgtcgtccaagaaagatggttttcaaagctacagagtgcaataatccaatattccttgtagagagtcccatatatctcatatagattttacactggagatcatttccatgctgatgacctcaagaatacaatgtgatattttcagaaaacacagatttatgctatgtgctatttctgtgggcttgggggacaaccattagatcattaagttgaaggtatatttctagtcagacttaatccacattgcagtggtcactacaaaaaaaaatgtgtatctaaatgcctcaagaacttcagtttttgtgttcaacatattttgcagtggaaaatgagtttgatgatcagagtgtactcctatagaaggcaaaatgaccatgagaataattagaataattcaatcatttcttcttcttcttcttcttttttttttttaaacagagtcttgctctgtcgcccatgctggagtgcagtggagtgatctcggctcactgcaagctccgcctcccgggttcacgccattctcctgcctcagtctcccgagtagctgggactacaggcactcgccaccacgcccggctaatttttttgtatttttagtagagtcagggtttcatcgtgttagccaggatggtcttgatctcctgacctcgtgatccgcccacctcggcctcccaaagtgctaggaatacaggcgtgagccactgtgcctggcctcaatcatttcttctaaagtacaggactttgaatatgagatcagcttatattcaaaatcaatttaataattaaatcaaatttaaatattaaattatttgcaggccaaaagaagtgagcttcctaaagtgacacccaatactcttgttaaagctgctacagaatgcttttctaagaaagacccttcagcttatgggtgttattttacatctgtcacacaaaagatttctctttggaaacaatttagtattctaaatatttttagttaattgaacatagtactcaaagactgacttttgttgccactatgagaacatggtaatgtcacaggtcaaccaataacaggtagttattacaggctctgattaacactacagtgcatttgaagaccacatagtcagaaaataatcaaagacattttcaatagaccaatgtgtgcaatataatctatcataaaaatccagttatgagaaattctccatccacagtaaccttttgagtagcacctgcccttcaatatttccctcctttcttttcaggatttcatcaaatggtctgctgcactgtgctggaattttgaactccccagagtagtaaacaacatcttctcaagggtatacaagtcatcagatagagaaaacacccattatagagctgtggagcccttacgatatagtgctatgctgcaacaaattagacagaagagtatttgttgaataataaaaggtatcaatgaacgaacaaataaattaatgagctgatgtattgattaaatgaatttacttctttcagatttacttttccaaactaaaaaaaaattgttttaaactttgttccaaagttatacagtttttacaaaaataaaactttatttttgaattgctttatatttacagaaaagttgcaaagatatggaaagttgcctcaccctataattagcttctgacattagtatggtacatttgtcacaattattgaaccagtattgatgatatgttattattaactaaattctatactttataaagatttcctcagtttttacctaatgccatttctctgttccaggaacccatcccagaaatcacatttcatattgatatcaagtttcctaagactcctcttcgtaggtacagtttcagggccaaaattttaagggccttgagtgttttgagcagtactggacaggtgttttttaggatgtccctcgactgagctttgactgatgaattgctcatgattgaattgggactatgggtcttcagaagaaagatcatgagccctttttgtcacatcatgtcaaagataccatgccatcaatacaacttattactgatgatgttgacattgaccacttgactgagataacatttgtcagatttctccactgtaaagttacttttccccactttccatactatactcttttgtaggaagtcactatgcacaggccatacttaaagagagctccatctccttgagggcagagtaactacattaaatatttgaaatctttctgcccaggagatttgtctatttttccaatttatttattcaatctattattattatgttagatatgagaccttgctatgttgcctagatgggtctcaaactcctgagctcaagtaatccttctgtctcagcctcctgagcaggtgggactataggcatgcaccactgcacctgacaatcatttattgatggcagtatgaactcatggacatttgttttatccttaagttataacccaatattatattattttattgctaaattatttcagttttggccattgaagctcttttgtttaatgcccatgtcattttgacatacctctatcattgtgggatttctttttacttttttgcagatatttctttagtttttggcactacaagaggctctagtttcatcatctatcctgccccagcccaagattcaaccatttcttcaagtagcccttgctcttttttactgtacattgtaattaataatcaagttcttggcactaggttcttcagaaatttttttttagtttatatgtttgttgataaggtattgataaagattctgctagtgattaccaatgtaacttttggcaaattatctgaaacatggaaataataatttctacttcataggactgttgtacattttaaatggattcactaggatagtgcacggagtaaaaggaaacaaatagtaactctaaatggtattattacaaattcattggaaataaataaatgtaaatttgcttccaaaagtcaatctgaattctctggaagttttgtttctgctttgacatgttttcattgctatatacgtagactaagaagttagagactctgattctaggcctagctcggttgttaaaaagaattcactccagtcatctaatgcctcctcttttaaaatgggtataatactctttgctgactttaaccccacagggttagtctattggtgtaattgatataaaatgaagtttatacaaatgtataggtggcaatattaccaccatttttgtcggtatcataggcctctgattcattcattgctctttgcagctccattttctttctccttttcttaaaaagtgttgaccatactatcttgaatccatctatttattataaactttaattatgtcaggttttgaaaaactagtattcaagtttagacaacacaattgtgttcaaatgctattacaacgaatccacattgcacaactattttagagacttaaaatttagttaacatttttctaattagttcgcagacagtagtaagctggtgagcccacctagttcttggtcttgagaaattttcattcaactaagcataactaagcctactgagttactaagtcataaagaaagtagaaatatagatgtttgggaaagtaagggatagcaggagtgtggggcatcttaaaaatgccctagtatcaaattattgatgcaaagcagttggctactgtcttaaaaggaagggacatcaaccatctagacaagatcaaatatcaaagccgatgggtttggcaaactgatcatcttgttttcctcttaccaaggtaaagcaaggtgcttcgacacacctgatagattacagactgtatcaatatcactatatgagtaatgttgatctccataggatgtgtcaaccttcaaaaacattttaacaggtttatgtaattgtttgctatctcgttgttgggcagtatggataagaaaaagtgaatatttagctctaaatcctttgagcctcacttccttcaaaatacctgtcagatcatctgcaaaaattcactctaattgatcttaagacttaatggcaacatgttgagaaggagaattgaactgggttcccatgctaaatgtgtttaaagtcacttctctgatttattttctttctttcatggacagcaaattcaaacttaactatttgtacgtatcagtgaataccttttgttatgggtgtaagatttatttgcaaatcggcaaaatggttaatcaaatattttgtgtgcattatctgatctcttaacctttctgtgcatctgattcataaataaccaaatatattaataattctttttttttttttgagacagagtctcactctattgcccaggctggagtgcagtggcatgatctcggtacactgcaagctctgtctcctgagttcaagcgattctcatgcctcagcctcccgagtagctgggattacaggtgtgcaccaccatacatggctaatttttttgtacttttagtaaagacggggtttcaccatgttggacaggctggtcttgaactcctgaactcaggtgatccacttgccttggcctcacagagtgccatggccagccaataattcttagtaatccttagatggatgtggtcttaactattaacgcatgtttattttagatttgccatttcaacagatttattggtttcttttttctctcagcctcctagctacctttaaaaaattgaaaatggaatcccatacctgcataaatattaagggcaaattaacttcaaggctgtgtagagacaggaagactcagatccatatttacatgttttacctgggaatgggggtgggattcagaagaatagaaaagataattgtttccccactgattatacttcctgtgtttcattttcagttttccaataataacatagaaaaaaggaagaatttgagagtttctcagattaggcaattccttgaagaatctgagaacacagaagctcccctccctactttccatgattgaaatcagtgattcattggtttctttgtgtgggcttttgaaagatcattagaaaccaacctgaagatcatgagattcttgtggacacaggagcaatgagtggcaatacagtgctttctaatgcaacctactttaaaaggtaaacagataaaagaaaataccgaagactgaaaatgcagaaaattcaaccatgcagcccattccaaattaaatatgtcttcctctctaattcctctcttctagcagagaaggggagatgagctatgactccatgctcatgcttaacaaaattgtgttagattggtgcaaaagtaattgcagtttttgccatttaaaagtaattgcaatgttatctcctagaatttttatagtttcaggtcttaagtttaagtccttaatccatcttgagctgattttttgtatagggctggacgttcgcttaggcaaggatttcatgaccaacaacctgaaaggaaatgcaataaaaacaaagataaatagctggaacctagttaaactaaagagcttttgcatggcaaaaagaagagtcagcagagcaaacagataacaaacagagtgggagaaaaccttcataatctgtacatctgacaaagtgctaatatccagaatctacaatgaactcaaacaaatcagtaagaaaaaaacaattccatcagaaagtggctaaggatatgaataggcagttctcaaaagaagatatacaaatggccaacaaacataggaaaaaacgctcaacatcacaaatgatcagggaaatgcaaatcaaaaccacaatgcgataccacctcactcctgcaagaatggccataattaaaaaaaaaaatcaaaaaacagtagatgttagcatggatgcggtgaacagggaacacttctacactgctggtgggaatgtaaactagtaaagccactatggaaaacagtgtggagattccttgaagaattaaaagtagaactaccatttgatccagcaatcccactactgggtatctacccagaggaaaagaagtcactattcaaaaaagatacttgcacacacatgtttatagtggcacaattcaaaatagcaaaatcgtggaaccaacccaaatgcccatcaatcaacaagtggataaagaaactgtggtatgtatatataatggaatactatgcagccataaaaaggaatgaattaacagcatttgcagtgacctgaatgagattggaaacttattctaagtaaagtaactcaggaatggaaaaccaaacatcatatcttctcacagatatatgggaactaagttatgaggactcaaaggcataagaatgatacaatggactttggggacttggggggaagggtgagaagtgggtgaggtataaaacactacaaatatgctgcggtgtatactgcgcaggtgatgggtgcaccaaaatctcacaaatcatccctaaagaacttactcatgtaaccaaataccatctatacctcaataacttatggggaaaaaagtaattgcaaaaactgcaattacctttgcatgaaccaaaggcctactttggagagtcagaggaattcttaaccataattcaaccaagacatacggtatgtgccttctctttggtggaacagtgaatatacaggctactagcctgtactgagtgtttcagccaaaacacattcttttaaaagtcacagttttaagtgacaatatcccaatgaaaatacaaattaaaaaatgcattggcatatctatattccctcccaaaataacacacatttggaatatataaagaactcttaaaagtcaatgagaaaaaaagcaatagctcagtagaaaagtgggaagaagacttggacacttcagaaaagagaatatattaaaatagtccataaacagaaataaaaggtgctcaactttatgagtcatctgggatatgtagattaaaaccacagtgcaatattataccacccctaccagaataactaaaaagagtaagttggaaaatactcagtgctgatgagaaagtggggtaattgaaactcttatacatcattctaggaacatccacttaggaaaacaacttggcagtgtctaataaagtccagtatatgcattccctataacccagaatttttactctcaggtgtatacccaacagaaatgcaggtgtgtgttcaccagaaatcatgttcaagaatgttcatggtatcactagtcatgaggcacaaaaactggaaatgttcatcaacaatgagtaggataaataagttgtgttaatatttatacaattgaaaattatacagcagaaagaataaataatctaaacctacacacaacagcatgaagaaatctcatgagtggaatgttagatcataacctaaataaacttacctggagcaggtgccactgaagccataaaatggtaggatgaa

SEQ ID NO: 96687 - DNA, 321568 bp, Homo sapiens
  misc_feature (1)...(321568): n = A,T,C or G
atatctgtggttttcattgaaggcaacagcaaagtttaaaacagcattatcaatatcttctaccaaagagaagagcaagagctgctaatttaactgcacatggaaaaactttataacatttggaatcacatttagatattcctctttggttgtattcttggaaaagtgctcagcaggcagcaagtctactcagttctctctcctcatgggctgtctcagataagtacatggaaatagcttgggaagaaatattttctctgtctgtacaatgtattaactgatattgtagcttactacacactgcttgcttcctagctgaggttttaagatgctttgcattatatctagaaggaatgtatagactatcatctgaaacaagataccttttaaaataaaattctattaataattttcttgggaaaataggcataatctggactgttccaggcatgtaggttttgactgcccaatttatagcctcaaatatttacccaaattttaatatttttatacaaagaaaacacagagggataagcctttgatatatagttgtggtactcctaataaccaccaatgggaaatgtttaaactgaatgaaattaaccttattatttgcagtgactcatcaaccatacaaagcaactagtgaaaaagttcactaaagtctagaatgtggccattgagcacttgaaatgtggccagtgagaaactgaatattttattttagttaaattaattttaatatgaaagctaaagcagtgtaaaatatttttctgttaaacacaactttaaatttttataagattttctgtattgttaatccaaattcaagactgtcttgaaacaaaagcaatacttgtcaaatatcccataactgaaaacaagaaaatggcaggatgacgtgttttttcatccatatcatgctgaatggaaaagctcatttattaccttaataaactgctactagactttatgttgaaatgaaaactttccataatgcaattcaataataatgatttacacatttttctaacatgaatcaatatgcagattttaattctaaacaacagcatttatataaattggctacaaaactacaagaaaaatagttgatattaataaatttagagttgctttgcaactcaaacttgaatttgatattaataattttaagttgacatgagctatttaaatatacttaacttggagagatagagtttttaagttgatatgtttttacttcaaagtctaatcaatttttctaaaaaagataaataattttgtcatagtagatgcaaatataagagaaaattgtttatttatagtcaattcagttactgaaacttttaaatatgtttcaaacaatttaggtatgtgaaactactcttgtaggtgtaaattttatgaactctaaaaacacctcaagtgtgtctaatacaaatttagctccagaattaagatcttttatacatgtaaaataaactctggattttgaaggtttacaaaaaaagataatgtaaaatatctcatcaataatttttctaatacatgttgaaataataatttggataaaatcgtttgctatttattaagttcatgcaagatatcatagaagtaatcactactactagattaaaatattaccttggcctgtaaaccttgtacctaatggagcaggtaatcattattacttcaatttgagttacttgccataattttccatccatgctggttgcctggtgagatactattccatggagcaaatcactggtgtttgctctgctaagaggcaaactttcataaggcagccaaagatgaaagtgagtaaaaagtgtagttttgtaccacagcactaaaactggaggttgccagaattttaaataatgatttttaaaagctatcacccatttagcaaaagtacttaaacaaaatatgaagatatcaaatatctgtaatattaataacattaatccacaactacaatataatttcctaaaagatgacttgagaattatgtttctttagcttctgccattaaaatgattagtttgactctaggtacaacacacaacaatgaaaagtattatatcatacctctctgcttttgttgattttaagtgtccaatatatgtgtcttcaaagtagtcagtcatatattgtgtttcttttagcaaaagttgctaagtagagtcataggaaagctaagaaaaagcatattatactaaaaagaaaaaataaaaagagaacatttagctcaaggcaatattaaattcagcttcctatttttttcaagcccctttcccatacgttaatccaaatacattcacatcttgacgaaaatgagaaaaccactacagaggttgttagtgatagtttcccgctagtgtccattaaaaagcaattaaaagtattaagatatgaaacttccttaaaagtctgaagtagatttatttttctgtctggcagttattgtaataacagcaacaagtagtgactatgcagtctataatgacttaaaggagttcaaatatagaagcaacagtcttaaaagtattgttaggtctcaaaagaagacatttacacggccaatgaacacatgaaaagaagttcaacgtcactgatcattatccaactgaattaccatccggtctatcttcatttaagtattatcctcaaaagtcttgtatatcttccagcaaacagatagtgaaccctcatagtctctgagaattctaactttgattctagttgccagggaaactgcgttgaacatgacaaaatttctaccctcttggtgcttaaattctagtaggataaacaataaataataaataagtaaacaggtaaaaaagtgagattacttctaaaagggattgagatgaagaaaataaagcattcatttttccatcatttaatggactagggagtcactgggtggctattttaggtcaagtggttagagaagacctcttttaggtggcttttaagctgatttgaatgaagtcattcaaggagtcagccttgaaaagatcaagaataggaaaaaagtcaagggaaaaggtcaaggtgattaggaaaaaataaatattagacatgggggctgtctcacctatcttgcaatcctaggtgatctagtcattctaggtcatctagtcattcttacctttccagaaagctgcactactgccaagtagtcaaccaaggacccattatgctattaactgtgaaatcagatgtaacccatggaggttggggcgtaatgagaaattgcaaaccactatggctatttccattcgatgaccatagcaatccaaaattctggataactgtttttgaaagagcgtatgatcatagggagaaagaaaaaagacaaagataaatgcggattcacaactgcaggagatgcaagcaaaaacgatgctgtatacacagagaacagcgtaagtaaaggttttcttctgccatagataagtggaaaatctgaggatgtgttcaaggaaaagaaagatattcagtttagcgaaagcacagaacaaatgaagacacaaatgtaagtgataactgtaggatgagaatatattattgaacatttttatgccaaatgaatgaatggaacttaattctgtatgaaactgagagctacagaaagtttttgaggatagtaatgacatctagaagctgggtgcagaactgggaagtaggaagactagttagaaagctacggtaataatcccagtaagaactgatggcctgaactggtgtgatgatagtgggttatcagaatttattaacattagtgtcactaaagttgatacacaaccctccactgctaaatttgactggcttaaaaaaaaaaacctaatggcttgaactcaagtagtgaattcgttttttggcaattactctttgaaatgttaaacgttcacagtgggcagagtgcagtgaagagaaagttccgaccttaccatattctgttcactgttttctaccattgctggtggaaatggaatttgagcaacttttctgttgtacaatctgatgtgactggatgattcaagagacaatggagaaacggtcaaaaagacctgagggctgataggtatcaaggatgagaaaaaagaagctatagaagataattatgaagtttcaagtctcattgtccatgatgatcaaattattaatagaaatgaggaagctggaaaggatggaaaagagcaggagagcagactcagaagaccatgaaggcctgcccttgcttcaccgttgagatgataggtaaccttgggcaaactcacttgaacttagtgtctgtattaacgtgtataaaatggtggcagaggacagttgaaatagattactgcaaatgtactttccagattgacgattttgagattttagggctatggctgtgaatcacattaagcttttaatttcagagaaatctgaacttttaatttcagaaaaatcataaacttcaatgtataattgtacactatttccccaagataaatgtctgctttaaatggcatatttttaaggcttttgacatagtatcagactgtattatgacaaatttgtctagtacacttccatcagtaatataccattgtgtattttgctgtatccctgaaaaaaagacatttttacatttacaaaagtaattcctaacccggggaacatggcaaaaccttatctctacataaagtatacacacccacaaaatgagccacacgtggcggtgggcacctgtagtcccagctactcaggtggctgaggcaggagaatagcttgagcctaagaggtcaaggctgcagtgagccctgatcgtgccactgcactcttgcctgagtgacacaagaccctgtctcaagaaagaaaaaacaaaaaactcaacaaatgaaaaatagtacctcattttaatttgtatttgaatataaaaaattaaacacatgcttattggacttacgtatttctttttattcaagaactctatccaatatatacacattttccttttggcttttgtcatttgtgtctttaagactttgaataatgtttttaaataatattaactttaatctttcatacacctttcagaaatttactatttgtattttgttttgtgtattttgtaacacacaagttgtaaatgattatgtattttctgttcaattccatctttcatttttatgcttaaaaatgtcttcttagtcatatatgcccgtctacattttcttctagttcttttattagatatatctagtattaattcgtcacccatttgatacatggtaatttttttcatgatgtggacatgaagtaaatattctgatttttaaatgtttccattataattggctaccattgtcaattttcttattggttctgatacttattcggtttcttagttttccaggtaataatttatctgcaagtcagcgtaacttaattatttgttttttaatagttcagtattaccattgcctttgttgtttcattgagaacttccagtacaatgtcaggagggggaaaaaaacaacggcaatggcaccaatccttctcttgttgttcatctttatattccttagaacatacggaatgcgttctgacatagaacttattgaagagtaatttggaattttctgatgaatcaactgtctttaatctttacaagtttgaaaggtatacgttattgtttccatttcccagatggagaaattgaggttcaggaaggttacacaaagtcccaggtctaagaaaaatgtctcccagattccaaaagatgtttctattatgctaatagtggccgttcaagcattagaggaaaggttgcccgtggtatcgctggtaaattcttcttcccactttcaaatctagaatagtaaaacagcaaaaatcccaacaggcatgagagttatcgcagtagataggttaagctgcttctctgctgtggtcaacgtcagctctgttgcgaggcgggttctcccaacaatagcccacaccatttccaggcttttctgggcgaggggcagggcgcccggcccccaaagcgagaagacagacagccccggttctccgcagccccaggtttgctcctcaaggacggaggggcctctcagctccggccgcctcctttccgccccctgcaggccggccggaggaaagctcagggcccaggtcggcccagggagcacggaaccaaagagcgctagcgccggttcggccgcctttccagaaagcccgggccgaacggccccgccgcagagactcagcgcggatcgctgctccctctcgccatggcgcaggtgctgatcgtgggcgccgggatgacaggaagcttgtgcgctgcgctgctgaggaggcagacgtccggtcccttgtaccttgctgtgtgggacaaggctgasgactcaggtgggttgtctaaacgccaaaacctgggaaaagaggactgccgggcaggctgctgaggtggtgtgggcctgcacccaagaaagtytaaggcgaaaacgctataccctcagctccctgagcggccgtgtagcgcggcccatgcgccgagtggcgcgcctcgtcacgtgatcggggacttccgccgcccgggaaaaggcccaagaaggggcgagggtgggggcgagggtgggggcccggcaggagtaccccgcgctctacagagggagacctgagacagcggcgtgggaggggccccgacccgagtttgcaaagcttgggcctactgctgtccctaataaatagattttttgtcttggtctgtctgttggctttgcagctttctgcagattatgagactcccaaagtgatcatagaccaagattttctgaagatctagtttgcagaatcctgtcattctcatgaagattgactgtatgaatgaaagagcattagttgactcatttattctgacatttctttcatcatttttagttttatccattcwctgactcctattactaaatatatgcactataatggtgctggacactgttacattgttcatgactccttctaaaatctcacaatctgatcaaatacttcaacttaaaaaagtttcttaagatatttttgaagtaatctgtttggggtaacctaaggtgcattgaattaattgctaaggctcattgtcatgcagtaagacattttcctgtggattaattcaagggggaagaatgactacagcctgcagtcctcataatcctcagtgcacagctgacttgggtgctcagtacatcacctgcactcctcattatgccaaaaaacaccaacggtgagttagttgcaaggagtggaatcaatcttagcagttgtgtgatgtcatagggttgttgtgaagattagattagctgataaatggaacatagtaagggctcgataaatatcarttgctatgttggtgttatggaagaaggcaactagctgtgatgggagtcaatcttctgaaccaaatttaaaattgatatactaaatacatttgtttgttttcattaactttacttttaaaatatgcttacagagaaataggcctttgactaaagtcagcaaacgacctatggattctcaaaatatttctcttcttcacctgtattataagttttatttaacacaaattatacattttatttaatacaaaatattcataggaagatatctaattttgattttgaattataacctctgagaattattgaaagaaaatatagtcttttagagctattcatggtatataattacattaaatatacatattgatttatttcagtttttatgatgaactgttagcctatggcgttttgaggcctctaagctcgcctattgaaggaatggtgatgaaagaaggagactgtaactttgtggcacctcaaggaatttcttcaattattaagcattacttgaaagaatcaggtgggagtaagattttctctgcctaaattttaaaattagcatttaaaaacaagttacacacatagttacatattaatrctatacaggaaattataaatattaggtgctctatttgctgatcaatagctagtccttccccaaagtaatcattgataagcttccagtgtatatttccggaacaatgtttatgcatctctctattgagctacatggctgtctctatttatctataatatagatattatagatgtatatatatatatatatatatayayacacacacacatacatatatatttctttatatttattcttttaaaaatataaaagggaataattttgcataaatgattctataccttgtttgactcatatcttggatctattttcatatcagcaaatttagtgtaatccattttctttaatgattgtctagtatttatgacatatgcgtaccatcacttatttaactattagctttctggtaaatatttaggctgtatggggttgggagattgttttggtttttgctaatacaaacattgatgcatgtctattgttgacatgcttttggaarcatatctttatttaggatcaattcctcacagaagaatagctatgtcaaacgatatttgcatttttaacttagctaggttgtgctgtgtattaatcttaaagaacatctcaccaatagtgatgagaatgtttctttccccacatttgggtataatggaaatttttaatttttgccagtgtaataggttaaaaattggatctcttcgtggttttaatttgcatttctttaattacaaatgagtttatgcattgtttttgttttattagccagctctttgcagttttcttctgtgaatgtcttattcataacctttgcccattttctattaggattttcatttgttccttatatattttatgagcgttttgaaaatggaccttttaaaaaagaaaatagaatttttcttggataattgatgattatttttaaaggagaatgaagcttcttgataaatcataattcagttaagtacccaagttgagataactgagaaaggatataggctaagaatttttttataagccatttccagcataattactgttttgatctttatcatcaaatattacttattgagaaccccaagaatccttgacactgggcatcagagaggtcagtaagattgaataaacaacatgagaacataataaataccattctggcttagaccatttctccattcgagattcagtatatagatggtatgttagactactccagagaaacagaaccaatagggtatgtgtgtgtatgtatgtgtgcatgcatgtgtatatgtgagtatggataaagagagagatttattataaggaattggctcacatgattatgttggttggtaagtcccaagatctgcagggtgatccagcaaggtagacacccaggaaagctggtggtatacttctagtccaaaggctggcaggctcaagactcaggaagagccaatgtttcagttctactctgaaggctggaaaaaagctgatgagccagttcaaaggctttcaggcaggaagaattctcctttatgtgaaggaggatcaatgcgtttgtcctatgtaggccttcaactgattggatgaggcctacccacattagggagggcaatctgcattacttgatctactgataataaatgttaatctcttctaaaaacrtgctcatagaaacacccagaatagtgtttgaccaaatatgtaggcatcctatggccaagtcaagttgacacataaaattgaccatcacagatggtgacactattggacgttttgtagaatgttactatcagcttcatatagtgtggccatatcactttaaaaaatctcatttccaccatgattttcccctgacccaggttggatgagtatacctattgaaatcatcaggtacttactaactgatatgcgtgcatgcatgcatgtgcaggagcttagaaaatgatatcccaaaatggagccctcagaagtagctctctctgaccttctcctgccctcctatctctggccttgcattcatccctgaggctagccctagaaaatagaatctcttttcccaaggcaggtcgtagaaataagaaccccttttccccccaaaccagccataaaacctaaaactatcactctagctttcccctgccttcctttgtaaaaactggccataaagaaattatctgacctaccgtgtttgattgtagctcacaacagttccagagagggtcatgacctataaccataaagaaagaatgctgcacagagaggacaagaagaatctagacagacaggccttggtgggttttaccagtttgttagccatagatataaccctttgtccaatcatattgctgcagagctgtccatactttgttgaatctaagcataaaaatggactcctgtatctttgggtcttcagtctgaaggtttcagtgtcatgcaaaactatgattaaataaatttgtatgctttttctcatattagtatgccttttgtcagttgatttttactgaaatttcacccctacacatgcatatatacatacatacacatatccttttgttcaataaacattcattgaatacttaccataatgccaaacattgttctaggtactaatgatacaagaaccaatgtccttgccttcatggagttgatgtcctggcagagaaacatctttgaatacattgcatctatctccttattttgttatgtgtttgggggaatacatacgttttaacttccaattttgctttttaagcttttcagagaagagattatttttaattccttgtacctcactcagaaactaatagtacctcctacatagtaggtagagtgatataaatgttaaaaatttattttatatcaagttcatggtctatttaacttgagtttatataaatttttctttgtttattttaatgctatttaatgttattcttgtaatacttcgagattctcctctaccccgatctattatctataggatttgttggaccctatctataatatttttaattttataattatatcccttttaaacattctttaagkccctttaacctttctattctataaatggtccacaaaaacattttggtttttccacactataagctaagacagtccctgaaatcagaatgacctggattccagttaatgtcctaccatccctttctgttcatgtaatattaggaaagtttaaaatctgtacctcagttctttcattgaaaaaaatgagcgtaatgaaatgcaaaaatgagggtacttactacagaatattgtaatggaagttcttgctacaaagtgttgtgaggaatgaaagatataatgcactcaaattcaagcaagtagtaagccagtcacatagtaatctcttgaaaaatgttagtttaaaaaatattgtacttgaatgaagctgaccttcatatattccttactttaagaaatcaaattgccaactattttcaaaaatactctatattttggaatctagttgagtttaaaaccccacaatctgatggaccaaccagtggtcattcagattgggaccagactcccagggcaattatttgtctgggatatgcctaatcaggcatgctttagaataggttcaaacctttaaagccaatatttaactagaccaatttcccagaacaaatagtaaaaggtaaaggaaatagatgctttcttcttgaccttatgttctattttaatttattgtccgatgtgttcacattaacctcattgcagagaaagctgtatttattggcatcaatttcactgactgcctgccttctccattaatacaatcttcttgagtgagtgaaacatgattttcttttgttctttttttatactagttgtcattatgctggggtgagaattgacaatagcaaaagtgattctagctatcagttattaagtgctgactatttatctaatactacctgaggtactttacgtatgtagtttctaattctcacagtaaattttcaagggagttaatcatcatccctatttgttaatgcgaagaatgagactcaggtactttgtctaaggtggcttggctagttggtaacagaactgaagtgcctttgcaattaatcatgttgtttttttctattaagtctctcatggagggcaatgagaggtgctcatactctccaatttaacatctattttgtagagccttctctttccttattgattattttcctatagtatgaagattgtacccatcccacctggtgctacgtgtcagtagacacatggttcaatagaacaacctcatagttccctgtgcccctagtttccctctttcatcagttaattcctgacatagggggaagtggatattgaagagtaataccaccttagttctttatgcaacctgggaaattggtcacctgatggttcctgcctatgacatggaaaatgatgggccaggtccttttgcttttgaataaggtcccatgttactaaattattcaaaaaagatgaatttagcttccaggacacagagtgagcagcttttatttagcttgtcctaccaatagggagggctgttgctgcatttatttgtttttattttatcatctacctaaaaaggacattggctagcgatccagaaagtcaacatttgcaaagtaacctgtcaaaattgacaagatcaatttattagaaaaaaatggtttaggtggcagatgccattagctaggatggcttctgtattgtaatatttacttttattattctctctctttttacttttgtgcctattttctttctaaaattgatagaggggaagtgagtctgggtggttctgtctcaaaatttctcccagcaggtgatcctggcactcatccgtaacgatgtcctttttagagaagctagaggatggcatgaaaaccaggttaagcattcttctatttacttcaagctgtgtagtcagttagagatggttcacatcacttcaggtcccacctgagcagktctgactgctgctcactaaaacctatttgtgggaaatcataggagaaacataaacttggattttctccttaaaatggaggaaggccagggataaaattgaataaatatataacagaaacacatttgcctttgtaaaatgtttaaaccttcttagacttctgatatctttatagctatctgaagatcattttattctaattaaatattatgtgctggggaaacaaaagtcaataagagacatgatcctggcctctgttaatgtagagtatagtgggaagaaaagacattaaactaattatacatacaaagaaaagatgcatgataaatgttaagaagaaagagtgagagcattatgagagaacttacaataaaaggacctagcccagtaggttttagaggagtgatgggggagatgtgttagggaaagcatccctgaggaactgatattttcatgggtacctgaaaggtgggcaagagggaattaggctgagagctgaatgatgagagttcaatgcagtggacacatcaaattggaactgttttgaagcagtaggaggaggttagtgcattcaaggaataaaagatcattatgactggacggtagtgagtgagggagaaaatggtaaaagatgatgctcaagactaaggcagggccaggttatacagggctttgtaagcaatgttaaagattttatactcttaagtgcgatgggaagccattgaagggttttatgcaagagagggacatggtcaaatttactaagctcagacataactcttgagactatttatttatccattttaaaattgggtttttcagagcttatagatttaaacacatagtctttgtgaaagttattaattactttcacaaggaaatgccactttcccaaaaactttgctccaagcagttggaaaggaagcctttctggttaataagagaggctataccatttctcctacctcttgataaatgctgctttttgggtggttttgccagtggtgtttgatttgggcgtgtccacctaccccagtggttctcatactttagcgcgcatcatgacaagactaagggagcttgttaaacatggattgcgaggctcaattcccagagtttcttattcagtatggtcgggttggggcccaggaatgtgcattttctagtacataggtgctgctggtctggggttcatacttagagaaccactgacatatatatatatacacacacacacacacatatacatatacaccttggtgtatatatatgtgtatatatatatatatacacacacacatatatagtatatatatataatatgtgtgtgtgtgtgtatatatatatatatatatatatatatatatactttgcagaacaccttgtggccattgggatacattttcaaggcgttyatctggggcatgaagaattttctaggactgtgaacttaagtccccttaaacacacactcataccaccaacaataacagcatattgttctcttcaaaggaatattatgagaaaacgtagaatcagttaacttagctgaggtctgggacagggccatggactaagtgaggcaagtagggtgaggcatcctaaataaataaaaacagagtgaagcagagctgcccttgttggaataaaggagatggtggatatgtgttgaaagtgcaaattatttgcaccttccccaagcaggggccttagaaaagccctcaggcaagatggagtactgtttacaagccccttgctctaatctttgaacagaatgatgcacactgtcttgaacagagattgatctcttgggctagctagaactatgtttcttctaacatttacatttgattttttaaaaactggagtgcttactagggtgtagcattatttaagggtcaatgaaagagawraaagtgtatgagatctgaagaccygacrtgaaggagccttgagtattattacatagataagatacaactaaagcatgcagatattttgaatcaatgtcaaaatkagtastaaaggcagtgatggttgaagaatatcatagagaggaaggatcacactragctggagtggctacagaaaggaagctttgggatgaactttagctggatttttagtgactaggaacgtgagatttcccaggtaaagatgaacaggatctttcagtgtgcttttttcctccctcattccatcttcatttctttctttttctatacacaaagctgaataaaagtagatttgcttgtaaatcaaaattttttgaaaactggaaggtgagtactagtttactaaggagacttaatgacccaattgtactttctttcagtttatggttcataattcattctttttatttgttatgttgcctaggctggagggtagtggtgcgatttcagctcactgcaacctctgcctcccgagttcaagcgattctcgtgtcttagcctgcttagtagctgggattgcaggcatgcactaccatacccagctagtttttgtatttttagtagagatggggtttcaccatgttggccaggctggtctcaaactcctgacctcaagtgatccacccacttcagcctcccaaagtgctgggattacaggtgtgagccaccgtgcctggcctcataattcattattttaaataaatacttaactaataaattctatgctatgtatactatatgctatacatagaaataaaacaggtataatttgtagctcatgggccttacagattaaaagggaagacaatattaaagaaataattattaaaatatccttgtgttaagtgctaagaaggaaaatgttatgggagggtactctagagtatgtttctaaattctgattcttcttaatgaagacaattgatctattgatgagaacttgcatttcccttacagagaacctttttcaggtcctttaatgggaaatattaattcctttaatagagaatattgctcttcttatttcattgctaacacacatgtttactgaagtgtatacttgttctgcaaaaatgatgagctttagagtcagatggttatagttttaaatcatggcatgctatttctcaatctatttccttgtctgtgagataaattagtataatgtgtaccaagcagctggcatatagtagctgcttaatgaaaagtagctatagttattatttttatttttatcactaattgtaggwgtagtttttgattcagagcaggcactgatagggaagtccaaggatgccaggtagggatgaattcccactaaattagaaagaaagtaaaggaagagagctggaggacagtagaagacmgtcttggccattttgttcacttgaatggattcagtttgtgactactcacatcccctttattcatatatgcaattctgataatggggacatgattttgcttttggaacaggtgcagaagtctacttcagacatcgtgtgacacagatcaacctaagagatgacaaatgggaagtatccaaacaaacaggctcccctgagcagtttgatcttattgttctcacaatgccagttcctgagattctgcagcttcaaggtgacatcaccacctgtgagtctgcttttgccatttacctgcctcagggaatgggatttcttttgacaaagcatgaatttggtttaactctcttcgcaaaggacaagtgatagactctattgatttgcctgtcttaaaaactgatacttacggccgtcgtcatgatattaatctaggccaaggtgaaacccatagaatgtttttaaagctggttaaaagttgaacacttttcttattgcccatgtcttcaacacgtcagtatttttgatggatatgaaatgattttgcctaaaggaagagcagtttttgtggccatttttgagaaaagatttttatgtacaagtacttgcttggattgcctcctttcctatgttcttgttctctgggttgctctctaattgtgtttacttctgtctgaggcaattgtctagctagctcttttgtgaacgagaggcatgacaagggatgggtgagaggggatgagtaaattttgctgaagaagctgaaattatgccagaagagccaaattttaataaaggaactaaaagtcaaagaaaatttttatcctttctaagcctttggatactgcagttggtttagcattattcactttaccttagatagtaacctttgtttaatttctttttgatataaaacatgtggtggggaaagtatgtgcagagggtttgatttcctatctttccccaaagtagactctaaactacaaatagccaatttagaaatgtcatttacatgcttatatctttcctagttgacagcagctatttactctcagaggtgggagtaggggaggtggatagctaagattttcttaggtagatacctaagattttcttcgtgattcctgagggttcctggtgcactgccaccagaaacttgtgataaatccacagacatctttttcctgccactttgactcagcacagatgagatgtaactcagtgcaggtgggatggcagtggtagaatttgcactcttactgccagaaatgctggggatagtgggaaggagaagatagtaagccagtggccaaattagaatttctagtatacatgtgaacaacaggagactttgggtttattctaagtcaactctgagatccagaggtgaacagggaagtaatgtcagcaaaaggcacatgtgaggagtctgaaagctaaaattcctgtactaagtagtaggaaggaattcagatatgagaaacaaaaagggaataaaggtattaagtactggggcagggaggatacatttctccaagaagttgcacttgctcagttagcttttgtttcatcaggccagttttccttactgatactacaatcctagctgacggtgttcattttaatcatagaaactcagaattgaagggagtcttagagagcatgtggtctcatcttttagcccttgcatgagtcctcttttattaaatcactttgagtatgattgacatatgaaaagctgtacatactgtatacagtgtgatgaatttggagataagtatacattcttaaaaccattaccacagtctatgccataaacatatccacatcacctccaaaagctttttcccctttatttgttatttttttcttttgtaataagaatgcttaacataggccaggtgtggtagctcatgcctataatcccagcactttgggagggtgaggcaggagggttgcttgagcccaggtgttcgaggtcagcctgggaaatatagcaagacctcatctctacaaaaaaaaataaagtagcaaagcatagtggtatgttcctgtaatcccagttactcaaaaggctgaggcggggaattgcctaagcctgggaagtcaaggctgcagtaggccctgactgtgccactgccctctagcctgggtgacagagcaagaccttgtgtcaaaaaaaaaaaacaaaccaaaaaaaamaaacmaaaaaaagaatatacaacatattagatgtactattttaacaattttttaagtatacaatatgatattattaactatagttgctaggctatacaggggatctccaggatttacttaccttgcataattgaaaccttgaaacttctgactgaagtgccctgtttttaattccccaaccccgtggaacaagaattatataaaaagccctagctggcaacaatctggtgagaatatgacctttagaaamgatgtgccccatcagtatcattgtgcctctgcccaagacttaaatttcaagagagcatcctattgacctgacatgggtcttattcccaccycatggctagggaattgcagcatcttggattataatcctattgcattgcatgtaatcaatgggacaaagtaacacctcaaaataaatataggtactgccatgaagagaacttgtgtgctgagtaatcaagaacaatgagtgtttactgcataggtgttctttaatatttgcgaattgagtgaatgaccaactgaccaactgaatgaatgtgtttccaaaagacctaaggaaaaacttcactggtccgtattacttcttcacattctctgtaaaattctcattaatagaatcccataatagacttttttcttattctattcatattctattttcattaaatatggatttgtatgaagaaagaaagaaaaactctatattgacaatggaccttattttttaatgctttttatgtaaatctgaatttggcttgctaatatgttgtttaggatttttgcattcatgtccatgagagtgattgagctgtagtattttttcttgtattaatttctccagttgttggacatggaggtatgtaggcctcatagaattatttgggaaatttttcctgtttctgttcaggggaagcattttaatacaagtttggtrttatttctttcctaaatgtttagaagaattcactggtaaaaccatttaggcctagagttttctttgtggtaaaattttaaattacagattccatttcttaaaggaatctattcagacttgtttgtttattctttttttgtcaaggtgctagaatactatgatataatctttattttttattttttatttttttagcttttattttaggtttggaggtacatgtgaaggtttgttacgtaggtgaacatgtgtcaatcttgttcatctggcwagccagttgtcccaacaccacttattaaatagggagtcttttccccattgcttgttttgcagtagaccttattttttaaaatactagttgtttatgcttaagttcagatctgaaaattgtatttacatattcctttgactttcattaacttaattagttctatatgttcattttgattcatttactttttatcaacttacttattttcaaatagtatgttgctctgtatgaatttctatttaccaggtaagaagggtgtcctgaatcatgccaggaatgtgaattgacatcctttttggtactccagctgctgtctctctccttcatccagtgtgtctgggaagtccaatctaatatctatatgccctagaattgaaatattaaatctttgagagaacttccgatttctcacaactttgctgttacaaaaaaaaaaagtgacatcttggtttttaaattggaatactttcctgttaaaaccttaaatatctaaaacatctgtttcagttccttttcaggtctgtgaacaatatagctaaaacctgggttttgctttccttaacraaggttaaaacaaaagtttcttagaaaaattgcttggtaatagctattcccaagcctgacaaaaagaactagaagggtacaccatattatgttcacatcaagggtctgggtgcagaatgttcaccctgtctctagtggatttttgttgccattgttttggtttgtttttatgcctgcatctgaatcacctggaagacttgttaaaacacagattactgggccacagtctgagtttctggttgtatcgaggtatgcatggacaatttgcattttttacaagtttctaggtgatgctgaagattcagttcaaagccgcactgtgagaattattattaataccgtgccttagcaaatctacttgtttctggaacagagcaacgaatgtatcttcaaaaagtgactcgccttgtaaacaagtaatgctactgtgcagccagggttgagaactgctgtcataaagcatcagcctgtccaaacaatttgtatctcttttcctcacatttgcacctttgctttgcgtatattgattatatgaacccatgcgacatctcatcttggattactcttgagtctctgtcttatgctcttccctgcttgggacctcttggctcacctcttccctgacttcttcctcaacccctaagacacacctcttaaaacaaaacaaaacaacaacgacacacacaaaaaaatagctttaagattataagtcacataccatacaattcacctatctaaaatgtacaattcagtggtttttagtataataactgatataggcaaccattatcaatgtctgtaattagtaaattttggaattttttatcacctcaaaaagaaattctgtcccctttagctatcacccccatccctccatccccatccctgcccccagccctaagcaatcattaatctactatctgtccctatagatttccctattacctggattccagataaaaggtcatgatggagctggaggccctcatccttagcaaattaatgcaggaacagaaaacaaaatatggcatgttcttacttttttgtggctctgttttgtcagtatctgcacagatttcacttattttctcctgctttcatcatggctcactgaccctggcccgtcaagtcattgaattgtagagggtacctcatctttcctgaagcccatgagctataacagagtctggtcgtggtggacaaggcttcagggctgtgggatggcagtgggtattgatatgcctgtagcttttgactttgttgcacagctaacattgaccttggwtttgatagagaartggctttttatgccactaatagaaagaaaactggtaataaatatgttttatagatcttagatttagaactatagaagaaattgttttctgaggaagggtatagctgctgttaaattttgaaagcatttttttccttgagtatcatttctactatgcagaaataatatagcttattttctagtacagtgtgtgataataatatagaagaaattggaatatttattagatgcctgtaggcaaagtgggagactaatttgaatgatctcttcatgaatctacttctagtttgttgccaatgacatttaaagtaggataatttattgccatggaggttggcaataattggattgattttgagattgttttaataacatactataacattttataaaaatacagtgtagccatcagtcaggacattcatttgtgctgtaaattacatactccaatatttaaaaactgcatagttttgtatatcaagagagatcctttaacattacattttgaaagtatttctcaatatttgtattagtgacatctaaagcaacaccgtgtcatagactgtctcctaaatgtgtttaagggcttgctaattaataattttatttagctctttttacatcttatattttgtgtgtgcacttgagctgtgtttggctgagaaagataacttaactcacctactattattacttttctttctgtctttcctgggtttttttgtggcaatttttgctttatgattttatttgatttgtactagaccctcattaaaattatatcctttgacttaaaaagttctctctttagtttcattttaattttattttgctttcaaataaacttttataaatgaaatgttctctcttttattttcttttttctggtgtatgctttttcctctaaacctttcagggatattttactttagagccatctcttttatattttttatctttgagcccagtaatttcataagtatatatcttattgttactagttttgtgttcatttttcatgggctatgttgtccacttttgccttgaacattcagctcttctcttatttaggtaagtttccttctaatacttattggaagatttatttgtttcatttattatgatctcagagtatctacaaaagcttaaagtatctccctctcaaagcttctgttttcttttaactcactttcaactttgatctttgcattactttttttctagccttttctccatgtcatccatgtaattttcaagagttccttttggccccttccttgaggtattgtttcaaagaggtcctgtattcttttactgttactgaactaatgcccgagtgtttgttgaactaatttgcttcctggcaaaatttttctgatatgtatttttcatcagctcatttcttaggttctgttcttttctgttctgttgtctttctccttttctctgcatatgtctcttgttaatcattactcatctttaaatgggaccaattctgtcaattttgtgaaaaatagtgttgtggggcaagaccagacttttcagttaaggtatgtgttctcagaacacttcctgtgtacattttgtaaatatatacccatgaaaaatagaatggtagtgaccactaatataataatatatttattaacagaaatatttataaatatttttaacttggaaagaagattaaagtatgtatttatatattttttcatgaatcagaaataatttgacaaacattaacattggctattgctcagatatgattttcattttcttctttacgattttttgaataatcataactttaaaaataagaatagtttactcttattataaaaaatgatattggccgggcgcggtggcttctgcctgtaatcccagcactttgggagtctgaggtgggcggatcacgaggtcaagagatcgagaccatcctggccaacatgatgaaacccatctctaccaaaaatacaaaaattagctgggtgtggtggagtgcgcctgtagtcccagctactcaggaggctgaggcaggagaatcgcttgaacctgggaggcggaggttgcagtgagccaagatcacgccactgcactccagcctggtgacagagcgagactccctctcaaaaaaaaaaaaaaaaaaaaagaaagataacgttgacactgttttaaaaaaatgtatcatgctgaaaagaaatagatcttctttcctttttttttagtggaggagtattgtgccatatgtaggctctttatgatgaaaaagtttaagaataattgacttggtatatttgactgaggatgagggtctttggatgttatattgagctgactcaattcagaattggacccccatggaaatcattttgtgtttaattcattgttatgaaataattctctctggcactaaagacttaaactagaatgtccccacaagatcctttaacatctgtgggtcaaatcaaagggattaaaacatgacctcagtatgaagaattggttaatgtctacccttctctctgtgttttctggagaaaaatcagctcttatttgattattagacgtcttaggcttctgtgaaaaagacatccacttacaaagccatatattgccatctagtgtgtgaaatatatattgtagttccccttagaatctaaactagagaggactgtgaaaatgacagaaacatagaataacactataactataatattcacaaaactgcatatcacagggaaataaatttaggcccattagaattacataacttaccaaaaagtgcttgattaatgagtgacagaattaggaatgtactacatgtttcacatttgtacagactatgaacagccacgtctgtagcttcctgtgtttttcttctcattctcattctctttctctctctttctaatcatatgtagcctttaggattaacataagtatcatatcttatgtgaaagaattccctttacattatagagtggtctggattttctgtcatccaactctctctattttgcttcttatggaagaagcagatgtaattgttttttcatttggcaattatttattacatttattaaacttcctcccagctgggagaatagagaaacctcatgtatcatattgtgaccctcttatgatttactttctgattctataatagtgctactttctctatattcttattacaaagattatatcacttaatcctcaaagtaatgctaggcattattattgtctcaattcttggtgaaactgagatgtgaacctcagtaaaatgactccagagcttgtactcttaaccactgttatgcatagctcttccatgtgtacttgatcttcctctctaccatgcacagaaattcctcaaacccctgacccttaaacattagattcaggaattcstaatctctcctcctagttttacttctagttatagcactcatctccaccccccaccctctgattttcagggattcaccagtttaatccaccttaagatcctgcaagagaaagatgctttactttctcatgtgtgtgtgtgcatgtgtgtgtgtgtgtgtgtgtgtgtgtatttgcagtcatcacaacctttcaaaacacaatgttgagcttctctttcctagattggaggatggggaaaggagtttgttttccctaaataatttatccttgtaaattttttaatttctagttgctgtgtgatagcaaagatgtaataaaagcggagaagatctcaagaaggcaaactctaataaccaaaggatcacatccatatgtgaatatatgaataacagaaataaaatttctttatctagaaatatagagcttcacagatctacaatgccaatagatgcagatatagaacagatatgcatatgtatgtttaattataatttaggagaacatggaattgtttttaaaattctaaaatacaaccacaaattaaggaaatgctactttatttcaatgtagaaaagttttcaattaataagacattatttgactgaataattttgcttacatttaaaaattatagcacttgttcatccagtataatagtttctgaaagttccagtacatttatagatgctaggtttttaaatgaactattaaaataaagatcttgggggtacctttctaactttccagggatactcaataactgctttctcagtggtgacctgtataccatcccactcctttcctcacataatgctctggtacgcaaaacaaagcttctcacatcctcctgtcactctgttctttccaacctctggctacattctctggcttcagctatctaatcatcaacttggaccttaatgctatacttaagatatgtgaaattgttcagtggatttttcaaaactatattacagtatattaagagtatcttttcagtgccagtgaatattcatgtgcatcattatttttactgtgtagtgctctcgtcttttgatttaccttaatgtagtaaaccagtttgatgggcatttaggagatttacagtataacaaagtgtggctttaatactgccaatatgaaataaagattcttttcactaaactcttttcctatggaaacagttatgttgatgtagagtagaataaagcccgcttgatttttgtcctgttttttcttagctaatctattttttatttctctgagtgtactttagaatcaggtttcattaaaaactcctgttggaatattgatttgaattacactcaattacactgcattagtttaggaagaattggcatctttataatagatcatcttctcatctaagaaaatgaaacatttctccacttatttaggtatttttaatgtcctcagtaaaattttatagcttttatcataagatcttacacattacttattaggcatgttaagaaatattttataatatttatggagattgtgaataagatcacttttgttgatttatggttacttggttttagatgtttccagagaacaatatacctacctgagtttttaaatccagcatgaaaaatctctttctttcaataggagagtttaacccttttatatttattgagataactgctgtgttgttatcttttccgttggtatctactatttatttttttcttttgatagatgagttcaacccttttacatttattggggtaagtactatgttgtttttatccttttcattggtgcctactatttacttttttctatttttaaatttttgctggttttatcaagtatctctttattccttcccacacagtctattcatagaatgcccaacaaattgtcatttcattcatggttctcttcttattccttacaaacctatttattcctggccctgccctcctttccattccccagagctaactgatgttaacagttcagtgagtgcccttccacactttgttccaaccatataaagctttggatgactgtgcgtgccttctaaaattattgttttgcactttgcttatttactcaacattattttagataaacatctgatttatttttatttaacagctgcataaagttttttagtttgggagtactggaatttagtctttcatctcttgtttatctatggactttcatgtggtttccagtttttttctctattaaatgctatgccttgaaaaacatccttgtttacatattcttataaactgatgctcttaatgctatattgggtgataagatccccaaagtgaaatttctggctcaaaaaacctgtatgttataataagtattgccatattaccttccaaaaagtttgtcatgattctcactcttaacgtttgacaatgcctgtttgcctatatactcatcaggaccggatattttaaatttttatcaatcttaacatttctgccaaagtgataagtaaaaacaggttgattgctcttgcattaatttgcatttcccttgaccaaaagtaaaattgagcctcttttcataagcttattggtcatttagagtttttcttctgtgaaatgtcccagtcatgtcctatgcttacttttctagtggattatttgttttttatgagcatttcacacatgaaggatatcaatatttgtaatatagtactacatatatttcctagactagcatttatttatcttttgcttttgtttattatttcatttgccataataatttcttaagatttttatttagtcaagtgtgtctttttctttaatagatacttgacttcctgattgctaaggattatctccctcactctaaagtcatataagtattctgaattatattcctaatatttttaatttttatcctttacattaaaatctttatatggaatatatgtttatataaaatatgagaaaggtatctagctttgttttttgtctttccagagtgaaatccattatatcagcaccatttatttaataagagattatttttttgcccactaaattgaaattcctcatttgccgtatgttaaattccatatatacttgagtctgtctctggatatctgttctgttccatttatttacttgtgttgcaatatcgtcattgttttcattataatcaatttgtggttttaagtcatttttaaggagtctgaactatttgacctgtaaacatgagacagctttattttttcccagaactgccctcaacgtctctatgttgaactccatgtctatctagagaggattccttaatgacatcttggtcctttgctataactttctggtcacttttggccattagaacagtctcactttggttttgaagactcgctgtatttatgtttaaacttcggtctcagtttggagctcattctctctaccctaaactccagctagacctgtctgtggcacctgtggtgctagagagttgtagcagagtggattatgggtctgtgtgtgtatgtgtgtgtgtgtgtgtgtgtgtgtgtgtgttatctctgaacatctacaaactataagcttacagaaccattgattgcctctaagactgacttcttggtggtagggaggggcaattggctgctcttgcctgttcctccatgatggtctatatgtagaccatatgtgtggtgtgtttctttggccagtgggtagtgtttagcctcctatgaacctttctgttgctgttaacagtcccctccttataggcagccctaccagcagagctttgccctagtccccatgggttcaacagttcagcaagtacatagccagggaaccaggtctctgttactcctcctgggagctccctcccagagtttgcttctgaatcattctccagtaggctcctaaggaggagctactactctctgcttacggggtttggaagataaagctctccagaaacattgcactctctgtagggccaagctttcacatctgtttgaatatttttcctatattgcctgggctgtggggctcagggtagtggggctcagggtagtgggaccagttttgactgatcgtttcccagatcttttgagagctgttggctaacaccttttcctggtggcttctttaaatgtaagatcattactgggttttttttttgtccccagctttacagaaagcaagagtaattgggagaaatactgttgcaataagttttaatgcctggaaggcaagaatttccttgccatatctttactaatatatcttaattttataataaccatcaagcagatttgtttattgacctccctctgccctactttaggccctttttcatccttcaacctcagctcaaaaccacttcctcaagaaagtcttcctaatagaagaattataatgtaaccaacacaaagaaaagataaatatttgaagtgataggtattccagttatcctgatttgatcatcacatatttatacatgtatcaaaatatcacatgtactctaaaaatatgtaaaactatgatatattaataaaaaatacaagaaaaaaaaagtctttctgacccccaagaccaggccatttttcccattacatgtgctcgtagttttcggtgacttgtatttttaacacttatcacaactttaattaattaacagtttaatccattgtgcaatgtgtgtcttttctggtagaatatagagtccactcaaacaggtacttgcttggacttacctgttcctgttttcccaggattcctttgtgagtgcctcgtatatgtaggctctcagtctgyattgaatgaatgaatgaatgaatgaatgaatgagtgaaacaatctgaaaacgtcttggaggacattcagtgggaaagggagagagtgctttagagagaagaatggtcttatcataaagtttgaaatagaaatgttcattttatatttgggaggctgaaaatggactgatttggtaggagctaggctttatggtggggaattttagaagataaaaccagagagatggatttggggcagattrtggtgagccttggaggggaacatctgttgaacaaatgacaggggtcttagttcatcaaaaatactgaatctatctttcaaaacctggctggatacattgaggtggtaaataactttatctaattagattggaagaaagaaaacactcttaagactttgagaaatgttgttctaaaggctgttaaccttaacatatgcttaaactgacacgtaaaacatgaataagttatactacaaagatgcaaaatttattatgcactgtagaatataatgataaaatactacccataatgaataccttcaacttcctttctataacttctagaattttccataattcttgatggaaaaatgagaacgaaatacttttactaaaagacgtttctaattcttgattttttccttgacattttgctgaaaagagttttattaaaagcacaaagaacgaaagtcctgttttcatcaaatagtatgcttcattgcatttttcagcagaccatctccataggagggggaaatattcagtttctaaacttctgacacgagctggtctgttgggctgcctgcaaacttataaactgggatcttaattttagaaaaaacagttattagccttacatttttaatgtattaattaaatattgtcacctttgatattttatcatgttcttgtatttttatatttattatttcctaattctcttgtctttttaaatttattatttgctaaatggcagattgggagtctgttctacttaatctttctttctctaagtgcctgagaggctgcccaactgaatcttcacctctctgccaccttccacaaatggggacatcagtagaaacagcggagacttccatcatcttggagtttagggtgatctggcacttctgttattgcagttattactcacttctgctcctggcaggacagagggagtttacctacttaagtgtccctctggggaactaattagttgtgtcagaaaaaaaataacaacataaagttgaggatagctggaagatgatgataattccaatatcaacacaattttgtgaatacttatgttaagcactttcctaaattataatttttacccttcacaaccacttcatgagaaatattattattcccattttatagaggaggaaagtgagaaattatgttaacttgcttaaggctctctagctgttgagtggtagaaccaattatggaatccaaatcttctccaggctttagtaattggagcggtatacctttttgcccctctcctagcaatttatcctttaccaatgtgtgcaatctctccatgcttgatataaacgcatcatgatgtaaatattttcatagttttgttctcatacacatgctgtcagtagatgtgtgatgttttaaactaggccaccaggttgctaccctaacagaaggaaagtttcccccttaatgctgccttactgactgtgtgcttcttttagaacttggagccctatttttcatttagagttcttcgataacagaaaagctttaaaaggaaatgtccatactagagatggggatgagatgaaagagcagagagctataatttatggaattgcgtcattatcaccaactgagtcatcaactgaattgaattaaacttttccccatctgagctggcaaaggcattttcaaaagagaagaaatttgagaagtaagattttagctttctggcagaaatctctgaagattcaaatataatgtgctaaatccaaataagaaagtattaccacaatcaactactaattttaaagtagggaattctaaatattagtgaaaagagaggaagggaaggataaaaaaaagaatgggaggaatactggcattcttcactggataagctttagtmcaaatttgttttttttcttcacaaatgtatcttatataagtagttttgtattatattgcctcagatttatgagacttgtttatacactgactggacatttctgaccgtcattcttctgaagtcctgtttccaaagtctgacattttttcattctgacttgaatgtttatgtctagaaaataatgagagaaaatctaaaatgtatttgagtagccagcacagaacacttttgtagtatttactagtctagaagtctctgttggtttgagtaagatatttaaatgttgatctctcctaaaatttgctacatgaaatagccaaaggaaatcatcatatctgaagcagaatttgctttctatttctgtgactttttagatactttttgcatcttataattttacttgccaaatgcatatgaaaatatgagattttactccaagaagagaaattaaaattcagttttatttttaaatggcacttgtcatcttttattaagatgtcaaattcatttttttttcattttacagatattgaacatctactatgtgctagacactgttctagacaccctgggtacagcagtgaaccaaacattaaaagctccaaggaacttctattctagtggaaggaggcataatattgtatagtatttgatccagggggtggaggaaaaataagtgaatatctatgtgaaatgatggtacatgctgagggaagagaaaacaagataggagaaatagaaaatgacaaggaatactcttgtatatagtgtgagcaggtctgtgacaaggtgatttttaaacagtagacacctgaaggtagtgaaagtgtaaaccaagagaatctctggagggatatccaaatagaagttccttggaacaagtaggaaggccccaagcagtgagaagttttataaggcagccagtgtggctgtcatgcagtgtatatgaaagggacagtggcagaagatgagagcagagaggaagcaggaggctcaattaaatagggctttgtgaactgtgatagagacattggattttactctccatcagatgggaagccatttcaggaaagaccttatgtgacttagatttagggattatgaatttaccttgctgttgttttggaagttagactgtaagagggctgagatgaccagatgaactgatgttgtcaatgcagagaccagaaatgatggtggcatggactacagcaatactggtggtacattgagcagtaggtgcaatccagatgtacaaggatccctcatttttgcatcaattctaaagggttcaggttgctacagacacttgatttcaaaagtatggctgccaggatttgctgatgtatagatatggactgtgacagtggtttccagagtgaaatcactgttttgggattgaataattgcaaaaacagagttgtcttctaccaaagggagaaaactgagggagaagtaggtttgtgaggcaggtagtgaactgggaatcaagaagagaaatttggtcttggattgggtttgagttgcttaatagagattcaagtgggaatacttatgcagttgaatatagaaggtttcaggagcaatgtctgagctggagagatatatttgaaaatcatcagtagagaaatagtatttaaagccatggaactggatgaggtccaagattgaacccagagaaactgcaatgtttggaaactagaagattaagaggaaccccaagaaagactgagagggagatgccagtgagtgagggggaaaaccaaacatgtatgttgtcccataggccaagaaagtgtttgaagaaggaggaagtcatcagctgtaccaaatactgactatagtttcatctaagagttgcccattggatttcgcaatgtggagggtgtgtcagtccatttcacgttgctgtaaagaaatacttgaagctggaagagatatattttggctaacagttctgcgggctatacaagcatggcaccagcagctgctcagcttctggtgaggcttcaggaagcttttagtcatggtgaagcgtgaagggggaactggagcatcacatgaggagagagggaacaagagagagatgccaggttcttttaaacaaccagctgtcatgtgagctcattacatagggaaggcaccaaggcactcatgagagatccgcccccatgaccaaacacctcccactaggcccaccttcaacaccgaggatcacatttcaacatgacatttggaggagacaaacactgaaatcatgtcagaggataaaggtgacattgacaatagcagtttgtatggtatgctgggaatgaaagccagattggagaaggctcaagaaacaaatgggaagggaggacaccgagacagtgtgtttagaccagtgtttctcactttttcatgatcacctccttaaagagctttcttagacatttttttctaatcctcccctctccatgaaattccagtatcacaggtatacttttgttatgtattgtatatatatatctatgccttacatatacaaagagcaagtaatttttgcctgaaagaattaatttttgaccttctggagtgatatcactcctattgagaatggcacggaatagacaattttttagatgagcttttctgtgaagcagggcaaataattaggctgttagaagatgaggttggatcaagtttttattgtattgtattgtatttttaagataggatacattataatatgtttaggtgctgatggaaacaatctagtagaaaggggaaaattgattatgtaggagcaagattgaacagttacagaagtcatggtcttgaataagagacagaggatgggcctcagatgggaaccagacagttctcccaaaataatacacaaaggagggcagagcacatcaacacagatagatgatacttttggaggtgagggcctgtggaagtcctcttctgcttgatttgttttcccagagaaacaagaagcaagatcatcagctgagattgaagaggggctgaagacgttgaagatttgtagagagaggggaagtgttctgtggtcatgtagtgggggtgaattgagtagaatatagtaggatagctaggcagcactaagactcaattcaaattagtgatcataagtttaaactgcaatcagtcaatatttttcccctccacgacttgatcttctctaagcacattacatactttaaatatttgagtgaatgaataaatgaatcaaaaagttagttaatgctatttacgctgcatacatgtaagattttttccatttactatttatatgttttcaattggaatgttttatacaacaaatgttaaaattaaggacttcaaataagaacatagaataacatgcccaagttcagctttttttttttggatcaaactaattaaaatcaacaatgatttcaacaatgattcagtgccttttttcttttggttggtgatgttgctcattgtgggcgaagtatgtaaaactgacaactaattttgaatctttccatatatatttttataaaaaaaggaaactaaaagtaaatggtagtttctttcaggatgtggtgttcattctttagaaattgtgaactctgcttaaaacatttatgtatccatttattttttcaataaatattttcttaggatctcttctcttaccagtcacagaaaagacaaaactgaataaagcatgatttctaccttgaagtatattataggcatctggatgtttttctagtttttagacgaggtgggtatatgtttctttagcgtacatagaggtagacttgaactaatatatttaaagaaccaggcttctatgtggtacaatgtagaattagcattaataaagacggaatgttacgaaattcataaaagaaaaaattcaaacacattagtaaatttagtgcattatatataaaatcttaatggtagggtctctgctcctttactaggaagcagtgtgctcatggagactgtgctttgtcatgactacaattgtgtactatataaaatcttaatgagagattaccattagattcttaagattgttatacttctctttttcaagaccatttggtggttttgagaagttaagagctttataagcctgacagtacttgtgattcaaccttctattgaggccaagtggggacctggaactctcagactgcaggacacacagatgaacagcatgtggcagtgtttaaatgttcttctgaaagccaatgccacaggcttaagacaatttagggcagttctctgtgatgattgcaaatgcatcccaggattatatttttcttttatattgctatgtgtcatgctttgtttgccaaacagaaagaaaatgaataggcagttttctggtgcaattcttagtaaacaaattgtcaaaatgaactccatccattgcttaagaaatacataaacacaatttagtcactggatgtgtctgtatgtaggttgttcctatggagaattttagtttgacccatgtttttgtttgtctttttgaaaattctgatagactaaggttctctttgttttcataatagtccctattccccctaaaatagtaagctatcaaattaccgaggttttatttgtataaatgtagttgcacatatctaacttaataaattgtgaattgatttttatcatgactttaagtcataggtattatttgaatgaaagaaaactaagctgttgggttatttttacaacgttcatagagaattttctttcatgtagattttttccatatagcatatacaatagaatacattttaagctattccctatatatgtgtgtgtatatgtgtgtctgtgtgtatagtgtgtatgtatcctcatcatagtccttcacattttaagatgatagcactcagtgattgaaatctttatataataatataattgaggaaaaatctgtgaacacaattgtcattatcagacaatagatttataaaatattttaatcagtaactgttgtccttaagcatgaatatccttactactcttctaccttttacatttgctgttatcgcaaacactttgcttagagcaaatgtgattccttattgcccaaatgcttattgcattccaatttattataatacacatacatctgttcagcactcactgtgttcctggaattgtcccagagtctgggcttccatcctttaatgagacctagcctagttcttaaggagctcacagtgggaagacatgtctgttgcacttatcttctagttgcttctgagcttccctgctttgtttacaggttggctttagggcagcctctgctcatttcttctgcctttcttaccagttctggctctgctgcttgttagctgtgtgaccttggggacagttacttgatctctctgagtctctgattcctcttctgtgtaatgaagtgataagtcctacctcatgagggcatttgggaagattaataaataagataatgtgttaaagcatctagtaaattgctggcatatgctaagtggtcaatgaaagaaactgctgctgccatttgacttgtgttcgttatgtgcctggcactcaattgctaagaaacaaactttagttcgttttcattcccttgctgctgcactttcttcaaacacatygtcagatgggaatttagaactagagtaaataacaatagctccaacttatgagtacccattatgtgctagatattttactggttggtaacaattcttaaaacaacccagcgttgttattatccccaccatatagagcaagatgggagagataaaagtgaccttctaaccctgcaaaactacccaccagaagagccaaaatactgactacaaagcttgtgttcttcttctttttttttttgcaaccagtcattttctccagtctcttccaattctaaaatattttaaagattttttgaaaaattcatgtgtattatgatcacaagcactagatgttttcatttgagcacaaactccaaagtagragcagtagaagttttcacttgagcaccaattcaaatccatatgcccaatgatgtcattaacaagttaaaaatacagaaatacgcattttcataaataagtgtgactattagtccatggacaggccgaagttccctaaatagttctcagatcttgccatccacattmgttgatttttctgtatcagctgaaagcagaattctttttaaagggggaagcagtggtttctttctttagacttttgaaaatattaaaaaattttagataaaattgaccattttgatttttaataagaggtttgttttgatattttaactttagacatatgaggcaaattttgaaaacctatgctggcttcagtaaagtagttttttggcttttcttctatatcttggcctgggtggcctggggacatcaggcacgaagaagagacggcgcagttaaggaggtggacagctgatccatgtggttcacttgatgagccatgccttctgggtttaatatagcaagagttcctgatttgagaaaggggaatttgcgggtgtgtattttctttggaaaaactgaacaaactataaaattgaatcagaataattatagttctatatagaatcctaaatatcagcctctaaatggttacctcgggcaaatgccaatctatctggacttcatctttctcctctgtaaaatgagaccattgaaccctagatctctaagatcccttctcaatctaaatccaatctaaaatgattctctgaagaggcaggcatatgtgtgtgtgtaattgctgtttgaagtgtgaattagttaaacacaaattcataggatgtagatatcagaaaatgtgtttataaaatgttaatgtgggtgagtgagagagaaatattttattgttgtttataaacaccttagttaacacatttacacctttgctgaatacattagattttgggggaggaaacaaaaaggcttatattcaaaccaggatccaattggattttaaaaaatggttagtttatttgtctttttcaaccactgaatttgagtttcttgagtctttctctatctctaccactttgtacttccccaagtaaatatttcttaaatgaatgaattattaattgaatgacaaaatccccgttgtacttgattaaatattgcagacaaataggagaaaattagattccctcaatttgtactcttctgtggcctcaactattccatcacctaatatctacgtaagttacattgaaggaaaaaaaatcagttaccaaaggaaaacaaattccttttatcctgtcccttcactgacctttcattaagaaaagtaaactataatatctttaatgtctagcagaatgattctttgaagttttataaacataaataatctttatttctggtaagcagttttatttacacaataaaactactgaatgaaatatagtagaaatttggataggacttttctcctggtttgttttaaaaaggcatacataaagtaacaagaaaacatagcaacaaccccccaaaactttagagattgtatgtgtatgtgtgagtgtgggtgttgtcttggaagaggaatgggattttagttatttgtacattctgtgaagcaaatcatgagtttagtattaagtggagcaatacatttcaacattagttgttttaaatctaataatattttatacatggagaagttttaaaaaacagatttcaatttgtgaatatataacaaattaaacaacttctttttctgggcctcaacctccttaactataactcagaggactaggataaatgatgttgcagatttcttttagcaccaagcatttgctgatagtgtaaattaactgatcagtcggctgtaatactggctttatagttttactctagtgtggcattcttctactttaaattcatctccctgacactgcttttttaccgtgttctattcatctcatctagaaaagaatttatttatttatttttagaaacagggtcttactgtgtcacccaagctagagtgtagtagcacaatcatagctcactggggccctgaacccctgggcttaattgatcctcctgcttcagcctcccgagtagctgggactataggtgcataccaccatgcctgacaacttgttttttttttttttaattttttgtagggacagggttttgctgtgttgcccaggcaggtctcaaactcttggcctcaagtgatcccccttccttggcctcccaaagtgctagaattgcaggcatgagccaccatgcccagcataaaatattttttttttagttttactttttgtagtttactttatgaaagaattaaaaataggaagcaaattggacattttaaaaataatatttttacatgtattggcaaaatttttgtattttgaaatgtggaaccaagttttaggagatgagacagtatagcactacaactatatgacaaaagctgtagcttgttcctgtgacccaatagtccttgaggcattcaaagggatttttcacattgaataccatctgttactttctatccattcagtcctgccagtatcactccaccaaatgtgaaataagagacattacctaagctgttatgctataaatccatgtgtatcagcccactctccttattaatgcctctgtgtcagcatatctaaattcatgttgatactgttataatgtgacagttttgtatgtatgctttatttttattttttgcaagatacagatttattcagaattatagaattatggaaaactataatatactctattatacatagggctacatatatgtacacacaaatatatggccatatatatttaatatatatgtattaaatataatatatattatatataaatgtatatatgtattaaatattatatatatatatatatgtatattttgagacagagtctcgcttcgtcacccaggctggagtgcagtgttgtgatctaggttcactgcaacctccgcctctcgggttcaagcaattcttgtgtctcagcctccctagtggctgagattacaggcgcccaccaccatgcctggctaatttttgtatttttagtagagatagggttttgctttattggccagcgggtcttgaactcctgacctcaagtgatccacccatctcagcctcccaaagtgctgggattacaggaaaactgtatttttacatatgattctattatttgacagtttataagtcacttgccctatttaattttattttcttttttcttttcttttcttttttttttttttttttttttttgagacggagtcttgctctgtcgcccaggctggagtgcaatggcgtgatctcggctcactgcaacctccgcctcccgggttcaagcaattctcctgcctcagcctccggagtagctgggactacaggcacacgccaccatgcccagctaattttttgtattttagtagagatggggtttcaccgcgttccccaggctagttgcgaactcctgagctcaggcaccctccccgcctcagcctcccaaagtgctgggattacaggcgtgagccactgtgcccagccttgttttctttttgtattccactccttcaatgtagattctttttctttgtttattaatttatttttaattgacaaataataattgtgtatttttatggggtacaatgtgatgttttgatctatgtatgcattgcagaaagattcattcaagccaatcaacatgtctataaacaccaatttatcattattttgtggtgagtacattaaaaatttattcttttagcaattttgaaatacataatacattattattaactatgatccccatgcaatgcaacagatcactaaaacttctaagaacttttgaacaattcacttggaaatgtttagggactcatttaagcatagacattttagtgctatgcttataattctctttatgtctagagaaaaaggtttgtcccttcaaagaagatttatatcctacccataactagaaaaaccaaaatttctctaaagtttcaaaatgctgacattttggaaatatatttactttaacccagatatagtctattttatctgtatttctcttagcatgttgcaaagatatgtatattagtagattttgtaaaaccttactagtttagaatatttgaagaaatatttgcttttcaaatttgcaaagttcaaaatggcataccagggctaacatgcatgtgccaggacaggcagatggatgcacttgcacacatgtttccactttgagcccagtgatcatggacttcaagtgtgttctttgggttagtgctatcatgaatcaatgtgaaaagagggaaaataacttaaaagtaaataagaaaaggaagacttgaactcagaacctgacatctctgaagattatcgcaaggtgttgatatctcctttaggatcactgcttcagaataatgaaatgaaaaagctcacgctcctgttcaacctttcattcccaaacaataaagcacacaggcacatactatcaatttagcccactaaatattttagatatctgctttggatgcatcatagtctttctataatgttttcccctgtcattcacatggtacagtcttctgtctaaccatttttttttttttttggtttcatggtaagaaatcaattttggacttgcaacgtctggctgcctttgaagtagtattgttgaattttctaacacttattatccagaaattttatctagcccattcaataataagtttatggctagttggcaaagattttaacatttcttgcctggattatttcttgtttaattattgacatatgacacaagttttgtgaaccatgaatgagattacaaaatttctatttttccctcacacgaagccaacaatctggactagattttaccattgtcattatcggaagtttctccagtgataatgttttcattggcttattcattgtttctaatatgaaaataggaaaaaaactcaaaatgtctattagcaataagcacaaagggcaaaacttaattctctgacttaattctcaaagttaacataaatcagggaactctttgtattaacttttcagagtttttaagagtcaccattatttattttacaattttatatttttcatttctggttcaagcagatggaaagatcagcaaatcattttttctttttataataatataaaatgttctgaatggacaagagtgccacaatactcttacatttacaaaatgactttataatcagatagatataaatgattgaatatggagctatatatatttatatgaataaaccaagggaactcaaacatacttatgatacttaaagaattatatagttttaaatttttaattttaacttataagagtaattgcagtttttctgccattaaaaatgtaatattgaaaatattctatattcctcataattacctcttaatggcactgtacttgtcatatatatatttttctcaatatccctcccccctaccagtttagggcacttaatttcacatggcccttcacataatttttaatttaataattatttattgaatgaatgaatggtgactcagattttcttagctaattgttatcattcattagtgctattgataaaatatgtgtttacttagaatttccatttaaagtatatacatttggatatttttacctgaaacagccaagtctggcattatgtttttacttagatatatacatagatatggcagaaaccaatgaaaaattatcttttgagataatgtagttcctgagaactaaactgtcaaccctttaacataatagcagtataatgctgaattatactcttcaatttattttgactctgtattgttactgatatggtttggctgtgtccccacccagttctccaattgaatttagctcacataatccccacgtgtcatgggagggacccagtgggaggtaactgaatcatgggggcaggtttttcccgtgctgtacttgtgatagtgaataagtcttgtgagatctgatggttttgtaaagggcagttgtacatatgctgtcttgcctgccaccacgtaagtcatgcctttgctctttctttgtcttccaccgtgattgtgaggcctttccagcatgtggaactgtgagtccattaaacctctttttctttataaattacccagtcttgggtgtttcttcatagcagtatgagaatggactaatacagttactttttcttttttattagtctttctctgtttattatatttttggtctgtattctagaaaagggaagataaaacttccaagataagataagggaaaatcttagtagtttactacattgaaaatacagattgtagtgctaaatgcctgaaaattaatgatcttagaagaatcgctccagctaagaagggggcttctagagtaagaaaagcaaagggacattatgagacaagctgctaatgtaagacacccaaaaagcagaggtatccaggataacacaccctggagtgtatttgtctttatcaaatagctaccaaatgtgattatcccagcggtacatgggttttatggtagacacactaattctgcattctacactgtacaacaaaaatggtatataccatctttcaaacttttagttgaaaaaaatcaaactcaaaacaaacctttatctgctatatgaaagcatcctttccatagtcatatttcccaccaaagccatgaaagaagactgaaattcagtgttcatctaaatacatttaaggaattgaagttgtgtctcctagagtggctatataccattcaggtacccatatttgtttgtaatttcaaaaccaaagaatgcaacatgtccgttcttctcagagttgcttacccacaggccacacttgacattttaagtcgaagtcatttttggattatctgaatgcagggagaactctggaaaagattcttgtgagtcaaaacttytagtttgatagccaaataattagacctactttattaagtttttctctacccaaatttcaccagacttttatctaattgtattatgaatgtagtaagaagaaatgggacaaagcagaaatataaaagagaagattgacaaatatcagtgcctcactctggtagaaactggcagtagaaacaaatgaggaagagtgcatttatctctgccacagaccagtcatatagggaaaaactatgcagatgtttatcattccttattccaccaggtacttttaaatgaggcaatcttagaagtatgtagagaaattctctctctctgaatgaaaaggagaaaggagtaacaaaaagaatagctaacagttaaacagtgcttactatccaccagatcctcttcaaggtgttttaaatatattagctaatttaattcttgtactagtcctcacattataatcccatttacctgatgaacttaagtatggaaaaggtaagtagcttgcccaaagtcacagagcttataagtgactgagcctgagcgagggttccttcctaggccatctggctctacagacytaaactgctgtgccttggatttttcagacttaacagaaaatagattttctattttgaatatagtgttttctctgtagtcagattactaagatctcacaattctatccaaaacccttatgctgtctcaaacaaagcaaataatatatattttatttgaggattcaaatctcaagacctattttacaaactggtttttagtgactaacttgtaggaacccactggtcaaagatgccctctgttgtcattttaatgcattcagaatctttgcatttggcatgtcttgcattttattatggttgattttattttgagacatacgaagtttttttgtgtgtacttagtaccttttaatggattgtttctgttaaataattgtctttgtgtattttaggtttgctcttcctgaaacattttcttgaaactttaattcatttcctatgtgtcttttttaatcagattaaactttcacaactagacagcccattggttcatctaaattgtaaaacatataacaagaaaatataaagtagcagttaagaagttactgaaaaagatgggggaattgcttgataaccaattttagaactttaaaaaatattggagcaaatttctttgtatgttggtgtttggttgttcctgacagttatcactgcctcaactttctccttcacaaacaggcagaacctaggatgggaacactgggagctgtggatgaaaatgggggctggggagaggatggagtcatagtgcggcagaggaaagaggctggcagcaatatcagatcagcaaatagcatgaggaattaggctggaaactactgagcagaaaggattctgtagtaatcctttaagatttgaggcttgagaacaaggggaaagagtagaaaggtgggaatgcataggttgaggtcaatttaaataagcccacctctttttaaagcatactgaaaaacaaaaacaaaaactcctcatggagttgtctgtgttaccaactagaggttgcctcagtttactggtaactttgtcctcattgttgtgtgttaggaaaataatggttttaaatcattcaaggaaaatacacttgtatgtctcatgagaacctggagcattttttattatattttgtgattacagttggagatgctgcttatcttatttcttgtaaaactcggagggaaggcttccaagtgctttactgctctaggggccctttgtaatcaaatatgcttcttcagcagtaattttagcatctattatcggtgcttcagccctggcagttcggcagccttgcagctttgacatcacttgtggtttgcagaagatcatgcagtgctgtctagtgctcctgataatagtttctaaatgcttagctgatttatactgactggaattgtcccatctcttcctagcaatcgaatctggcaaattaatcatttaaccttttctgygmcatggacaagcctcactgtgaggtcaccagtgtcacaccaagtatggctgcccattgacagaaaaagtttgtgctggaattgtgaatgtgctcccccatctagaagatgtacacgttgtctttttagataaaacaaagacaaacaagggtatattttttcaagtgcacttaatgagagtacaacagaaccaaaaagggaaatctgtgcttctcattcccagtcacgtgctgactccctggacttcattcttttttcaccaaaactcctgtgcacgcagcatggagtaatcatgcttgaatctagcctcacagtcaggccctcagagctgattctgagatgtgaggttcaacgatttagagaggggcctggattattctgatatgatagcttttcattcactataacttgaagtttttatatcacagggatckatcttaaaacaagagatataattaaacagaaactcagtggaaaggggctcttacagtcatataactggtcctccaaggaaaatgcaaaggcgtcttttatctctctccttctcccccagaaatacctcatcatgtccttggcctgtgctgtggagggttccatttaatatcctcatctttcccagctccctagttcctcatgccctatgctcaccagacagacacatcaccttcctaggctccctccactataaagaaccctcaaataaacttcaaaggcaggaagtccttgtttgtatcctacactgacccagaggggcacaaccaggatatttctctttgcctcaagggtcaatttgacccagacccagacaagaatacatatattccaattttaaggctaaagaaggagccattggtagagtcaactgtcttctacagctaaagaagttacgattattttcttttgaaaacataatcttttcaccctgatttcctgattcttagtacaatgtgttctcaagactaattcttggaacagtctagagaggttcatgtgcttcttattttgttgctacttgtcaaaggccaaaggggttgaatgtgtcagacactgtaggtcatttgcataacatactacgtattaataaaaaaggatatgtggatattcaagagtatgtttgatcctgtttcagcatttaatttcagatcatggccaagtatctgttttcattgtgaaaagccaggatctgccaaaatcaacatgaagtaaatgacttacatagtagtgaaaaggagttaagacacgtacacagatatgtcgttcctttcgatcgttatctaaatagtgttgtttagacaaaagtattaaacttgtcattggaacttagaaaacttttaaagaattcagtttttatattgatttatgttccattctgaaactgctcataaagtttaaatctttcctttctatataacagaaatggtcaggctgcatttttaacagagacttctcaagggtgagaactggtagaagttgacattttttacataaaccatattttagaattttagtttcaagctagttaagaaatgtactttttttttttttttttggcagtaaggagggacttatgatgaccataatataacaaaatgtgactctgatcatggtgacatcgaaacctggagtttccacaactcagtttttgattgagggtagcaaattatctttctttgtagtaaattatgatacacattgcctaatctagatttgatgtgtgaaaaaatatgctactatatgtggcatgcctgtaaagtaatgaggcttggtttttaaattatttataatttcttaaaaatgtatgttgtccttgagagagtttctctggaaaagtacacttattccacaattctttaaaaagattatttgacatttattacaaatgtaagaatagatttgggaacttgaagccactctggaaaaattcttcaaattgctgttgtagccacacattctttgtgatacacacctacttcacttgtcatggcctgaataattattgactcttccagaactattttgcactttcaaagggaaaatatttgctttgctttcagayagtcaaccgattaagctgcattctctaaaagtaattccagaaggggactttcaaaatagttataatagtaacaacttgggtaaaatagtaacacttttgaaatagcataatcatctggatgtgttaattattacctttgttgaaaaattataatacttttatagtcacatctccaagggtgaagtagtggatgccttgttttactttaagaaagttttacttttttacagctgaatacagttgctgttctaatagcttatgaaatgcttgtctttggcctttggaggaatacgtgatcttgtaattttgcatgatagcgtagcatattgcagttgttccacaggcatttttagaaactatatcctttagttataaaaatgtgttaacaaggtcacaaaatagaaaatacatacatttcgaaaaccagagaattatttgagatactttttaccacaatataacttttatatttgaattatattgccattattttggtgaaggtggtatctaactcaacttttgttagtttacgggctgtagtattaaagtgatagcatagtatcttgtatgtagactgtggtgaaaaatctattgatggaacaaataaaggtgaatattgaaaaattagatcatgaatgatatttgataaattatcttgatggatatttaaaaataaatacagattgacttgtataaatgtttcttttatgtgatttcactttaatatgttatattgactctaaaatcatgaacctgaaatcagactcaagaaagtattagatatcccatgttaaaaagtaagttagatatttacagagattgattcataacacagatgtactgagggataactgtggttccagaggctgcatgagatgctatggataaatatgtggtggaaaaataggtagcatccttgctatatggagctcatactcaagtgactatggggctaccaagaaaataggccaaactgggagcctctgtagcagcttggtgtcccatggaaaagtttaatgccaagtatctgggttctgttctttaaagtgtgacgaatttgtattctgtctctaaaatgcttctggattaaaatttatgctattattttctgcattctcctttgtcatcttaattgatctagttctacccctccaatttttagtattttcaatatgtgatattatatgtgcatactatatgtgaaagtaacttgtaaactgtaaacattttaaactgtaaagcagtgttgttattcaacaagaagatatatgcacacaaagtacaatgtagacttgcctagttatgcagataataaaactgctattctgaaggtcttttattctccctctctaaaattgcctgaatttgcggattaatttatccattgtccatcttccttagtcttttagaaacagtttccaaatctcttaaaactacagtttatgttcactatgatttagagattatgttttctggtgggcacagaatgtgtcaccccattaaagagggactcttaatattgtttatggaagcagaaaacaaaatgaagtcataaatctgggagacaccctatttggccacctcctgttggggagaagtgattccaaataattaaatggggctagtaacttttacattaaatgttttccatcaagtagatgttataacttccttccgtagcccaagtcagcagccatatacattttcttaaataaatttcatagggtggaaaactgaaagaaaggaaatggtagaataaggtctaaaaccatctcctaaatcttccttaatttttctattgttttcttattgccttaaatgcctcaatccataattaggccctcataagattaaactgcaatggaacatgctgaaaacttactaagaaaagaaaaataaaatcagatttcactggtattatcactaggaattaaggagtattttattatttctttcaagttttacttttacgcttttctggaagaatctctgaagacaggcattgcaagagattttgaggggagataaatggtgatcagatacaacagtggcagaaatgtcttttctaagggttaatgaggtcacattgtttgttgtattttttgaagtcttagaatacttgtggatttgattctgacgacaaagtgcagctgttctggtcatctcttctaaataaggttctttcttagcacatgcatttcaaaatcagggaacttctgggctaagagtcaatcttcccttatgtgcatgccagacactttcatgtatttgtgggagtcacaggttaatctccaaagaaagattgctttcattcggaatcacaaatgagtaaataaagaccctgtctggctctctacatctgaggcttgttttgaatttgtgtacaaattatttccacataattgtgctgcattaaccatctctgaacattaattatatttttccactgctgaaactctcaagtgatttcacaagtacaaaaagtttgtaagaggcattattctttttttctccaagttcccctggggaaccctgatttggagagaattgcctgcaaacttatcatcatcaatactatctttttcattgtctttaaaaaactttttattcaaatataatatccatatagaaaagcacaaccatattaagtacacatcttgatgaatttttacaaattgaacaaaaatccatatagtcagcaccctaatcaagaaataaaacacattagcacttgagaagccccccttagctcccttccagcccctaactctcccattctcccaccctgagtggctagccattacccagacttctgacagcatagattgttttttttgcctgtttttgtgcttcatttaaatgaaatcaaacagtgtgtactcttatatgtttagtttctcccactcagcattatttctgagtaatctcttaatgttacacgtagttagaaatggttcattcttactgctgtgcagtaccacatggtatgaacctagcatatgttatccatttcacccttggtgggcatttgggtagttttccagtctgtactattataaatagcgctcctgtgaacattcttgtacatttctcatgttgaacaatttgtgtatatttctgttgcatatatacttggctgtaggagattatacatattttaattttcagttttattagtgaaaaacttatataactcaataacttctgatcagcakgaatcaaccggagttactgtattgagttgatagtaatttttttctaaagcatagaagcttaacattttagttatattcttaattcttcttgtgagtaaaggtttgctttttactagacatttagaaactcataaaatagctactggattcctcattgctgccttccaagatctctagaagttcaggaaccctagaaccattgttaaacatccattattttccacattacttaataatccaggttgcttttaaaaattggtaatatgctactcgctcattcattcatttattcactgacatttgttgagaactcaccttgagcagagtatacaacaataaacaaattggataaagaccagtggaagacagacaatcaacatataaaccaatattgactgtaatgccaggtgttttggatttaaaacaaagtaaaggtaaggggaaagttgacagcttggttttgaggtaggggtgctgctgtgaaggatagggtagtgaaggatggtctctgaagaggttacttctgagtggagacttgaggagggaggccatgttgcawggggggaagaatgtcccagacagagggaacaagtgccagggctctgagataacagcgtgtgtggtgtatttgggagtcggcaaggaagccagtgtgacgcagagcaggctgaatgagggacagcgtagtaggagatgatgctggtgaggtagataggagctagagtataaaggatcttgtagaacattataagatgagaagccattaaaggatttaaataatcaaagtgatgtaatttgatctatattttaaatgctctctctgactgctatgtggagaatagattggtggtgggggaaggtggcaagactggaaagtgcaggaagaagactgtagtgattcaagcgagaaattatgattgcttgcgcaaaggagaaagtgggctgagaattgacggttgctttttgttttttaaggtagtctcagtgggatgttcagatggactggatatttggtgtgagaacaaggagcataaagatgactgtaactatgctaatacctttccaaacattaggtatttcacataacacccctgtgagggaggtaccactattatacccagtatatggccaaggaaacaggctcagagaagtgaaatcacttatgtggtattgcacctattgttaggtatcagagccaggcttcaaactcaggcctgtctgattggaaagtccatgctccttatcacctctagataccatctctcagatctctcaattctattttattttactgagatggaggatatttcatcttcaaaatcttagcattatcttttattcttctctctactttctctttatttctttaatagcctttaagtcatcttatttctttgcagatttctttctaagaaaaggttcatctgagatatgccatttccactttcaaccttccctagaatcctagctgtggttcctcttgacttgagttactgagatagtttctcaacactttcttctactctagtttattatttctatcatttgactcttcaagcactactctcattttgtatttcccctgacccaaactttagctgtagggactcattattgtttattttatcagtaatgagtcctactacctaggttttttttatctttttttttccaacttttaagttcaggggtacatgtgcaggatgtgcaggtttgttacgtaggtaaacgtgtgccatggtggtttgctgaacagatcatcccatctcctaggtattaagcccagcatccattaactattcttcctgatgttctccctcccccaacccctcccccactacctggcttttaaaaccttctgtataataagtccttcttccctctcccrtttccaacctatacaactactcccagactgccttcttggtttcagtcaacctgattttatctctgctttgttcactaccctcctctcaccacacatactcacttatacacattacacacttgtgtttgttccattgtttgtctttaatcctgtctcctcctagaatgggaaaataacaatacttacagtaagaaatagcagtaaccatttattgagaactatgtgaaaaacactgtcatgatttttaatattactttatttaatcctcatgttatatagatattattgccccaattgatcaaaactttttaattatgaaatgttacaaatgtatttttaaaaacccatgaacaatataactgacactcagggacccgtctctcatatttatttatgtaaagtatttgccatttttgctttgattttttctgtctccaaggtttaggattaggtgacttgctcaagtcacactgctactaaatgacagtgcttatatttgaacccagctgatacctgactgtctgttagtgtccatgtaaatgtctccctccgactcccacatttcctatttatttcaaggtctcatctcctccagatgatgtttcctcacaggattctatcctgcttttggtcctttctaagaatacaagttgagatttattcatttagccaacaaatatttatgaagcctttttagagtccaggaactatactgttatcttttcatggcttgtgtaattctcaacacagcctatgatggaattgctgatactgatttcattgacacaagaggaatccacggtttagagattaaaccacttcttcagtactattaggggttcaagctagcaccaatctcaggtgtatctgactctcaagccaatgcttttaataacttctaaaatctttatttattgaagaataattttttattatttcttataattgtagttagtatgaaatgccagctcagagcaattccctatttcaagcctctgctgtctcctattttaaaaggtgaggatgttcatgtccagaggatttatatgaccagtattaggtcacacagctacacaggggagccaagggtagaactcttgctaaatgttgcctaattcagggcttctatgttacataatgctgcaggtctccagtccataaaacaaatttaaaccacttttgtttgtcctttgctaaatcattctcttaaaggccatccccagtgacctcctcatcatgacatctaaattagcctatagtctgccttccttgtttcagtgccttctttataaatttcttcttcccttagctaatcaggattgaaactctccttgttctacttctaactctaatcacaccttctcttccttctttgttagttatttcttctctctcctcctaaaatataggcaattttcaaggctttgtcttggaccttcgttttcgttgctcccttcattagcaatttcatctaccccaaggctttccgtgctgaagatttcaaatctttatttttagactgatttctcctccaagatttagacctagggtttagactatttgtgggattctacttgtgtatggttactttagacatcactgtcctcaccaaayctgtttctctcttcatgttcagtgcagtgtcactccctgtcttgtcattctgtctgtcagaatcccctgcttcccttacctcttgcctgcacttctatagaagccctttaagggatctgcctatcgttagtcaaatcccacttcactccatcctcacaactgaaactaaagtactattcctaacagtaccttaggtaattttgctctcctgtgcaaataaactttgaggggttccccagtgcttatggactaaaattgggtcttcaaaacccttttaaaaatctgatttcaactgacctttaaggtcaaatcaaagtatttcttttcttcttgacatgtctatatgtttccatttctgtatcttttttctaacactgtttttttctttagaaagtatttccatgtttctgttaagactcagttcatccttcaaggctgcctccttttatccttttattctatcctcagccaaaagtaatacttggtggtgctctttaaccaatgatgatttgtactaaagaaaaggccaagctgtggccaacatttcttaataaataagaataagagaattgactggcactctaacttgaaaaatgaaactaaagattatacattacaaacatgtttatttacttataattaataaatttaggttgtaattgaaattatgtgctaattcttagaatatacaaagagcaattaaatgtttattttgttggggcacaattttctaacaattgtatgacagaataattcaataacatgattttgacttttgcagcaccaacataaatatttcatgaaaaagtattctagaaactcagttttacctagagcaccttcttattatttcatttcttaaaatatcatgtcagtccttagtcccttcttaagttaattggtttttctcttccaaatccttatttgcatgtgatttgagtggttctctgccatctctattttcattgcctttatgtaaatgggcagatttttcaatatctatgatttcccttttcagaagattagtattgatactgtaattattagacaatctgcagaactctctgtgattatctaacactttatccttaggatttctatagaatttacgatggtttaactgtttgagtacatatctgatctaccaagtgttaagtttcttgaggcaataattatgctttattttaattgtaccctccacagaatttatgtgaatagcttatacatagtaaaaggttaataagtgtttgctaaattctattgttgattggttcccaaatggaaccaatctttgcttttcattacatttcatcattagaaacaatatcataaaactagattatggaaaaatcaatcatttatttttcccataggagcagtatactagtaagtatttgcattccttatcaggctcaattttagatataaccattggagtatcataaaagttataataactaaaatcttctgtgataacttaaagtaataaaaacatattccatattctaagtcttgtaaagtgtgcatcagtgtattatacacaatgattgtgtgtattatatgtatgtaaaatgtaaagatacaaattagattatgcatttaacagaaatgtaaaggctgtcgtaaacatgaattaagattctgacaacaaaaactcttctaaaatttagaagggactttgaagaatgactttaatgacctaattctttcaaaagcttcactcaactaagacttgagctgatactcccttttactgctaagtagagatgggggttggaggaagcaagcaagattaggtagttctgcctcatctaattgtagggattactcaatatttgtttttggagggataatgattttgtttctggccctaaagagctgatctaaaattttcctcattcactctctcctttttcaagttaaaggtattcaatctcagaacaaagaaattctacaccagagcaaaaagtaatgtcaatctacgtaatatttagtcataagaatacttcacagatcgctggaaacccataaaaactatcactgggatagtggaatgagcttttaaaagggaatttctggcagaagatggtgccctgacttagtatgtgccattatataaaaattactgaatgaataaaggtggcaaaaatccagaattggtggaaatatgcagctatgattgagtggtgctgagatctacagagtggtttgagtggggagtgcctgcattgctaacatctaaccaggaaaaaagcactttgccttcataacttgaatgtccttgctctttctataaagcttttatctagactaagtggaatcgtaatgtacctaatctaacgggggtttttcaaatgctcaaattcaatttggagtcaagataaatgaaaatacatacaacttatctaaaagatgagtttaaaaaacattcccttatagttgcctttttttttttttcagtacttcaacaagcccttctgcttttatgtttctctttgttgcctagcaatacctacaaacttgtaggaatattgataaagcaaggctgacctctggtgtacttctgtatccttccatgtaatcctgaaaactaaaatcagatgttgtactctgtaatgattggttcctctacttataaatattgggaccagtggctttagggacattcactgagaacatttactcagtttaacttctattaaataatacttaattcaaactttttttccttcccatctagcgtcttttattttgtaaagtgaattattttttatttattaagaagtgaaattatgtgcatttctgaaaacattatgttatctcatcaggcttctttgatgatcctgccttggtgctccctctttgtttcctgtggatttacctattcatttgttcattcgtttggcatgtatttattaggcgaaagcttttgctgagcatggcattatatttagccagaatcaaagccatattttgtgagaaaaatgttatattttcagtactaaaaataataatggattatcatttacatacagtcactatgagaattatcaaaagttatgtttaagaaaagcaaaagcaaagggaaaaaatgaggtatgagaggcaatggtgagcacagaaagatatttgtaaatgtaattagctgttggctgtaaacaaatagcattttctttttagtttgttaaacattaaactaaaatgctaaacaacaacaaagaggtgcatatacatatgttgaacgagtagttaaattttgagtaccacaaaaaaataactacataaaattgtaacttctaaattgacagaggaaaaaacatgaaagttagaaatgtcaattaactaaaagtcacaaaaacagagaaaaagaaacaaaagaaacaggaaacaaagaataaggtggtagaaataagtttaatgtatttgtagtcaacatcttgtcaacagatcaaagtcaccatttagaaacaagatctattgcagatactttggtatgtgccaggtgcagttctgagtgctgtatgagtatctacccattcgcttttcacaagaggcccatgaggaagggacgttattattaccattttgtaaatgaggatatcaatttggagataaagtcacttgccttaaaggccttggagccaggatttgatccaggtcaggcactcttgagctgactagcattgactcgaattgttttttcattagtaatgttgcctggaaaacataagctgcagaattctatttgccatatgataccacatatttaaatgctaaagtgaataaaacaatactatatggtgtatacctatgtgtatagtaaaagtattggaaaaacacattcatcagaatggtatctaacaatttcaggatagtgggagagggagaagaaacaagtaagtgatttcagaggacttcagatctattttgtgctggtttctcaatatattgtatgaacaaaaataacaatgttcagatttgttaaggctgagtgatgatctgtaagtgtttttatagtattctctgttcttttcatatgtttggaatgtttcataattaaaatatcttctcttgaaataattatgggaagtagactttgctctcttcctcaccttcagaaattagacatttaatcctgaattttaaatatgagtaattatcctttttgcatactgcttactcagtaaaatacactactacccatcattacacacatatacaatcataacagtgttgatgtttgggagagcaataaataacaatccttttcattaccaaaatttagaaccagctgagagagagaaagaggaaaggaatcaggcaaatgcaaagcaaaccacttttgttactgatatagcatgttggaagaatgtgtatagctaaacgtagccatttaatactgaacagacctgcccacccagtcagaggcagcactagaaaaccacatacctttgcaggggagaacctgcccctatacaatttatggtagggagaagcagatcaaacttgaggtttcctctagaaatagaggaagacgctggattttgcataccctgttcctccttcaagtgcctccctctctcctaaattcacatctgtagaggactgaggagtgggaggagggatggagattttttagagaaaattatcctaatggaagtataaagagtaaggaagaaatatttctacatcctttcccaatccactcaaataacagtgccttctgttccttccagatgcatgggatattaggaattttgaggacattcctagcattaatttatagccaaattgttggcacaactaaaaacattctttcaatccagttaaccacattagatattctattgattgattgatggatttttctggagacattacttcttagttctgtccttttttttttttttttttgagacggagtcttgcactgtcacccaggctggagtgcagtggtgcggtcttggctcactgcaacctccgcctcctgggttcaagcaattctcctgacttaacctcctgagtagctgggattacaggcatgtgccaccatgcccagctaatttttgtaatttgtatttttagtagagaagaggtttcaccacgttagccaggctagtcttgaactcctggcctcaagtgatccgcccgcctcggcctcccaaagtgctgggattacagaggagtgagccaccatgcccagccctgtcctttctcttactactctcaggactagtttatctctagatctgcctcagagctcacatctttcattatcatccagggcattctcatcacctcttccctatgttgtatcctgtttcctgctttctttctttatccccttgtttgggtaaagtacatccttttgcagcttcctaataagtacataggacatacattttccacacaggcctatctttctcctacttgagttgtaatttgactaagcaagaattctaagtatgatttcctcttagatttctaaagatactgatttgttgtcttccaccttctagttttactgctaaaaatgtggcatcattctgatgtcttagcccttttctaacttcttttttttcttcctggaagcttttagattcttctttttattcatatcttctgaaattttgtagccctgtgccaatatatgcatatatgtatatccttcattttcttttcttttctgaatattttttgttcactcagtctcacattttattaactcttctctattttctacttttctgttttttagtactaccatttagatttcttccatattatctttcaaaccttctgctgaattttcttttatgatttttttttatttttattgtagtgtcctttcttattttctggatgcactatcttatctctctgaggataacaaacttttttcccagattttatttttttttcaagttttatctttcttttctttcaattccttttttggcttagttgagtctttttccttttggtgttgcagattttcttcataatgggtgacccttggctgtccattcgtattttaaaggtgcacaactaaaatgccaactggaagctctatgtatttgtgtatatgtggggggaagagggattgcctgtggactggcacatttcaccaaggaaaatcaggaaagatttcgaccatttcaagggggacctctcaatagaattacaattaatctatatggctccattgtatgaaatagaaaaagatatcccatgaggcatgtgagttgtttatcagttggtgcctttatgctaattagaaaaaggtagcccctccccctggcctaacaaagcccctccccagggcacagggcttggtaagtggagcagggcttggattttatccctcactcaccttcagccaatgtccctggtaaagataaaaactggagaaactatgtgagggtcctgctcccaaatgttaatatctttaggcctttctcataaacaggccagtttctcagagatagacctttagtgttctgcctggggatggggaaggttgctggtgtagggagaagctgaaggtctggcaaaatgaagctggggaggcgagagtgcctctccattatgtctgtagactttcacttaattccctagttaagtgaaggagagtgacccacacagatttgtacacctacatgattctgcaccttcagagaataaacttccagtcttctgccttgatgaggttgagaagtcttctgattgtaaaggagggaggaagaaatatgcagatccctagaacccaagtacttaactgccctctttttttttcttttctacccctcacctctgcctccagagacacctggtgcctccagagacacctggtgcctccagttccttaacatttctgcagttctgcggctttactggtttcccactrctaacctcctttgcaaacttagaattgagctttctttagtgaagggcagttatcttttctactattcagtagcttccagattttttttttttttgagacagagtcttgctctgtcacccagactggagtgcagtggcgtgattccagctcactgtaacctcaaactcctgagctcaagttgatctatatgcctcagcctcctgagtagctaggactacaggcatgaaccactatgcctggctacgtttttaaatttttttgtagaggtagggcctccctatgttgcccaggtttgtcttgaactcctggcctcaagtgatcctcccacctcagcctcccaaagtgttgggattacagacctgagctagcgtgcctgtccagcttccaaaattttgttgctgttttgtctgctgttgtgtcttctcaggttttgtttgtccttttagatttattcagtttttattgtcattttagtaggaaataaggaagcgtaaataaacacaatgcttaattcttcatgcttaattgaaagttcctaacttctttatcattcagggcagaggctctgcaattctgattttttgcataaattcatctagtatgatttctaaatgtgttaaagatttgctatatttttctcaaggtgaccatttgctgcactgattgctctgactcttttgatcttttttataaaatcaaaagacctacttggcagagtctgtttttgatttttatttgcagtagttgagatgctatggccactgtaagattgtgaagatgaagtaggtttaaacaagagttaagttgcagctttgctggattcattgcaccttggtaagcaaagtcacttggacttcacctcatcccacaaaagttgattggcttctgtgggcattcggccagtttttttagtgagtcatatcatgatttcctaaggggctgaggagacctgggcagctaattcatatttgtgctattactgggaggtatgataatctctagtgtctgataaaactgtgatttaatgttataaatacagaaatgtaccagaacatacaatgtttttattagcctagttgtaccccacagcaatactctagtcaaataaataaaaagtaatattctttaccacctacttgacctgaattattctcctttgtgggtgaatatctatttgtaagatcttaataacaaatcacaatatctaatttactaagatactgtggtctggaagatatgaggatctcttctttcagcacaggattagtttgaataccagtaagtgtttgcgtatgtagtaactgcactactacatacgcagggcccaggaagccattgcaagtttctgcagcactatttgtaaacatagttccatattaacaaaaataaataaaattaaaaataaaaatgaggtctgctaaaaacctgctttctgcttaaacaccttcccttagcattgaatggccttctgcattgctatagattctttcatctgaactatttcattacttagatgctctacacgcagttaaatagggctttcccagtgcctttataaatatgaagaaagtttatattagtgaaaaaatgtgaagttacaggttctctcgtgttccatagaatatatttcatattagtgatgatcaggatttgtatgggatagggtatagaatgaagtaattaattatggtattaaatgtttggtttaagtgtctcttatacacacacatacacacaaacacaccaagaatacaatgtattttatgctccagataacttgagcaactaaagtttctccttgctgcagtttatttatttatttattttaatttttgtgggtacatagtatgtgtgtgtgtgtatatatatatatatatatatatatatatatatatatatrtrtgtgtgtgccatatatatatatatatggcatacatggagtttaaatgatccttgccattaggttgccagactgggaaaataagctgaagcgtgattttattttggattaaggcaaggagttttagtacttgaagaatacggaaaggttagatacagccagtatttgacagaagagtatataaaggaccagtatttatatggacaaatgagaaagtggtcgaatctagtactgttgaatagaactttatgtgatcctggaaatgttctatatctgcactgtctgacatggtagacataggcacatgtggctgtttagctgttgaaatgtggttagtataactgaagaactgaatgttaaattttgtttaattttaattaatttaaatagctaatagaaaataggattattttacaattgcctggaaatatagataacagagttaagttattttgcacagcatgtctagtctctaaaacaaaatcactttagtagcatgactatggtgcaggtcaggatttctttcattcattcatacatatactcaacaaatgttaagaacctactatatactataccatactgtgcttactatattatgctagatgctgaggtaaataagttgtctgttgctgaattgggctccaaataaatgaaaacctttttaacgtcacaatatatacatgaagctgaccaattgaggttggaaggcgccagtggttctattgctgttacagaacaggatagacaagcagggcccaggaagccatcagggggcactgcctatagccagggaaagaggatagagccaggaaacctaaagagcttttttttttaatataatcagttttaaggaatgatgtgtggtcaaaaattacgagaagatagagttcaaaaagctgtgatagaaacaagggccaaagccaaacagaaattattgcaagtttagcacagtcaacagtacattccaggaagctgatgtttaaccagatataatattgttcaatgttacagctgagtgacagtgatccttgtggaaaatccatgtaccaggaagatgtaggtcggcagaggtatggacctgccactcattttccttattgtcctggctcaatggtaagggaggaaggagtgaatttataaattgagtagtgatgcggctcctatgcaggtgattctgaaaccacgcttgccttgagaatcccagctaggttctgcatttctatacagtatctacaaaggactttctttggcttctttttaaaactgaatatccaaccaaaacactgtaataactctttcctggatttcagtgagaatttggaatacatgaaagagatgggagagaatcatcttttgttttgttctttgtaatttctgactcaaagattagaaaggactgtagccaaatgtttctgagcttggaacctgatgtaaagcgatcccttgctcctaaaggagaaaggaagtgaagtggaataataataaatgccatctagttgtattgctttataggcttaaactgacatttgaataattcctttcagaaagtatgtaacatattttcaaaaagtctataaatgctcagctttttggaataatagaaagtagagtgtccttttacacttgcctgcaaatatacaatccagttattttctgaatggcacagtggratgcatggaaagcagacttatagctaaccaatagcattattttatttaaggaaaccgtttttatgatgaaggttcagaatcctccctttaaggaatcttgagaaaaatgactcttctgaaagtttcttttcacatctcttgtgacttaactgtatgtgatgattttgacaactgtaaagatagaaaagggttttttttgatttgtttatagaattgctccctcttccctggacagctgtttaaatatatagctgcacactcatgctaaggaaggtccagagagagggaaatgccactgtctcttgagttcctatcaaacagtacgtcccagctcctgcagccaggaagttctttggggaaaaaccagtggtgcatttgcactttgctgcctttgctctggaagttcattttcttttgtcctgcttacagtgatacagaacagctgctggccacattggcaaratatttgaagattgttatttgcttttcagcttcttcttcttaggttaaataaatggtgtttcttttgtgtttctctttggggccaattttctcatcatttttttgttcctttaatctctttgattagtttcctcaggactccttccaaatcctttagagaaatttttagtttgtgggcctaacattgaacctaataagtacccttatagagggttgaccagtggtgagcctgaagagataattgccctgtgtttcttattgaaaatatttttgtataaatcttggttttaaaattatagcataacatcattggcttgtatttaacctgcagttttcacaggagctcaagttttcatatcatggacactcaataccaggcctgctaaatctttattggttcagaatggttttgcttagggaaatttacactactgaatctttttgattgcatctatttgccaactcctacaatattattgtcattaaggatttttattcaatattcaaatttctgtacccactttgcataggattaaatttttgcacatccaaccagtcatttatttcttcaacatctgcttattaaacctgtttatttcaggcactgtctgtactactaccatgcaaactattaatgtattgacaaatattttggaatcacactacaaccttatttcagcccaaagcaagggtgcattggccccatttcagggaactgtagtaatgaaccatggaaaacacctcattagaagatgagtcttcaaaaatagtattagagtggagttctggtatagtaccagccagtgaactgagcctgccaaagctggtttgagcatttgctccagggtaaaggttaagcaagagttattgtttcttgggtaacaccatttaacaagctttatgatggaaatcggccttctaatgttcacttattagctaaaatctgaacctcacttttctcccctgacattctgctaactatggctattcccaggttgacttagtccttggtgttctattctctctgtcattttctttggtgatatgattctgtaccacaattttaactctttttctttttacttatgtttatactttctgtctccaagccccagttctgtgtcatcagctaacttaaataccattatctgaaatgtgttttgtcctaaacctagtacattttattgtctttcaaattgttgccagttatgatagttgcatttccatagctgacacacacattcttcaccttaaacctcatttatttttaaaaattctgttgccctcttattctgttatattctaattatcacctgccttagtgtcctccttcattaattcatattgcccattagggacagactgaattgtattatataaccctgatctaaaacctgcagtagttccccatcatctgcaggaggaagtcccaacatttcagaccacatgaacctgtgaacgaaacagagtcaggatattaaacacaattattctagggccttgcttttgccattgctccaatcatccaatcaattctgtcaaagcatagtctttatcagggaaacaaacatagctcaggtgtagtgggttaaagaattagagtgatgcaggtgtagacattacaggacttgatgaaatcacctrcattttatcatggtagaagcttctaccttcatggaaacttgagatttttagaaactcctaaaaggcagtatctttgaaagttgggacaaggtaaatagattacccaggattaagattcgaaccagaagaaactgactcaggaataagatgactggatggaagaaattttaagcacatttttcataaagacctgaagcagcaacacccgtgaacaggaaatgatatcccatgaggaagaacgagaagcccagccaagactttgatggttggagagagagggaggcagagcaaagaacagattcatagaaggggaaaaaaagtgaaatcttcaggaagactgttaaggtagtataaactagtatttacataggatcttggcatctgataatttaccccttcctacaactcttccaagtttgttttaataggccagtattctggggacatgattctattctggatttagaacttttcctccaggaggaggtttttatgcatatgttgaataaaatatttattcagagatatggatcatctgtgccatatgtgtgagatgtggaagatggcaaataagaggcaacatataggattacctgcctcttactacctcaatcatcaatttcttttcttaactaatatgccaagaaacagtttcacatttatgtggctatcatggtgtccctagcttgagcctaagccagccctgtcacccaaatgcccacacgtttgggcatgtctatgagattggtgaaactgacctgccagaagacaattcacaagagagactagatagcatttctggggagagaactccttcccagggaggatgaaggtagacaaagttgaactattaacaaaactttaataattgttgygagtgatacttctgagaatatcattgtgcccatcacttgattcatgtactggacattcccccttaaaataccctgtgactcttatagggagataggcaggaaagaactgtagagaaaaacaaagaacttctcactaaagtcttgggagcctttggagcagtacctcttcagtatttgtgtgaaaaattacatccctgaatcagggaatgaggcacttccagacagctgtccacttttcatgcaacacagagtaacttctacatattatgaatttcagagaacccagagcaactttaggtcttcggggactcaggttcactggccagaatgcaacaggagattgtggtatccataagacatgggcacaatgttyggcaaaggcagcagtatccagcaagttacagtggtaaattagtgatatgtcagctggaggcagcgctaaatacatttagacaacattgaagacctcagagactgagtttcagacatcatggatatgggggatacctagtgcaggaaaagagaacaaaatgtcaggtatcatctatatatgatatatatcatatatatgtgatatatatcatatatatgtgatatatatcagatatatatctatgtagctggcagtgcttattcaagagcacacataagataacccttggggatccataaatatttgtgaagggctttrtaggacattagagatactgcattttaataggtagggtcaggaagcagcacaaatagaatccttaagcttcttgggcttagtggaagccttttttctgtttcttttttttttctggttgttaaagacatcttgaaatgaacaacatatttgacatttttaagagagacacaaggtatgttttagaaattatataaatatatatatgttgtttttataagattaagggaatgataattatgcctatgtaagcattagtctactgtctaataaatgagattacatgtgggaggcaatatatatatgaaacccttttatacaatgcctggaatttagaagtgtgcaaacatttctaatatcctttcaatcaggaagatgcttataatttggggcaggataaggatagaatatttgataggcttagaaaagaatagcagttcaagcctgaatgcacattaggttcacctgtggagatttttaaatacagaaatgcctgggaggatcccagatctctgaatcaggatatctggctgtaggactcagatgctttttaaacagttctcaaatggttctaatgagcagccaagcttttgaatcactaatgtggaagatggagaaagtattagttttctcctttatgaaactaaaagctaaaggactatcttttctttctttagagatatacaagggtcaaatggaaagagtacagggatgtagtyctggactttactaatgaggagggtcacttaatctctttcttatcagtttcccagctgtctaatggaggctgtgatactttctctctagagctattgtattaacagcagcgatacatctataccataggagctgacctgtagtacccatagtaggtggacaatccacgttacttcttactgttccttttctcctctctctaggtagacagtgatttttttccaaaacaagtgcttaagcatcccaggtttaccctggactttagctttccatctgtktgtatttgatcatgtgcctatcttgctagatactcaagattaagcttttgcagttcatagtataatgggagagatgaacagcaaaccaattatactgatatttattcaattgcaattttgttaaatgtcacaaatgtaaatgacatgttgtaaggatctctaacaagattttctaacttaatttacagtgtattttagccttcttctttagcaatcctttttttcatattgatgtattgacagaatttttttccttcaatgttaatgtagaaaggtttactgtagggaataaaaatcccttatccacaagtataaatgaacagatgcatactatattttgcctgtgggttacattatacatatgcatgctacttactgttatgggtaaatatgtgtatccttaatgccaagttttctgaaagcccctttttcatgtattttaataaaaaatctagggcttaaattttatttaagctgttggattaaagacaaaaagactagttctcattatggtctaacttggctgaagtgacaatgaagaagcatctagagtcagctctatttggcaacactaaaaagagaaatctctcttaccatgtttccaaaaacaactttcaattaaatttcatttgggattagggcctgtcctagttacatacttcacaaaattaagatttataacaaaagaatcttaatgttttaataccattagccagagctataatctatttatttttttcccattgtgtaaaattcagtgttccttttcaaatggtatgaaaattttctctccaaaccttctggtgttggcagtcagatttggttaggtggaaaaatatttattcagttaaagattatatgagtctctttcgcttttcactttttataagtaatttaggccttcaggcatttgtgtttatgagaagtttcgaagaaatttctttaactgaatagtataggtgcccatgttgaaagattatcttaaaattggcagtaaaaatattagatgaataaatggctcatggaagtcactttttaaaatttatcaaccgttatgtatttatgtaaaaaacaaaggccatttttctcagttcatattacataccatgtaaaataaatatcaaagtaaacgtttgagacaatattgtaaaaattagcacattcaaaccatttaaaatttcaaagcattgctaaaacattaaaccttttagatatgttctcaaccaaatattattatctctattttataaccagtgttatggacatccaaggacaatgttgattttgttaataaatggtgcatcaaataagtatgtggtaaaaaatgaaaagttgatacatttattctttccttattatgtaaagtctgtttgtaataaaaaggagttctgtacatagggcaatagatttatgcacaatgaattcataattgtttcccagatgttcatatttaactagcaaccattatgaaaggagtaaggctttcaaaggttatctttctgattaacagctttcaccattcctagctgggtgattttatagtctgccagggaaattaaccatgtcacctccagatcatagctatcataatatagatagaatataattccacacagttctatcatattttgaaatgaaaactagatatgacttgatctcacttaatggttggtgtattgtcatagacatattgaatttcccaaaatctgaaggaaaatgaacagtttgtcaaagtcggtatatctgaagggaaatggacagtttgtcaaagtcagtagatggttttaaatgctgtacaaaaatacagctgtcaacagagatgaaacatatgactacaaaagcactctcaaggacttggtgtccaataattaatttttctttttttataatgcaatccagtatgcctttgtgtcaaacttcattttctaagaaaagcatctttttgaaacaaactatccctgtagtaaagaggaaaatactaaatcagaaaaataccaactttatagatggactagaaattttagggacttctttgcagtctcaacaatgaaatatagccatgaatgcatatgccttcttaagcytgagtggcttattataatcagactaagttctcataccatgtaattccattgtagtttatgacttaattccgtaagaattataactgaaagagccttgcctaatcaaaataaaatttaattacatattcacattataatctaaagaacaaaggttttagtttaaaatcagctttatctctttgtcctgaatggaaaataaagaattataattttttcctcagttgtgactttcttgccagaactcatgaatgtttctgtattcctctaatgtccagatttagatatttccttatccaaccatttttccttctatatcttctaaccctttgtgttagtttgctagggctgccataacaaaatggcacagactggatagcttaaacaacagaaatttattttctcacggttctggagctagaagtccaagatcaaggtgatggcaggttggtttcatctgaggcttctctctgtggcttgcagatggttgccttctcgctgtgtccttacaaggtctttattttgtgttgtgcatccttggtgtatttcttagtgtccacatttcctgtcctcttaaggacaccagtcaaattggattagggcccaccctaaaggcttcactttatcctaatcacctttctaaatgctctatctcctaatacagtcacattctgagacaccaggggttagggcttcaacacatgaacttaagggagacacaattcagcccatattgccctctatgtttcactcccactctctctccatcctttgctttttcttatttccttacttttttcttaarcacttattgagcacctgctttgtatgctagccagtgggctagaggctgaagatacaataattaatgaatgaaatatagttttttcccttaatgatctaagggagaaagcagggaagtagctaattacattacagaagggtgatgttctgatcagagtgcacataagatgctatgaaagaatagggcaaggccattgaaaccagccttgaggagttaaggaaagcctttgctgtaaaagcagccttttagccaagtcttgaatgaccagtagcaattagtcaggagaaaagtattgagagaacgttgcacaaagaagaagcaacatatacaagagcccatagatgggaaagacatggcataattggaccctgcaagtaattcagtagagtttaagtgaagcagttttgaaggttgagacaggaacagtaagtaatggagaaatactgaatcagcatttggtaccatttacaaataaatttatataaaaataaatttatgcttggaaaaataagtcatattaaaatcaagatagaaatgacaaacttggaaaaaatattaagaactcagagcagaaatagctagtttccttaatatagagagttctatgaatcagtgtgaaaaggccagtaagatagtagaaaaatgcacaatggactagagttgaaagaaaaaaaatgtagccattatttaaaaaagcacgtattggtgaacatatgcagaaactggaacccttgttggtaagaatgtagaatgaacagccactatggaaaacaatatggagtttcctccaaaaattaaacatggaattatcatatgatctagcaatccaatcccgcttctgagtatatatcccaaaacaccctgaaatcaggctcttagagagatatcagcatttccatgtttattgcagygtttttcacaatagccaagatatggaagaaaatgtggtctatacaggcaacttaatattatttggtgttaaaaaagaaggaaatcttaccatgtgctgcaacatggatgaacctgaaggacattatactaagtgaaataagcatgccataaaaggacatatactacatgattccacttatatgaggtatctaaaagagtcaaacgcaagaaaacagagagtagaattgtgatttccaagggttggggacaggaagaaatagtggttactgttcagtgtgtataaaatttccattatgcaaaatgaataagttctagagattggctgtacagcattgtgcctctagttaacaatattgtattgtacatttaaatgttttttaagaggtgatattgtttggctgtgtgtccccacccaaatctcatttcaaattgtaatccccataatccccatgtgtcgagggagggacctggtaggaggtgattggatcatgggggtggtttcccccatgctgttcttgtgatagtgagtgagttctcatgggatcggaaggttttataagcggctctttgcccttctctttctctctctcagctgttgccatgtaagacatacttgcttctccttctgccatgattgtaagtttcctgaggcctccccagccatgtgaaactatgagtcaattaaacctttttttttttttttataaattacccagtctcgggcagttgtttattgcagtgtgaaaacagactaatataagatagtagctctcatgttaaatgttcttaccataataagacaaataaatagaaggtattatcgatagaacgttgtacccaaaagaaaatgcaagtagttattaaacatgaaaaaaaatgttgaacttcactaaaataaatgtagaacaacactactacaagatcccttttcatctttggtattgtcatgtatttaaacatttgatgatagtatgttataaaggcaaagaaaaacaggcactcacctacattgctggtgggagtgttaactgttacaatctcgacggtgcaaaatttggcaatatctctgaaaattataaatgcacaatcccagcaatttaatttctaggaaatatgcatacatgtgtgaaaaggtgtttatgcaagttttcattacagtactaattgtaatgacaaaagtttaacatctaatagttaataatattcattaagtatttcaggggaggtgtagtgatatctgcaacttattcagaaattaataaaaaattacaatggattcatagagtgatgaagggatgattaggtatatggtaaggcaagtaatactaaaatattatttatagaaactatctggtttgtgtctgagtgtttaatataaaattatttcaacttttgtgtacatttgaaaacttttataataaaatgttggggaaaaagtttgctaataatcttaaagtctgaccacagggacatggtttacttagtgatagtgcatccatattatggaacatgacagctgttttaaaaaagaatgagacagatgtttgtgtccagatagggaagggtctgcaagatatattatgaagtgaaataagaaagatgtcaaagactatgtataagaccaccatttgtatataatggctctgaaaggctgtgcaaaaaattgggaaaaaatatagcctctggtaggagaacttcttgtggaggaaggagtggaggggaggtatatttttttctacatttttgaattttgaatcatgtgcattcactgtccattcagaggtagagtttaaaaacataatacttattgggccagatacttccgatgtcttactttatgtaattctcactgtcagcctgtgaggtaggtattattattattaccatttgcacttgagaaaaagagaggttctgagaagcttaataatttatccagcaccatacaactaataaaggagaaaggcatagttgaaacgtaggtgtaactttgcactgccagtaatgagaggagtgtggcattccagacagagaagtcagcctaagcaaaaggcacaaaggtgggagagtaaagtgctcgttgggcacctgtgagcagtgtagagtagttggagtrtaagatgcattgtggagagtaatgggagagaatgtagatgaaaactacaggccagactgtaaaggaaacttagacactacattatgaaatgtgtactctgtcttacagatacttaggagccataggtgatgttaaataaagcttttaaaaattactttttgatcctgtatggtgaaggataggcaggcataaaaaaacgacaagtttgggcaactggcttaatggggagcctgtattacctatgttgtttggtgagtatctgtgaagtaatgaataagaaatattttatgaactgcaaagtgcttttcattataaattacattttttatagacctatgaagaagatcctacttttctgtattagaaacctaccaaatagaactacacagagataatttactttagaaagaattgtgtccaaagaggacttatttctgacataaaagggtgcaaacagactgcttcccatttttttctctaaatcgcatcttccttttaaaaagaaagtaatacaaatagctggcactattgagggatatctatgtatcagaattttctcaacttctttgttgcagtatttagtgtacatgtatgttatttactagcaaaatttcccttgcattttaatgcatgctgactcatttgaattcatttaaatatagtgttactgatttacattcaaggatgattttacattgttatttataaaagtaaaaaattggaaacaacttaaatatccacaatagcagtttgtttaaataaattattgtgcatttatattatgggatattatgcaggcatcgaaaataggatttcaaagagttattaatggccaataaaaaatagaaaacaaaattgtatctacagcatgactatcactttgttaagaacatgagtgacttccaggttgttaaatccaactattaatcctcagccatcattgtacttgacctgcctggagcatttgagtgtagatcacgatcactcctgccttctttaaatactgtcttcacttggcttctgggacagcactccctcttgcatccttcttaacttctcttgttttcctcattcccgctcatcttctcaggcctataaatgttggcataacccaggactcaatccaattttctttacccttccccatctataccttctcatccagtttcaggacattaagtcccaaacacacatcttcagcttgggtatctcccctgaactccagtctgctcaggaattccacctgcttgtcaagtaagtgcaccatactgaacttatacaagataaacttctggttctttcctttacattctttcaacartcttcactgtttsagaaaatggcaagtctttctgactccagttgctcaggccaaaagtcatgccattatcatgggctcttctctttgacatctcacattttggttacctagggagtgagagagctgctrtcatcgcctgtggcctgtacatcatagagaggtgattctcctgagaaatgaaggactgagtttctcagtgcagctgtagaaggcttggaacctaacaacggttggcctgatagtgagggaaggagataatgtcccattgaattcaaattttagaatagatttctccctcgtcttaatccatattcttatgtctcccattgtttcaattcaaaacctcaggtttttggtttttttttttttcatttgtaaaatgggcataataattgcctgggcctcatattgtcttcttacgtggatgaatttttttaaagcaggtaaggctttaaaaaaaggtaatactaattaatatattagtattttatattataaaataaagaacataaaggtttattatgtaaacttttttttttttctcgaaacagaatcttgctctgttgctcaggctggtgtgcagtggcgcgatcttggctcactgtaacctctgccttctgggttcaagcgattctcctgcttcagcctcctgagtagctgggtgtattacaggcgcgcaccaccatgcccggctaattttttatatttttattagagacgggattttaccatgttggccaggctgttctcaaactcctgaacttgtgatccgcccgcctcggcctcccaaagtgtaaacccttaataaaatattaactattacttatctgttacttatttttacctctggtgatatacatatatcctatttataatagagatacttacataaattgattgctactgagtggagcattttagagatatgagaaatttagcaaaaactttgttctgaagctgcttgtgatgtgagtcagtggagtttttaagggacactattaaaaaatctcttgctaatttgaataatttaaacaaattatatgtttcagtttttgtctattttcttgccagtttatatcaggatggatagaattatctgcctcattttttttttctttaaatgttttaaaatgtggagtcctctcttctgttacacagtacagctgcatattatcccaagtgtgcattcaatttatatatacaccgtgctattctattggggaaaatatggtccttcatctaaaagcctaacataaatttgacacacttccatgaagtgtgaaatggttgagacttctaatcctaaattattttctaaatgttcatttatattaaaagcctcagtaggcatatgtactccaaatgttaatatcctaggggattacttacaatggtcatttggacatagccacaaaggagactatgaaaaatttatcagaggtggaatggggcttgataagtcatcttggcagaaacagtcctatattgttccaggcagatgagtatcactcttattgcttttaaggatatttgaggaagaaaggttatatgaccaattggtatcttattttggtatttaayaatcatagctgtgaggaaatctttccttaatctttctttataggtgttactatttaagccttccttctccccttccccccacccacctttttattatgtgcttggtagagaacacctggcctataaaataactttttgcacttatttttgagttgtctcctaatctttcattttttaagctaatgttcttaaagattcaacttaaccattttgtggcatttttaaaaaggcaatcaaatgctttatatattttaatytttcttcagaactgagattagaactgcccttctcccccgccctcctgtcccctccccctcctcctctcctcccctctcctctcctcttctctccttttttttctctctctctcttatttcctttcttccactaattctatcattcatcaatactttttctaaacctacccagatctgccactatgctacgtattgtgaatgcaatggggaacaagatacatgcagtccattttcagatggagttcacagacaagtgcaattctgtccctcatttaggataatgtgcaacagttgcctgtctttgtttgccagtgtcaaagaccagcccatcacaaaatcataatcatacagttttttaaaaagtgatgagtccatctaggtttttattagcrtcataacattgaacttgaaagttctacattttgttcaacatcactttactgtgagccaaataagagccacagaggaattccattcaggaatgaaggaagagacctacataggcaatcttagaaggggtttatgaaccagcccccccacccccaccaaaagtgaatgtcttgccaaagaaaaagtagtcattctaaaatgattgtattccaggatgcagggaaaaatgtgcagtgcctttgagaatgggtggagagtgatagtaaatcaggaaactggcagttgtatttaggcattaagctaacratgagaatatttgacaytattggtgctaatgtttctttttttttccttaaatttttgcgtagttttcctctgtataaacagtgtctcaaagggacattcctaactggagtagaatattgggaaagcagtagaggggaattatggtaaatgggcctccaccaaaagacaaggctgtagtcttttaactcttcactaaacaatgccaaaatttaaagaaacaytggcaccagtaatgtgaaatattctcattgtgggctgctacagccactgccaccatcattactaacaactcacaggcaactgataggaaaacactaataaaggtcattagaattataccaaacactgatgccaaataacaacatgcactaataatcctagccacatgtactgagtattcactatgtgccagacactgtagcaaagaccttatcatacattatctcattgggtcatcacaacatatccacatggtagaaaactattaatgtccccgtcttacagatgaggaaataaaggcatggaaaaatcatgtaattttccttaggttacacagcttgtaagtgatggagttattcaaacacagatctgtctatttgcatagaaaacaatcataaccacgaagctatggttcctcttcagaatctctgaccttttacctcactcacaaaccctcatttcaagctgttcgtcaatcagaattcattatttttcccaagtccagcacatacacagttggcaactgaagacaggataagagacttactaataaaagctttcaacatagtgcttacttaaaatacagagaccactcaagattaaaattcagactttcaaagaatggtgattcattttgcagctgcaactgctaactattaactaattaactsctctcactattgactgtttaccctattttaaggtggcagaaatatccagttaatcccactgttatcaattgtagagacattagatttacatgtaatcatagctcaaaatcatgcttgtggctgtaataagtggttgcattcttttatcagtagatttagtttcctagtggccagtaattttgaactctcaatgtgtgctgtgattgaaattaaatattcattatgatcttttgaagtttacattggaaagtacttcaaaaactatcagtacatcaaattataatgtattgtatctcttttaaaaaacctgatagtggtaatcctttgtgaattttgccctttacaattctttcatcagtgcagatgttagcagctcacatgggacatctaaaaaacgccttctcataaaagctgtggaagaaagtgagccataaatcatgggctttaaatatggggagagtgtcttgctatggttagtacagttgytcaagaacaaatgattgtgaaaggaaaggtttaatactttattagcattaccttatcatagcactttcttattgatttgtttacagctgattggactccttcttttaggagtatcatttaggatttactgttttgtatttttcaatagctttttttaattaccaggaaaaatattcaaagaaaattattatattcattgtgtgtgtgtgtgcgtgtgtgtgtctttgggacaggtgccctcagatgacattcacatttattacattttatatttcatctctcatagctcttggacttgactgatggttaacagtaaatatgtatcattattctttcatgcaacttggccattggccgtgattttcatagcagtaatttaactgctgaggctgcaagtcaagattcatcagttttattaggatgttgaaccttaaaagcttatggttgatgatgttattgactctctgcatttcctctgtagtgaagggaaaactggaagtgcatcactttttaatatagttcacatgtgggtggctataagctatgagctggaaattctgtcagagctcagtaagtgaccaaccccgttacctccactctgccacttcagtggtggagcattttagttgcttcagaatgctttagtctttcactttgaaaacataaacttacagacttactttgttttctgactttttggttttttagaatactcacccttttccaatttctaggcatgtgttgcatgaaattttatccatctttttattatgaaaatgtttcaaatacagaaaagttgaaaaacagttggaaaaaagacatcttttgccttaatgtatcaattgttaccattgtttctgacttattttctcttcttatatatagatataaatgtataaattttatttatttttaaattcttatttattttttaatttttgctcatttgttttatttttcctgaatcatttgaaagaaagttgctaagttgtagatattaagacattttaytccttagtacttcagcatgcatcacttaaaagtaaggatattctgttttataatcaaaatacattattacatctaagataggtaatgataaatgcacactgtgatctaatataaagtccgtatttcagttttctcagttgccttgaaaattctcttagttttaattttctttttaattcaggatccaattaaaatctactcattgtattaggttgttatgtctttttagtttaatctaaagtttccttccaccatttcttcctggctctgctttttttgttctttgtgaacttgacttttttgaagagttcaggtcagtagaatatatatgaaagtctggatttgtctcactgtttccttattaaattcaggttaaaccagtggttctcaaactttagggtatttcagagccatctagagggattgttaaacatagatggcttggccccacccccagagttcctggggtctgtgttggagcccagtcatttgaatttctaacaagttcacaagtttaacaagtaagtctgtaagttaatacccatgctgctgtctcaggactacactttgagaaccactgggtttcacatttttcacactgataacatgtgcattccttattgcattacatcaaggacacatggtggcatctggttttactgttagtgacaagtttgatcatttgggtgacatagtgactgctagatctctccgttgtaaagattcattttttctcctttgtaattaatgagttatctgtggratttattctctgaaattaataaataatctttaagggaaaggtgatataaatttctgttccttaacamccaggttttaacatccagtgatgatccttgcctgaattaattgtcattattctttaaaaaacttttttttattattccttcttctctcccaccctctcctctctcttccttgaatccttccttttctctctcccctactttcttgcctcctcctctctctctttctgtctctccttcccgtcctccctttctccaacacacatgcacacagtttttctctgtctcactcacactcacagagtgtctctgctacttctctttctctctcttcctctacctttcctcctttccctctttttacctcccagtgttatgatttaatacattgttattctttttgaagcttccagattctttttttttttaattgagaacctctcctgtgtccttttcagatgatgccatagctattgttaagcacttcctggctttctggcaaaaggtattcaaatcttaccttgttctttttctgccctagatctggaatcaaccatttcttttggttggtttcttttaatagggaatgttatttagaagccaatatctgggtttttggggttcttgttgctatttggaatgtcattgctgctaagacagaccatagatttaattttttaagaagtgatgagatcatgctgacaaactccagttcaaatgcagcaccacgggtttcttcatcatctccccccagatcctattggcatccccatttatctacagtgagaaccttgatacttaaaaaaataaaaatatctacacacacacacacacacacacacacacacacacacwctctgtctctctctctctaatttgctccaatacatacaaaatagattcagaattacagcaataatacttcaaccaacaataacaaaactactgagaaaattagattttcttacaattattgttcttcgaatttagtagagtgtatacagtctgagtgctgaatgcaagagttcctttaattatcatttttgtttgtattatcaacttgatatagagtgtattacaattgtttctttgttattcccttttagggtttactttttccaactattttaatttaatttttgaatatgtaaattatttccatagtcaaagttaaaactacataaaaatggaaaagtttccattctatttgtatttactagtttcaggtttattttcctgtgcttatttttgataaaagtaaataaaaatataaacatttacccctatttattatacaaaagaggcgtattattcattrtacattctttggcacctttttttaaaaaaaagaaacctaatattatatcctgggaatcaccctagtatcaactcataaagatcttccttcttttttctcacaggtacatataacccattgtgcatgcactgtaggcaatttaaccagtctcctagggatggatatttaggttgttcccaaagttttgctgttataagtaatctaagtagcttagctgtcttgattcaggatctctcatgagtttgaaatgaagctatgggccagttttcataaggtttagctgggactggaaaatctacttcctagctcactcacgtggttgctggcaggcttttgtttcttgctgtttagacttctccataggmtacctgagaatcctcaagacatggcagttggcttccctctctccagggctgctttctgacatggtagctatcttcctgtagaatatgatgagagagaaagcatattcatccacctatccccacatctaaggcaaaaaccatagtcattttataacctaatattaacagtgacatccaatcctgtctgctatattttataaactagaagtgagtcaccacgtccagcccatactcaagggaaggggagggaataatctctacctgttgaaaagagaagtgtcaaaaagatgtgaacatatcttgaaaactaccacattgtcttattcacagtcctcaagctcacaacatttgttctatgtatgatagcacctgtgctagatgctgttacaaatattatctcattggagtcctaacaaccatcttgtacttgctctagagtataactacacatccattgaattgcaactttgtagttctaatgatggttccaggttataaatctgtttgtataattatattcaatattaaaaaaatttgagtagtttgtcttacatctttctgtttttcagtgtcttagcttttgtttaaagctttgaggacaatgatttatttttatttttatttctgttttctatttttgaaacagtttcacttcattgcccaggctggagtgcagtggtgcaatctcagctcactgcaatctctacctcccatgttcaagtgattctcatgcctcagcctcccaagtagctgggattacaggcatgtgccaccatgcccagctagtttttgtatttttagtagatacagggtttcactgtgtttgccagactggtttcaaactcctgacctcaagtaatcctcccaccttggcctcccagagtgctgggattacaggtgtgagccaccacacctgaccaggacaatgatttttaaagaaagcttgtttggggttgggacatgggtagtgatagataaaaaatgattggctacggattgattggtgaagctgggtgatgggccagtacctggggaatcacagtggtatttaatctacttttatgtatttgtttaaagttttcctgtatgcaaaagataaaaagaaaaaaaaacttctctctccctatattttcattttttgtttttaaagatttattgtgatcagagaatatgygcttttgatcattgggaaaaaacagatttgttattcttctgagaactatcaggttttctgggtcatcaggaagaacctcaggttcctaatgtgtagcccttcttctgtgataggattccaaaactttattatacacagaatcacctgtagagcatgataaaatgtcccagtgcccaataccagcctgtcttagtctgttttgtattgctataacaaaatacctgagggtgggtaatgtataaagaaaagaggtttatttggcttatgattctgctggctgaaaagtccaagactgggcagctacatctggtgagggcctcatgctacttccactcaaggtggaaagcgaaagaggagcagccctgtgcaaggggatcatgtagagactgaggatgcattagagagaaagcaagagagataaacctgggaagccatgctctttttaacaacctactctctgctcttcaggaagtaatctattccccctcctcacctccccaccccgcccccccgcccacctcccaggagaactcattcaaccctaccccacctctgctaaagggcctcctccttacactgccacattggggatcaaatttcaacatgagttttggtagagacaaaccatattcaagccatagcgtagccattataatttagaatatttggayagaataaagaaatctgcattttaaacaagtacccctgggtgtttctgatttcagtgatagatggaccctaatttgatatatcttgtatggatttatagcaaggacacccttacaagtaaggcagaacaatggatacaaagatgaatgtgatgttcctatattatgctccatttcctccagaaacttgtaaactaacagaggagacagatatgcaataagtgttataataggagtaaacagaatcgggctgtttccatattattataccaggtctcaacagggagtgaagatcatatggaacaaatttcttgtctggatgagcaaaataagagagagctttggaaatatagagaaatatataattgtttgcttttttaaagaatcaaatgtttcaagctagtcttggcaagtgctgaaaattgttcattttatagatgatgtctgatgagtaccagggttttaggttatgaattaaagaggaatccacacgctttgaatacaaaatgtgcaaatgacgaagatattttaagaactaacgcattgcggttcagaagatcaactcacttaaatgtatccgtagaccttagaggaactcaggggtgcaatgggcagtcattatcttaatttttccaatctgttcaggaatactgagagagtgtttaagaatccacactattgagaattcaggtgttaccatttggccacctcattgttcaagtaaaatcgattttgtgaataagattgtatactactctttgcattgctgtggaaggcatagtgtttggggagagaactaacagttaattgaatgtctaatgtgaaatattttctttacaaccaaattatgagatataggtagtatcaccattttgatgacagggacacagataatgactaaattattaaaggtaatgacttttacagctaattcataattattgatcatgtatatatccccaggtgatcaaatcagtttccttttggtatggagttaaattagtattgttgagattaaccttttctaataataatcaagcaagaggaagcttctagttcagtagtttcaaaataataataatggctgacttatattaagcacttatgaattaggtatggtgtttagtgtacatatatacacacacacacacacacagagatatatatacacacacacatatatatacataaatatatagatatacacacattatatatttccccctaaattaaaacaataatctcattacatagatggctgtttatttaggataagggaaagcaaatccaatttatgcaattgctagcccaagttacacaattattgcatatctcccactactacattacttgtgagtaatctcttaaaggggtaagatcagaggagaaataaaacaaccaagccaaactttttggagaggatgattatttaaaatgagtctttggattaaacactaatgatcgaaagttattaggttattagttttgccattaaaatgggaaaaagcgcaattacttttgcatcaacccaatatatttctattttcagagagttgtcaacattaaatagcatgatttgcttgccttagtttgtatctgcagttttaaaaaattgcttttgtcttgagtgaaataaaacaagcatgtaaaagttgaaatgcaactaaaaaatccaggcaattagagaaacgttcacaaccccatcacgtgttcctaaacaagagtccagaactgactccaatttagtccaaaatcactgaagaggaaagtttacttctagtttggaaaatacagatgcttcaaatgcagataagttcatttagctggaacaaattgtatcttttgtcttaatctcagtgttctaaatgagtcatatggctctcctgaatacctcctgtggaattagtgtaggagatgatttgtcagtgaaataatgaatcagtgaccttctgttcagactacaccaggaactaacttataactaaattatttgagaataagccctcaaattttgtgtctcgttattcagaacttccgtttggtgcattgacataaatgcctgcttagtaaacaccgttaaaattgtgtactaactagaggcagagctttgctctcattaaatctttacaggttgactgtaaaggctacttacaatcatacattcttagaattctttctccaagcctcacctgccagtagaagaatttttaaaaacctgcatagcttataagtatatgcaaaaagtattgcttaccctcttttatctgtttgacacttgtctttagactgcaagtatacccttcttgcttgtctgcctatttcttatatgtacttcttagaatttcagctggatgataagtggggcccactgctggggcacaagcgtatgaagacagatgtgctgggtcagggctggcagaagttgattgcccaggtggtaggctagggagaagcactgaaaagcttcttgagaaatagctcaggcagcattcactkctggggttcacttcgatctggttactgtggggatggtccaaagaagtctattaaaagaacagctgagaaacatcccaagacaggggaggtgagagggggagaatgcatcctgtgcctcaccccacccctgcaaaaaataaaataaaataaaaagccagatctgataaagcactcacaataacaaaatttttcgtaagaacttctaacatattatctgttacgaacacaggcctgaatctggggcaggttgtttggagggagctgggggaggaagaactataaagaaatgctcagaagccattttcactaarttttgagactcactggaactgagaaattctgctttaaagccttctaacagtgttaaacaaatgggaagctttgcaccctgagagatcaagacaatcactagcagagaaatggccatgcctacctaagtaaggaaggtagagaatactgtgttgggcagagcagtagagtggtgaagtgtctagctgctactgccatgctttgtgagcarcaatggactcctccatgtgcataacacttttaatcacttcrgcactgatcttctaagactaaggacattcccctgcataagcacactaccattgtcaaagttgagaaaaattataataattccataatttcatctcatattttatctataatcagattttcccacttctctcraaatgtctttcatagtggttttattccctgaaccaagatctaatcaaagttcatgagttgttttagtttgttctttccagataatttttagtttataattttggaataattttagacttcgaaaaagatttacaaagaattcctatacatctttcacccagattccccaaaggttaacactttaccacatttgttttatcaatctctctacgtatatacacacattagtctttctttttgaactgttcaagagtaatttgtagaagtgacacctcctatctgtatatactccattgtgtgccttcttaaaacaagggcattttcataaataaccatgcataggacaattgtcaaaattagtaacataattacatattgacaataattacattttgacaattatcaaaatcagtaacataattacaatattattatctagtatgcagaccttattcaaatttcaccagttgtctcagtaatgccctttataacaacagaaaaaaaaactttttctgcttcaggagcacatattatgtttagttgtttctctgattttctttaatctagaactattccttggtctttctttttctttcatgaccctggtatatttgaaaagttgaagaataccagaaagttttaatccaaagttgcccttcatttgagtttgtctgatgtttcctcagaattagattcaggctttgcatttttgagccagatgttaaattgtgtccttctcagtactttatgttaaggagacacataatattgatatatatcatcactggtgatgttaacttggcgatgttaactggtgatgatcacttggtctaggtggtttgtcagatttcttcattcttaggctactatttttccctttgtaatgaataagtaatttgttgggagatattttgaaactatgtaaatatcctgtttctcatcaaactttcacctactggtttttggcatccattgattcttgcctgaatcatatccagataaattttatgctcttgactaggactttttgggttttttttttctcttcaataacctcttgaacactatttttataaatctactttactcaaagtttttttttccccaaaattatagctagttggcacaaacttttttatggtatattcagagaccaggtgttgttgtgtctcttcctcctcacaccttccctttggacaggtgcttcttttctcccagaacttttattggcttaagccatcagcttgttatgtaagatatttcacatgacatttctgctttgtcctagtttttctcctgcttgttcctggttttaaacaaaaatcttttctttgtaatgaccacatcctccaatccatccatttctatttcttaagtttaggcctttgacaactctgttgttaaaagactttcccatttttgttgttgttgttttaaatcatggcatttattttccaactctgttatttgctttacttatcctccctttttgtatctctccccttttagcttttgcaratcaccttcatcaagctatcttatttatttwtwtttatttatttatgtatttggatcaacctactaaccaaaatcaaggcattataaatctttcagtgagggctactgtaatctgaagcctactttctagtggttgccatcttcttttgtcttaatgttaaacttagaattataaaaattagaataagcaaattctgcactgtttctgtctacccctctgcttccagaaaactgacttgtgttcattatctgtattactgttaagttgtatttctataatattttcaacaatttccgtttgtcttccaaaacaactttgaactcatttttaaaaattaattaattcattttccatttacctcagactccatgtctgaccctacctctgatgctactagcaatcaggttcattcttcctgggactcattacataatgtgttcatttttctcttttctttcattttcattttaatatgtttcccagggtaacaatatattcaattagaggttctcaaactttagtgtgcctatcctttcctcccttttagaatgccctactctttgaccatctccatagctatgtttatattgccacaagagttccacatagtatccctcataagaaagactaagtagattatagttctcaaacttgaaaccttctctggctgcatatcataggaagatgctcttaaactctatctattaatatcatttcttgagccatagagcatgtatttgcctatcccagctttaacccttctcctctatgaaatcaagtgttctttagaaggaatgctgtgtgttgtctgttgcatgtggggatggggtggggaacatggccacagatagattctgaagtcttagaaattgtgtgcagatttttgtgcatttcccttgagagagagcttatagtttcatcaaattctgaagagcatcctgcctccctttctccaattctggttcaagttcatattctccagtccagaagttaaccaggctagtttttctgcatttcagtgtctgaagaagtaaagcgtcaggccactgcttcttccttctgctatggcattcctgaagcgtgcactgggtttagcatttgccaggttaatgaaattctaaatagttctcttggaaattttcggttcttttctcataatataatcccctgagggaacccagttttacaacttgaagatcttatcaattccttaattcctggggttttaattactggcttggattcatacagtcttgtctataaccactctgtctgttgggtaattgctctctacctttcatagataatttcaaattgttttcccttacaagtgtttttctggggtacttctccccttccagaagctgcataaatgttctctcccctcttccttctgtcccctttgccttctgcaacccatatggaaagcaaaacagacaagttaaaaatgtttgtcttatttccctttttgtcttctgcatccccaaccacgactttttaaagctgccttcctctatcctgccccagtttttcaaatatgttctgtctttttttctttcaaaattcccacttgaagccgacacctgacactcaccaaaatcctgaaccraaagaaaaaaatgctgagatgcatattcctaaattcrctcatttccagtcatactgcctttaaccacggattccttgtcacttgggctttgccctagctaaacccaaaccagttttccatatcccttccatttctcatcccatycctgccccactcttctttactcattcttatgctgccctcctctcaatacactgctctctctcatttccatttctatattctctccttctctgcaaattttcctcctctctcatcccccactggtagccctttttgatttcttttcagtatgttccactcacttaaatggagattactttgacataatccttgtgcggtaatgagagcagatgtattatatacacttttttacaaagataatatctgaagcttgcaaagtttaatctacttgtctaacataatataaccatttgccataagagttatagacccaaagcctccttgtcatacttggtttatctaatgatcccccctccctcttgcagctaaagatggagataacaaattgactctattgactatttttctcaagtcatatcaacatctgtgtgtacctttcttagaaagataactttcatatttttgcaacaagtaaaacatgcaatgcttggaaagtccctgtacaaaaatctttgtccagaagttgtaccagtttattatttaacattgcttcttaaaaaaagagtgggatgtttaacatatctaaaattaggtaatggaaataggatttgctgtcatcactaggaattatatctgttgtaggagaggttataaaaaatatataggacatctttccccttcaaagtagttgctgaattagaggcgaatctaagtgtcaaacctgtaaaaatttggggaaggatgcctggactttttcagacataggaaggaagtggcagtagttgaatgttgttacttattctcctgagtaaagaatatagggacctcagagtaacccttggctgttttcttgatgtcctgaaatttctgctgaactgtttaatttaaaagaaccaaaacttaagtctggtctagagaaagggttcaccactaaatttggcaggcacctatcagagttgcttccaaatcacacaattggtgaacattggtaccacaagttggccaaggtctctaggcccaactctaatcctcttctgatatatctccttcacactggtaatattactccttgaaaatagttcctccaccaggctggtttttgaatatgtaccrttcatattcagaaaaacttaacacataatttctgaataatcttgagtcaccttagaaacaatgcaatgaatattttctaaaagtaagtagaggttcaagtaaatactttaatgaaatgaaaagaaaataataaatatggttccattacattacagaatcttttattaattttattcactcacatttaagctctttacttattcttttgttccccactggcccagaagagagacttgttcatggcatgactgaagaaaatgtcttactgaaaggataggtgaacaaatactccatttatatgctgattattaaggaagtgaaagccactaagctttttcatattttcaccattttacaaacagtatgtaacatttttccgtgtaacttcctattgtggaactttctctcctctgaagctaattacagtgctgttcaaaatctgaatatcctcaactcttgctttccttgttcttttcaatatctgtcattgtgaatgcatgtgttttaacagaatccatatgtttcttatttttattaccttatttttgtgtgtgtgtctactgtgcatatcatgcatggctcttggcatgcatatcatgacaaaggataatcagttttcttttagtttaattttagagccaggatttaagacatcatcgtttgaatgtcttccagtgttctccattttgtttatggtctgccaatgttcacaattgttcaggaatgtttttataacccagtcgtcagcagtggtagaaagcaccactgacagatgcagctctgaatgactttacatcccccatcatataaaaggaaacaatcacagtagttgagatttgtgcctcttaagctgttgaccttacagtgaaaaagcaaagagagggagaaggagagagagaaatggaagggaaactgtattctcctacaatttaaaaaagcccctaagttcatagatctatccctgcaacaatgtaatacagcaatcttgagctgatttataaaatgacaagaacaaatagatcactcattttttaaaaagtaaattgtcaggaaaaaaatgagaaactttcaaattagaaaattatctaggagagggcaatttgctgagtgtttttttttaaatcacaataattgatgtcatattgtagctattcattaaccaatagctgatgcacaacttacatgcttccctctgttcttatatatgatttctgttaacatcagaagatgatctgtatgagatggggaaaaacaagattataatctgcttaagcctctattaaatatccatttactacaattattatctactttgctagattatcagaaaaattttccatcattgatggaaaaaaattataatagatgtaactcctattaaatattcatttattatccattttaaatatgcaccagattttcataatggttcatttaaagctggtttacaagtagaacacatgccagagcagaaataacatgtactggtaggataataagaaataggagtccattatactgatttaatttctcaaataaccgaaaaagattagtagtataaaatgtcagttggtgtaggtaacatccacaaatgttttgagttatagatatacttaaataatttcatacatttygtcattttcaaatattaaaaatttcatgttcagaactttatcctgggtagaaagtgaactgatgtaaacattgggagagaagaaaacatatcatgtctctaagtttggtcattctgcttccctactttcaggaacctttcataaattgtcctttagtaaatatttggggatgatgagattgaaaaagaattgggtagctgcacacacacaaaactggggagaaaaaagtatgttaaaaagtttaaaagggccaggcgcagtggctcacacctgtaatcctagcactctagaaggccaaggtgggtggattacttgaggtcaggagtttgagaccagcctggccaacagagagaatctccgtctctacagaaaatacaaaaattagccaggcatggtggtgcacacctttaatcctagctactcgggaggctgaggcaggagaatcgcttgagcctgggaggcagaggttgcagtgagcctagatcacgccactgcactccagcctggatggcagagcaagactctgtctcaaaaaaaaaaaaaaagaaaaagaaaaaaaattaaaaagcaggtggataatttacattttatttctataaatacgttagcagcttgcatgccattttccagagctgcctccaataccacttattggactttttctgatgtttcttaagaggactaaatgctaccccaaaaattactttctaaaacacagtggaacatcttttcccagagtatatcctaggaaatgctctaaagagtggggaagcaatggcagcaggggtcaggttgctgggaaaatcagtttgggaggttctcacacagtctatttttccctcaaaatatgtaacacgtgttactatatgaatgactctgctgtaaagcagattattaactttgtttattccatcttttctcaaatctagttttgatttttctttttacctttctaaccttttattttaggctactgattttattttacccctaaaaaaaaaamaaaaaacaaaactctttttctccctaataccctttaacatattatgagaactaatactctcactttgggtgagaattgggttggaatctttacacttcatcttaatggtcctttattacctccatttcatatcatcactagctcttcaagatcttttatcagtgataattatagcaagtaatcacttcttcttccacatattctgcagatacttgggtrtgtggatagtcttcttagcattgtttgttcataatgaggaaatcttaacaaataatatagtaagctaataagaaattaattatacatttaatacagttttgaaatataggccatagtactaaataggttttctctgggaatagtttgttcatttgttttaagcttttacatattcaagagacaatggaaacttctgcctcacttctgcattctgaaggagtttttgtggcactcagaaacatatatccctgccatcagccctagatatttttaggcctagtttttataggtttataacttcctgaaaagcaaggcatttagaagctcccttgtatgcacctataccataagcctgtccactacgggcaatgaaccaggtccactctcctaacaggcacagatgagaagcaggtgcaggtaggctactcttatcccgaaataatgtgtgcatcttactgggtcttctaaatccagtaccttttcctctcttcagtatgttttgcaatcagtcagagaagagtgagactggaaatcctggaaagaaacctagagtgtgaggtgctaaatatgaaccactagcastagcagtgttttctgaagcagactggttgttcccctctgcctcagttccctcaaaaaagggagataatgagacttgtcatccacaggtttgccatgaccaagagtcattttctaagcccctcaatctgtgtgctttcttacagatacaaaaattaacatggcgtggctcttatcacacaacttataagaatactatgaagataaacatagacttgtaacattttattgttatttcattgtatataaattgatagtctatgttaatttatttttatccaataacaaagaaaatatttttgataggattttgaaatgccccagggttttagttgtttttccctcctgtttgaggtttcagtatgtcacaactcaagtggtttgtgtgttgtggcttacccatgtagctgtagtcacttcaggaaatgttataagaaaaaggtttaaattttgaaaatccctgttttaggtgagaagaaattgatgtttggaactggctgcacatgaaaatgaatgaatgcacattttaaaaaataagtatatttttaaagtaggttgttactgtagcttgcagttcataaagttatttttaggaaagctagaagacgttactcctgcaaaatgtatgctttacatttgctaacagtaaacaggattcttgactgtatcaaaacagacaactttctgtattatctgatttcgtttagtaatttattatcagaattctggctgacgttcactttgtatatgcacattcttttatgtttagagcttaaaaagttcagaggtaagattaatgaaaatctttcagtttaaaattatgcaatagagaatttagctacagttaaagtaagtgcacactacatttgcctcttttaagataacctcagactatttgatattttataaacttataaatcacgtattasaaaataacgttgaggcactgcaaattaatttcactgattcagcttctaaaaggtaatgttttgctacagcttgctctaaaatcagcytaaattatgtcatttggattactattaagtgaacaaattgaaattagcattttacagcatattttttccctgtaagacctagccaaaaatccatataaaacatttatttttaaaagagctttaagagccttttcatgttattctagtcaatttgccaatacagctggtccctctagccatacaatggacagccttctagcaatatctcatctctagttgctcaacatagaaaatcagtaattcataaaagagttaggggttcagtcaaggccagacttttgaattttccgtcttgcctcacaaaaaattacagcctgaatgccttgctctgatgtagaaaaagctctagaatacaaactgatggttgaaacactctgcaaatctcagatgatgaactgagccttacagatccaacagacatggctatttggtaaaattagctgacatgtgcgtctctgtcacaggactgatgcattgatgtggccctctctgcaggaggtatctgttcttgtgagaaaatgggggactcaaattgatgaggtccttgctattaagttttaatttgaatcaccttgggaaccatagcctccacatccattttggcattttctttgtttacacaaagggaacaacttcaaagggctcttgccctagtattcataccagcctcatcacacagagctgtggttttgatgttcttgttcccaatttattgctagggtccgagtacctgggtaccatggtgataaagtgccattgaaatacataggtaatcagccagtgtactggaggattgattttctctttcattttctgaacagacaaaagcagtcctctcagaagcaatgggagtgagaggacacttactatttactttatgagaacagtgatgataaagccaagatgccatttaattaataactttactttggcagtgactatctccagggaccaaaaatatkggaaaccttaattgacctctccacatatagaacacaggcctctcttttttcttttttaaattgaaagtatagaaaaaacaaatcatttgctctcaagatgacttcagaaccataatggaattgggaccaggactcagaatgcttgaatttcgaggtaagaccactttgtacagtgtgtcttattacagataatgatcctctctttaatcacttgtctgtcctgaaaagcatattgcagtttaaaagaggccatgcagtctgaactgactacaaagaatttttttaagatcttttaaatattcagatgcatacatttcattttaaatgttggcagctttgccattcgcaactatgacccaaattcctccttcaaacattttaattgaagccaaattacttcactttccgcttttacataataacgtagcacactcactgctgtgactgtaatcacggaaaatttggcttctggcacttttgctctattagccgtcaactttttttttcacatttaatttttcattttgcttgctcatattttagtattatgtgtattttctctaatttatatattgttctttacatttacctctttgaagtttttaaggtaatttccgatctttttttttttttttttttttgagacggagttctgctcttgttgcctaggctggagtgcaatggcgcaatgtcagctcaccacaacctyggcctcccaggttcaagcaattctcctgcctcagactcccaagtagctgggattacaggcatgcaccaccatgtccagctaattttgtatttttagtagagacggagtttctccatgttggtcmggctgatctcgaactcccaacctcaggtgatctgcctgccttggcctcccaaagtgctgggattacaggtgtaagccaccatgcccagcctctgatcattttttaacagattcattgaggtgtatttgatatacaataacctgcacatatcgaaagtatataatttaatgttttatattatgtatacactcatgaaaccacttaaaattgtgaatatatccatcactactcccccaaatttcctcatgattctttgtaattcataccttctcccatctccagcccttgcatcctcaggtaaccacggatctgccttctctctatatagataggtttgcattttctagaattttatataaatggaattacagattatgtgcccttttcttgtcttagttctttactcacaataatttgaggaatcatctgcattattgtatgcatcaatagttcattcctttttattgctgattagtatcccttttatggatatacaactgtgtttatttattcatctgttcgtgaaaatttggattatttcccatttgcgactatgacaaactgctatgatcatttgtgggcaagtctgtatgaacatgtattttcttttctcttaggtaaataccttggactgaaatggctggatcatatgttaaatatatgcttaaacttttaagaaattgtcaaattattttccaagtggtttcactagtttacattttcctactggcagtatatgagagttccattttctccacctttctgccaacacatagtctgataagtcttttgcattttagccattttaacgagtgtgtagtggtatctcattatgattttaatttatatttctgtaataactgatgatgtagaacattatttcatgtgcttatttaccatctatatgtcttcttcagtaaactgtctattcaaatcttttatgcatttttttaaccagttgcttcttatttttgaattttaagagctctttttttttctttttcaaagatgactttattaaacttttattttaggttcaggggtgcatgtgtcatggcggtttattgtacaggttatttcagcatccaggcactaagcctagtacccaataggtatattttatgcttgtctcgctcctcccaccttctactctcaactaggccccagtgtctgttggtcctgctttgtctccgtgaatttgcgtcatttagctcccacttataaatgagaacatgcagtatttggttttctgttcctgtgtttgctaaggataatggcctctggcttcatccatgtttttgcaaaagacatgatctccttcttttttatggctgcattgtattccattgtgtatatgtaccacattttcttcatccaatctgtcattgatgagcatttaggttaaatgttttactattgtgaatagtgctgccataaacatttgtgtccatgtgtctttatggtagaatgatttatattctgctaggtatatacccagtaatgggattgctgggttgaatgatatttctgtttttaggtctttgaggaatcaccacactgtcttctacaatggttgaactartttacactcccaccaacaatgtataagtgttcccttttctctgcaacctcaccagcatctgttatttttttaactttttaatagtagccattctgactggtgtgagacagtatctcattgtggttttgatttgcagttctctagtgatcagtgatgttgagctttttttaatatgcttgttagctgcatatatgtcttcttttgaaaagtatctgtttatgtccttttcccactttttaatggtttttttttcttgtaaatttgtttaagttccttacagatgcttgatattaggcctttgtcggatgcatggtttacaaatattttctcccattctgtaggctgtttactctgttgatagtttcttttgttgtgcagaagctcttaagtttaattagatctcatttgtcaaattttacttttgctgcaattgcttttggcatctttgtcatgaaatctttgcctgttcctacttccaggatagtattgcctatgttgtcttccaggtttttattgttttaggttttacatttaagtctttaatccatcttgagttaatttttgtatatgatataaggaaggggcccagtttcaattttctgcatatggctagccagttataccagcatcatttattgaatagggagtcctttccccattggttgtttttgacatagtctagattcaagttcatcattagatgtatgctttgcaactattttctctcagtctgtggctatcttttcctctccttaacaatatcttttaaaaaataaaaatttttaattttgaagatgttcaatttaagtatttgttctttgatcagaattaatattttattggttaatgactaggttactttataccactggtacaattttattgatttttagtacttttttcttttgaaagaaattttcagtgtcaagatttccattcagtcggtgcgtactgatttaaaaattaatgtctctttctttatgtctctattttttagatacaagttattcwcacacagttataattaacctgcaaaatgagctcataccagaaaaagaatattgtgattagagcagtaatttatattgttaactgcaaatggctcatattcgtttttttttttttttttggtttttcattgtatataaagttcaggcctaatatgcctgtcacaactaaaaagaagagtgatctggtatggcaatattggagtaattcttttattatcatagatttgatgttacaaagattttttcaaacttttcttcaagaagttttatgaattttaggttttctattaagtgtatgatctattttgaatgaattcttatatatagtgtcaggtatggctcaaagttcatatttttatatggatatccagttgttccagaacaactttttgaacagactcttctttctccactgaattgcctttgtcaaaaatcaattgcccatatatatataggtctatttccggactctctactctatcccattgacctgattgtctgtcttaacatcaataccacactgtcttgactagtatatattaataataaattttgaaaccagacattcttccaagtttgttctttcttcttgaagctgctttttcaattctaggttcttttctatccctatgtgttttagaatcagcttttcaatttctacaaagaaacctgctgggattttgattgggattgtgttgacagtgtagataaatttggatacaattaacgtcttaacaatattgagccttctgacttatgaaaaagcatcaaataacatgagatgcttaaggataattctgacaaaatatatgagatatatacactgaaacaaacaaacaaacaaaattgctaagcaaaattgaagatataaatacatggagataaatgcctcaactgactattttaaagttttgccatactttaaatgtcttgtattttttttctctgtctggcagtccaactttaaagaagacctaataaatttaagggtgtgctatttacctctaccttcagttactaatgaaaaagtgatagatggaaagtttagaaaagtggtgttgataaataaattattcatgaaatcattaactgctctatatattatccaggcactttgttttttctcttcttccatttttctgtcttgtggcacttactcttctcattataatcttctgtagtagctaggagtggggagaagaaatgagactgaactcataagttctttttccccttgttattaaaaacttttatggaaaaagatattgaatgctgtgtttagggatttcacttatccttcctgtccccattctgtgttcctcattatcatagatgagtgaggattgataatagtgggaaagtacaaacatgcacatttaaatatcagattctgccttctaaatctgttaatgtgtttaatccatgaatactcagaacatatgtgaagtacatttctcaagaaggaagcctatctttttgaagaatttgtcattataaaagatttagaattatgaaattggttaaattatctaataaagttggtttggtagctgttgagattaaaataagctattactaaaamcctcatgaatttttgtgttatgcatccttcatccttaagattaataatttttacaaaaatttgttttcggatttcatcttgtcaaagacttgatatgagttatagctgaagtattgtgttaccaagatatgacttttcagaatygtgtgttataataaattacgttattcacaagagcatcttcagtaagacataactaacactatgttatcttgggtacaataaataaagtgaatacatactgtgatacaatatccttaattatctttattatattcactaaataattttcaaaattaggtaatctgcaaaagagtctcagttactactaccaatttgtaaggttcttttgtaatgtaattttgagtaaaattacttccacagtacaaaatatgaagggtttttttartacaaaatatgtggtatgaggttattgattctctggaaagaagtgtgaacaaaatatagcaagcaaagaaatggaaaccagaaattgtcaagaaaaaatggcatttggtctttgagaaacagaaatataaaaaacgcaacttctataatagaagaaataattaagagtaccaagaaagactaaaattattcaagtaaacaaggtctatgacatacatcatatgacaattatgaaatttgtaaatgttattacaaaattagtagccatcaattgaaaaatcacagttaacaagaaaatttgccaagcggattttaggaaatttatcgggcttaggaaaaggaaataaaaaagagaaattttgccagcatttactgagagtctactgtgtgctaaggcctggaatataaaggtacaaagtcaagaccctgagctcagagactactggctgtggccaagggatggkcttgaagatgcttttcccaaaaggggttgtaaagccagaaaaaactgacaaaaataaccatttaacagctatggaatcagacagaggcatatgataatctgataaactttatccttgaaaaactgctaaattttgaatatatgaaagcttccagaggatgaatgctttactggctcaagatgtaggagcacaaccttagtccaatcattggctgcccattaaactatacagtcagaagggtaacctgtaggaatccaggtttaaaaattacaataagaattttaaaaagatatagcaagaccctgtctctacaaaaaggaagaaagggatggaggaaggaaaagaaggagaaagggaggaaggaaggagtgagggagggaaggaaggaagggaaggaaaactgagcagggatatcagcggctacaccccacagggagacagatttcacagatttagccctggcaggttactaaacaaaaaacaaatggcaacaataaaaaacaacaactactttcagggaaaaggttgtactccagagtttctacaatatattacctaaaatgttcaatttttaacaaaaattcagagacatgcaaagaaactagaaagtgtaaccaaggaaaaaattatcatagaaattgcctctgaggatccccaaatgttagattttgtagacaaggacttcaaagcagctattataagcatgttcaaagaactaaaattcagatttaaagaattataggaaattatgacaacgtgactcaacaagtaataaatctcaatgaggggatataagttataaaaagaaaaaagaattaaatggaaactctggagctgaaaatacaggacctgaaatgaaaaagtcactagagtctctcagtagcagatttgagatgataggagagagaatcagttaacttgagacaaatcaatagaaattattcaacctggagaacacagagaaaaagactgaaggaaaatgagcagagccttgcagagcagtgggacaacattgagtgtaccaacatagacgtaataggagtcttataaggagagaaagcagtagagaaaaaacaaagtgtgatgaagtaatggccaaagagttgccaaatttgaaagccaacattacagatacaagaaacccaattaaccctaagtagtatgaacacaaaaccatccacatctcgacacacaacagtcaaactgttgagagccaaagaaaatgagaaaatcttgaaagcagcaagagataaaacagctcatgacatagagaggaatttatgcaattaatgactgatttctcatttgaaagatactggaagaaaaaaaaatcaacgaagaattctatattcattaaaactagccttgaaaaagtggaggtgaaataaagacatgaccaaatttttaaaaagacaggaatccattgctaacagacctgtcttatgagaataccaaaggaagtctttcaggctaaaagtaagtgacaccaraagataactcaaattcacagaaaaaaaatgaaaagcaatggaaatggtagatatgtaggttaataatataaaaggctctgtatttttttctcayatagtaacttctttaaaatacataggatttcataaagcagttattataattattactgagtatattatcgttaagtttacatacatatatgtaatttatatgacagtaatactgcaagaaatggggagaggatggagctacaaatgagcagattttctatgtttcacgacaattatttattattagtctgcagttgattgtgataagtcaggatgcatattgtaattgctaaagcatccattaagaaaataattccaaataaatttagaaaatcaatataggaattaaaatggtacactaaaaatacacttaacacaaaaaaggcagtaaagaagggatagaaaaacaaaaaaacacaagaggcttagaaaacaaatagcaaaatggaaaatgtaagtccagccatgataattaaatgtgaatggcctaaacatctcagtcagaagacagaggttgacaaactggattttaaaaagcaagatctaaccaaaatgctgtctacagatatacaatttagattcaaagacactagttaaaagtaagtagatagaaaaagatatattatgcaaacagtaaccataagaaagctgtagtggctatactgttaccagataaaatagactttaagacaagaaatatgctatagagggctattttatgataaagggtcaataraccaggaatatacaaaaattataaatataaacacacctggcaatagagccccaaaatacatgaagcaaaaactgacaaaatcgaaaagagaaatagaacaaatcatggaactgaattgattaatttcagtcaactaaaaaacataaaatatttggttgtcactagtcatatctttgtaaaataatattataccagacagatataaattccatttgtaatagaacacatmcacacacacacacacacacacacacacacacacacaaagacacaggaataaacagtactaatgcagttccataagaattttagaaaagtatgaatttggtttggccgggcacagtggctcatgcctgtaatgccagcactttgggaggccaaggctggtggatcacctgaggtcgggagttcgaaaccagcctgatcaacatggagaaactccatctctactaaaaaatacaaaattagctgggcgtggtgacgcatgcctgtaatcccagctacttgggaggctgaggcaggagaatcgcttgaagccgggaggcagaggttgtagtgagccaaggttgcaccattgcactcccgcctaggcaacaagagtgagactccgtctcaaaaaaaagaaaagtatgaatttgactgtagtttcccataaatcttagggaaggagaaacttgacttatgatcttataagaatctcaggaaacaataaattagactaaagatttcccctaaggggtaattatcagaggttttcaactttgaagaacctctcaaattcagcctaaagctatgtctaagaacttgtacttaattgattacctaggtaaaggaacgtggaatatgcttactagagttaaaggtcctgtatgaggtgacatttctaagattgtctcaaaggtagaagtaaaatttaaaatatgttattaaataggaaaataggcctatgcaaattagatgaagttctggcaagccaagtacaatgcaaaaactcagtaatktaagaatatgatagaccaagactgagtaagtttaagtttcacagaaagagctcaaactaataggcaaacacttgatgaatgtgagcttgtgcagagaactaatacaatgcaagagtttatttaaaaagagtgtgacatacaagttttaaggaagaatctttttattatgatcttttggtaaatttgtattcatatgttgcatctggatttttttctactataccttttagaaagtaggaacttaaaaaaaaaaaaaaagaaaaaaagaaaagaaagtccagagaagaatggctgatatgaaaaagtcakgaatggaaaataggtccttcaaaagggcaaataaaaggaatttgggttacttttctgaaaatgggaaaggctaagagatggcagcataatttttaaaactaggctaagaatcaacagctgttatttctagttcaaggtcgtctttgcttagacaaatccaatgatgatgatgatgatgatgatactgatatttctaaaattgacactaatatttatagaggactaatgcttaccatttacatgggttgtcttatttaacttcataatcatattatgtggtgaatacttaaattagctccatttttcagaatagaaaactgtatataattttcctcagatgaaaacagtgctattaaaatgtgtcctacttactgcttcaggtggaaacatgaaaatgatttgcaacactctagctgccaaggtttatttgtcttcctaaaattataggaattctatgtaacgatgcttcatgatccaagtaagggaatattggcctcaaagcaaagccattgacttttcgctctgatataattaaaggcaacaagaggttgttgaatacctgttatatgcttaatatgttttcagatgccatgctaggatatacaaagaagaaacaagactgaaacatatttaatgttctataatagttttagcaaatgattgttgatcactatatgttcatttagtcttcacaacaaccctatgaagtagctactatcatcctcatcttacagatgaagaaatagtacctagttaatgacagaactaggattcaaacccaggtacttgggctcctcagcatggcttgagagacagacagaaagagagagagagagaaagaaagaaagagaaagaaagaaagaaagagaaagaaagaaatgaaagaaagaaggaaaaagaaaaaaaggtaaattagttaaggctatgtgaagtcaggaaaagggaaaagtcattttgaaccagtttgaacaagtagcttcagtatccttaaagtgatgggtttgtgtgccagaaaatggtacagagtatattataagttgtatgggaatgagcagagcatatttcgagtgaamggaagctggaaagggcagttgaggatggataagccctgtgtcttgtgggtttattttttatctggggggacagtggagagacttcaagtataccaacctgcccaggcatgctttgatgactagaggtatatgtgggataaggtagggccacatataaagggatctttaataacagagtgaggtatttgaacttgagatgataggtagtgagggatcatgtgtcataatgaaacccagccatctggttaaaattagcaattggccctgaggtgataaaatactggcaagctaggagtgggcctaaaaatgaaatgatgaatctgacagaaatgttgaagacatattaccaaatatcagatactaactggatagaaggaataagagaaagtggggagtcagatgggctcgcgttttcaagcctaagaaacttgggagattagaataactggcaccaagaaactgggacaaggaatgcatttaggtaggagaaagtaaatgttttttaaatgtttgaaagataacatgagagccattttggaatggattttaaagtccttgttgatagttgacttcaatccacagtaggtcctgagacagctaatcttaagttttaataattctttacttttaagaagttaccagataaaaatctatccaggataaatgttaatctatctgaaataggcactgggccatatggcctcataagattccatgcatgattgcattcaacagacacatactgtgaacctccagctagtattgcatagtagttggtgtcatagcttagtaatgaacagtgtgtcctctagagtcaggcagaacttgggccatatcagctcctgctctggacagctgtgtgaacttggcaaaatacttaccctctatcattctgaagcttcttagatgtgaaacaaagatcatgatagcacccacctcataggaaggtcatggaaattaagggggatgatgcatgtgaagcctttagcctagtgtcaagyacacagaagatgatcagtgttatctgtyacataccactgttattgtcttccacagtcttcaaatttctgtcatccctgtcatcactatcatccttgtcatcgttgccatccttgtttcaccatcatccctgtcttcaccatcatcacaattgtcagtgtttacatcagcgttgctgttgtcaccatcatcctcttccccattgtcatccccaccatcgctgtcatccccatcatcattatctctgtcttcaccatctttctctccttccctgtcatcccggtcatcaccatcataactgacatcccattgtcaccttcatccctaacttcaccatcatccttatcatcttgctcataccatcaaggcacctgctttgttgttccttcgtcagtttttctgtgagcaagtcctgaatatcagcactttgcactttctccatagggcagatgtacacatggaacagtctttgaatggttattgttagcttagtcacactgtaccattttccagttcttgttctaataatagatagtatctattatttaatgatattgatacaaaaatataatttgcttgaattactcttgttttgggttaatccaagaatttgagtttcatttataatatagcagatcaactgcttgaaaaaaaaaggccacactattatcgctttcttactttttgtggcaaaactgcacagcataaagcatttacaagcttatctctgtttaaataaatttaattaaatttgaattcagcaggccttgttgcataagaacaacattgactttgctgtttgggtttgcatgttttatgaacatcagcaccctgctaaatgaagagtggaaaacaggcccttctgaactacctctcaaccctttcatgaaggttttttaaaaagagataatgaaaagaatttgaccattgttttattattgctaaatacatatatttttgggaaaggggcttcctgttgaccatgtgttcttttaaaacatcaacttagtgaggtagtttatattttgtcctgacttctgctttgaaatattacaagattgtttgtgtataaagtgcctttgatgaataagataaaggaatgttgcttttcaataagtcatgtacccattattctactttttagagggaaaagctttttatttactctgttgtccccgtcctcataatatgcatcaagattaaagggtatacagcatggataaaagaatagctccttggtgtggtccatggaccagtgcccatcagcaaactatgtgtaattagtttacaatggattagatattgaaaagtgattagaaacttctgtagtaatttgctattgtcatgacatccaaatatatgatttttgtatttaacaaaaatctaagtcatcaatgcattagaagtttaagaaaatgaaaaacagtaacaaccaccaaaacaaaaacaaaatgtaaatcctgtttcttcaacatattaatttgttctgtgagattttaataggcattccataaaaagcacatccrttccttagataggtttggaagggactgatataaaataaatcatgtaagttattgtcttctggactcccaggatctgcattgtgaacctccaagtgaaggcagggtaagaagagtctcctgaatcataaacccctggatttatagaacatctccaaagagtaatgtcctgtagaggatcctttacctaaagagttagtatttttctgctatttttaacttttcagttgcttcctatgcagctttagaataggactatcatttttaaaacttgatttttccccttaattttttaatttttgaaatgcagcctgcaatattaccattgtaatcaatgttactatttttctaatttcatggattttgtattttcttaattaaaaattttaaaaggctgaccaaatgctcaagaagacacaaagtcccaccccccaaaagccagagaccrtgtttttcctgtgatctctggatcctcacagagagtgtagagggaacagctgcagtttttaggaaggaaaataattgtgttgcaaaatacctcttgacataggaaggtgagattagagactgaaaggacattggaatgaatccgaaaagaaaaggttttttaatgctgctaatagaagttagaagaaaagaaaggacaactgagggttaaaaagatcattgaaaatgtactcgaagaaaatgaaaaagtgttccttaaattgctattagatttcagggctctgaggctaagatctagccccaggaagaatttttagggagaagattgcttcatttcaaactagattgggcttccttatttttagccagaacactcagttccagatgcctttctcttgagtttgataacattaaagcggctcggttggttgctggccatcacttttagtgtgaggcactaataaagtgtggagcaggtgaaaatcccaatgaaattgggctaactctacaaatgtgtaaaaacagcttcatacttggaaaagccacagtgaatgccagggctgccctgtcgccctgtgtgcccaagcctcctgacttcttcattacatctcacattgtcacctttctatcttcttggatctcagcctcagtttcgccagtgtctactttccctctgccttcaaacatacatggcagtccactatcttgttgcsggggggagctgactactttctccaactactttttatatcctgtttttgtaaaacttctcaaacaaggcatcatatttctttgctacctgcttttccccagtctcaggagtctggccttaataatgaggcagcaactatagccaacttgactaagagctgactgcaccaggatcagtgcttagagcttggcatatgttacttcattgaatcctcaaataatcctctgagtcaggtattacacctattgtaattttatagatgagatgctcaggtttagattaagcaatttgctacacagagacactattgacagggctggaacagagcccaggtctgactgacctcaacacattttcttaactacctttttgtttactcaaaagtgccaggaaaatgttctcatttaagccttccaacttgaagaggtattattataatccatttaatacacttgctgtgaactaggagagtcaccgccttcctacagggcatttgcaaatttgtccaggtatttggttgtgggaatactggaggtgggaatgctgctagcatttaattgctagaagaaggagggacataggtgtgggaactgccatgcaatgctgagaaatacctcacgcaacaaagaattctcctgcctcaaatgccaattatgccccattcagaaacaatgataatggatgagaatttaataatggattcagaaagcctaaataacttccctgaatctggagccataaatcaaactgagatctgtctggctctaaaggttgtttttttttctgctcaattcaacttcatctaacagaacattaaaatattatgtataatttgatttgctcccacaattaccatattttatatgcagcatctcaaatataatttatttagagaatacttaactaatttcctgattgaatgttattttaatacatttaatggagatagcatgtatcatagtatttgccagattttcacaaggatgctaaaatttaatgaaagaaaccatcaacattgtattaaacaaggaaagctgcatattctggaacatgctgtcttctgcactgacaaccaggagcagaaaagactcatttaygaaaggaaaagaaggaggaaagagagaagcttggtgaagaagagaggagagaaaaawawatatatatggctttttatttaattagtcttatacactgagccctgacctgtcaattgcaatgtttccttcctctgaaacttcatttttaaaaaatctcctttataaacattctaaggtctaaagggttgcccaaatttaaataagattttctactttctatatttaaagacgtcttcttaatgtgcttctttctaaaataaatgcatggtatatattttttgtagcagtcatgggttgtactaggcaaagaccttgtcatgcttggtaaagaagggctgtgcttttcataatcatagattgcatacctggactgtacacttgaacatgactcaagtctccaaagtttaaccatcattttataacatcaaggcctgtgtgccatatttgtgtgtgtgtgtgtgtgtgttttactacccagaaaaataaaatggtagtttctgcttcacccaagtgcctacatttgaaacacatatcatgcaagacmaactctcatcttgagttgctggtaggaaaaaaaggatctttctttatgccatttttcttcttcctattttcaccgtttgagatatacagtcatgtgccacataatggtgtttcagtcaacaccagatcacatatacgtcagtggtcctataagattatcctacgatatttttactgtaccttttctatttttacctgtgtttagatacacaaataccattttgctacagttgcctacagtattcagtacagtaacatgctgtacaggtttgtagcctaggagcaataggctgtatcacctagcctaggtgtgtagtagactgttcatcaaggtttgtgttagtacactctatgatgtttgcaaaacaacaaaattgccttatatttcttagaacatatyctcacggttaagttatgcatgactagttaaattcccaacatagacgattttctgggacccataattaacagagaatttcagactttgtgggtgataagagtatctgagtgcttgttaaaaatgtagatttccaaaccctgtgctagagacttgaattcagtagctcttgggaagagtgaaatgctttgtcaacragctcccccaggtgatggggtgcctgtagttcatggaacacactatgaagacaaatagtttggtacttaataagcctctaataaatagttgttgaatatatgaatgtgactatatgaatatatgaatgtggctgtactaacagctttattcctgtcaacagaggcttttacctataaccacagaagcttatattcctaggaaattcttaccttttccttcccctcacctttgtccacctattttcggcaactcttgaagtcttgtttgggcagatcccttccatyttcatgcctatcgtgctgctttagcacctcctgtctcgggcttgttaacaggttccccaggctccagactcttttgacttcaactcatctttaaaaccactaccagattaatcttcctcaaacctgtgcttatctgtatttaagactcttcatgatttgactcaacctacttttccccttaatttccttctcttcttctctttaaaataccagatcccactcttgtccctaattgtgctttatacacctccttctcactgctttgcttatgccatccccttcccagccctgggcaggaaggaaggggttaactcagcaggcctgggttattcaaatcctgcacatttcaaagaaatgcctgccttcaggactagcccttggtcagctcctgggaattaacctctgagctcttgaaatattcttccagataagagtctttttgtatgcctgaggccttggaccatgctgtacagataaatttatcctgacgatgtgatttatggtgaagrcttttttttttcttttaggtagggggaggctggaatctcagtagctgaggtcagttaaggggcctatattgctgatctccaataacaactctggacaccaaggctcatgtgagcctttctggttggcaacattgagcatgtgttgtcatacattgytgctgggagaattagacacatccccatgagactccatggggaggggaccacaaaaaccttgcacctggtttcttctggacttccaaacatgtaccttctccctttcctttgctaattttaatctgcgtcctttcactatagtaaacgataccctgtgaatttaacagcttttctgaagcctgtaagttcttctcatgaatcatcaagcctgaaagtggccttgggaactcgtgacacctctccacagaatggccctctcttttcgccttacagtactctatacattcttccagagactgataaaatcccttccccttactttgccttccccaaaaggtagccagcaagcagcacccattgctggtgagagtgcccactggaaaaggcctctctgaaaagaaatttggccatgttagcaaaacttaaaatgggcataacattgacctagcagttccacttttttggagtttattctgtagaaatccacacccaaggctgcaattagtgtgttgcagtcttatttattgaagtcaaaattggaaataattcgttatctattaatgacaatattaatagaataatcccttaatagtaatattatggaatagatatattgatatagctccatgtactgagcacrttctgttccagccttgtgctaagtgctttacttaaatattttccttgaaaatcttccttgtaggtaggttacctttacttagacaaacattgaggtacctagaagttaaatgagattacagggctaagatatatatgactccatccacacaatttataccaggcagtgttaatgaagagtggtagaactctatacgctggcatggaaagatgcttatcatacctcattaagtttaaaaattaaaattacaggccggctgtggtggctcacacctgtaatcccagcactttgggaggccgaggcgggtggatcacaaggtcaggagtttgagaccagcctgaccaacatggtgaaaccccgtctctactaaaaatacaaaaattagccgggcatggtagcatgctcctgtaatcccagctactcaggaggctgaggcaggagaattgcttgaatccaggaggtggaggttgcagtgagccaagattgtgccacagcactccagcctgggcaacagagcgagactctgtctcaaaaaaaaaaaaaaaaattaaaattacagaacatttgtatagtatgttaccatttttataaaccatatatgtgtgtatatgtacatttgcataggaaacaaaaatgcagaaatatttattaatttgtagaacaggtaacaggtaacttcttttctcccaaatacactaagtgatgattatagcattaacttggctgccctcatgcagggtatataaaacagagaacttatgtaccacattttctttctccagtctaccattgatgggcatttaggttgattccatgtctttactattgcgaatagtgctgtgatggacatatgtgttcatgtgtctacctatcgggtactatgcttattacctgggtgacaaaataatctgtacagcaaacccccttgacacactatttacctctataacaaacctgcacatgtatccctgaacttaaaataaaagcttaaaaaaaaacatgtaatggagaactgaaattaaaaataaaatctgtgtgtttccatgggtaaaaggaaagggactcttgattctaaactttgggcaataagaaactattaatatatgttagaaatactactaattcatttatgmaaataaagagtacttgggttgtttcacttatagaaacagactatatataaatatatatgagatatacatatgtatatgtataagatactatatacatatactttgtatatatatgtatgtatgtattcaacataactttaggtgtaagaaatttagaaagtggagcaaagcacacacacacacacacacacacacacacacacacacacgcacacacataaaaatattgacccatagatggatccattatttccttggagcagcatatattttttgtcttctaagaacaatcacataagcagagatgctagcaggttttctcaaaaaagaaaaaagaaacagaaaagaaaaaagaaaggttttgatgtttaagtaaatttgacagacactgtatactgcgtcctctccttatgctagtgctaatatgtatatcaaagaagtcctgcaataaacccttctttaattcagtatttctttaattgtgcaactatataacacttctgccacctgactgtctgtacctgagcaccccatagaatgctgctgcttccctcrtcataggaacctgggcactggcagcaagtattttctcatctctctatccaaagatatttcaagagcctcaatttatatgtcccagtatttatacagtcaagatccccaggaatgactctgattgtctctatctgagccacatgcctcaaacagtcactgtggaaaaggggataagatacctctattaatcagcctggatcccaggctgagcactgtggccagggcactgaactttgtgatgaccagaatgacatgaatcacattatttgagtgaggaaaatgagtttctgcaaggaaaagaagggagtgaaaagatgacaatacataaggtgtctgacatgctgctttactctctttatctgcttttttattgaaactccttgtgtgttttataaaataaatatggtatatatgtaccatatatccactctcacattttttaatgtatcatgaacatttattttccctgacattaaatattcttcaaaaacatgagcttttagaactgtatatatgccattttatcaatggaccatactttatttaacaactcaaaggcatttagtttgttcccagtttatgctatgttaaaaaaactctgtgttgcacattctgcatcaagagttcttggttcaacttgacattcatattcataagcccatttcaccattctactctaaagggacgtagtacgggaacatggcttcctagaagggcagtgatggttatttcttacctataggaggccttgcagcagcccatagcagctcatgtgcaaagagatgagatgcatactaggtaagtgcaggagttttcctggtgtaaaagccttatttccctcaaagaagccagtagctcttacagcaaatctataagcatagctttcaaagtcccagtaaaggacacatccagttacaagagctctacactcagaaagaccaaaactgtggttcctatcagttatttgtagttgtattagtctagatgccacttaccaatccagggtcagttttattataaatcatgttgactagttgtcaacatagttgacatacattctcgttaggttacyggataactgaaagtcaaattctatgctcctggtccaggggagatacagagccaggaagtgggatgattagggagttgtggagcaacagtggctgaaatgagttatgattcatcaatgatcatgttatgctagtcattagatgtttggtaaaatcatttttctttgagcccaccccagagcattttttgttgttgctaatttgtgagtgctgagcaaaagcaatctagttctactttttgctctctaaggaggttaaagctttctgcctttacctgaaatgcaccaagctctttccatcagtctcatcctgttgttcttttcaactcctaatcggatcaaggaacactccctatctatttttatttcaaggaatgttaagcagatcatattttcagtgggtattttggaattcttgcaagactgccaggaaattgtttggaatggctgtagcaaaaggcaatgcttcccaaagtgtaatatgcatgcagatctcctgaagatcttgttaaaatacagattctgactcagcaggtggagcctgagattctacctttctaataagcctccacgtgttgctgatgttgctggtccatggtccccactttaaagaaagggcgagagcattggttttgagtcttggctgctcattagaatccactagggagctcttaagtctcctgacacccaggctgcacccaagctaattaaatctgaatcactagtgttgggactcaggcatttttttttaattcccccaggtgattccagtatttgagaggcactggcttagagcaaaaggttggtaaattgtctcagttagtctcttagttaggtcacaagctaaattctgtagtcattgatgaggcaccaggtgtgcttttggaaaacagacctcctaggaagagtaaaccctaccctgtcaaagtcctaaaagaagtctaaagatagttgttaagatttttaaaaattttttggttttgtttttcttgagtgtgtttgtgctttctcccctaagagcaggcaggagttctttcctgccattaggctatcctaatttaaagttcctgttattgatcttggactctttttttctttcttttatttattttttttaatttcccacacaacaccagtgtagagcctggacttttttgaaaaaaacttttccttttctgaaagcttcaggcaaactgaggctataaagcaaaggtaagagggacctactcactggccttgccttacagcccaacaaaatgaaataatggagtctgaggtttgagataaatatggttgcgtcaggctagtgagctttccaaactccaaactgatgaaaaaaattgtaccctactggagtccactgtaattaactctcggacagcatttccattataaatctgagttttaagaggtttgttactcagctgtaaaattgtgctctaggctatggcttggtcatagacaatgtcagcttgaaaggggttttaaaaataaaagaaggtttttttatttttcattgagcaagtgaaatgtggttttaaaaagaatgaagcatccactgtgctcaaacattctttgcgtctctattttttcccaagtggtcttgatttctaacaaatgcaacctagtttgttcatatatttttaaaccaaatgtttaaattaccaaatgtttggaggactctttgaatttaaaaaatacacttttggggtcacaactcaataagaagggagaaaaatgttctgtgctatttttcctgtgcagaactagggtgggacacagttccattctttgaagatattgagcctgttgctcgtttttaaaggtggaggcgggttgcaaaggaaggaaagctgaattgaacaataggaagcccattcacaatttgtgtgctttcactgaaaaatttccaaggctgtttctaaaatgtctgtcatatgtctatgttaacataaacattgatcaatttcatgacagaattttcattttgtgagacagagtcttcctatgctgcccaggctggtctcaaactcctgagctctaactgttttctcacctcagcttcccaaaatgctgggattgcaggtgtgagctattatactatccccggccctcatgacagaattttttatttttgcttattggtgtgggactttttttcaatgatagctgtctccccatattcagaaaggaactgttgcttttctccagtttagcttgtccttctaatgggtatattggkcaggacaatcagacttcccacaatgtcacctaatatctctccctggcatcccatctgctcatagtgaatgtccttttctccctctttgtcttctccttctaacaatggatacagaactcatcacctttacctcatgcctgactgtggcataactaaaccccagttacacaatggtgtggcagagtagctctgccccagggtttcaatttagagaacctcattactggccagtagtggttgacctgaagccctaggactccatgtatcccaaaataccttacacaagtgtgactgattgaagtaaattattatttataactgtatgctgcaatcattaagagtaatatttcctttgacaagcaaataatatacaattatgacatataaagattgtgtaagcaactactaatagtagaaataaataaataaagacaggcattaactttaagaacatattttaggctctttgtcaacaatactaagggattcaaggtattctggctattaccctcaattcgattggccatctgtattctaactaaaacaggattaccccacatttgagtccagctatcatctctagggaataatgcctgaccatccccctgcacccacctattctggatcaagtgatcctcttgcctctctcctcactctttttactggcactgcacatagcttgagccacatagttcaaatgtggatccttggaattttctgtctattctccacaactaggatgagctctttgggttcagagactatatatcttattcattgttggaaccctagtgctaggacactaccttagcactatactcaagaattatttgttatgtaaatcaatgacgagatgaataaataaacaaaatttaaatttagggatttgtgcctaaataacaactcttgaattcagttgctggcattctagaatacattctggttttaattaaatatttggaaaaacggtcttgttttatttgacaagggctcattgcctactagtagcaataataggagttatggtaataatatttattgagtattcaattaggaggcactcttcgaaatgctttacctatactatctcatctaatcttcataacagcctatatygtgagcactgccattattcatattttacagataaagaaactagctacttgcccaagccatggctagtggtttgaacccagccattccagtttgaaccacctttaggcaccatgctgtatggatgagataaacaggcccactgatgtccttccctatgagcatgtcatggttgactctgattttgtatcaggggattgccagtcttcagcatttagtttggcagccaccatactccttgtgaagtccattttcactgacgttcattttccttgtagtgtgcacatttttttttcagttctttgctgttagtgttttatgacttgaggagctttaagaggcagctgtattgttaatgtaagccgttaccacagaggtttctgctctttttcagaacctcataatttgtaaaaagttctggtttgggttttcctcacatcttattgctgacggttttagcagtatgtgcaaacattatcagctgtctccagggtactgattgagatataaatgtttctgtaattgtctaagatcatttgtcactttatgtagtacaacttgctcatgtaggtatgctctgcttccaagtgatttttctggccccagtgggctataaaatcatttgatgctgctgtaactttagggacaacaaaatattagctctgaatcattcgcttttgttaactcacattttaaagttgcccttgtacactaagaagaggaaaatggtaagcagagattcttttgttaaatagaagaaaataaaggaatatttttctcgtcatcacttctttcccttgctgatgatatcgatttccagtgctgtttctacaagctttctgctgagctctttttcattttaatgcatggatattagctatttttgcaaatagtggatcataggcaatatcaaaagctgctctggcccgcrtttttcttgagctaatagctatttgaaaattaagcacttgtccaaggccacacagtttattaggaccaaaatgaggctagactcctggtttccagacatctagcttggcactcttttcattgttctacatactcaaggtttgtttgtttaagatgatggtcaatattgtaccttaggaagaaaagttaaagagaaattctcttgctaaatggcaattattttgaggcctcaaagtcatcatagagttaagtttccaaagaatcacacatacacacagacacacacacacacagagataaacacacatacaggtaacttaagaacctaggatgaagagatataaaactgtattttattttttagccaaatactagactgacctgaagttaacattgaaaaaaattatttawtatatgtttgaatgccctgagttactacataaacttagaaatgagtagcaatctctcaattaactsctttaggtattatttttctcagtgaagttgatattccagtactgtgtaaaatctagtttaaaawttccatgatccttcatcatgtttccaagaagaatttacagtttgtatgagtttgccagggatgctgtaacaaagtaccacagactgggtggcttaaacaatagaaatttattgtttcacagctctgcaggctagaagtcttcatagcattggtacggttagttccttctgaggattttggggaaaaatctactctatgcctttcccctagctyatggtagttttctggtaattgttggcattctttggcttgtagaagaatgactataacttctgcatttatcttcacatagcattctccttgtgtgcatatctgggtcaaaatgtccagtccagttattctgagttaatggcacaccttactctagtatgacctcaccttaactaatgacagttgcaatgatcctatttccaaataaggtcatattatgaggtactggggcttaggacttcaatatatagatccaacccataacacagtctacttaagaaaagattaatgctttgtttagtgacattaaacaggaaaaatctaaatataggcagtatggtttcccatctatctggaaaggaagatgcaagtggcaagtatttactttaatcatttactatcattaaatccatcatgtacttttaaataaagtccctataattcaagaccacactacctggagattaagaatatacagaattgtttcatcaccttgagatactgatttgatttttataggctttcctcttgtctattttttttttccttagcaggacaaatattttcatttactttgagtgaattcttgataagtttttgatcctcaacttccatctccactttatttaaaaggttatttagaaggcagcattctctaattccccacaggcaggttattattcccttttctctgcttccacaatattaagtacatgcctctattgtagtattttacattcattaaaatcatttttttaatgcctgactcctccattagactgttagactgtgagtaacttgagaactggattgtctatcttatttataagacagtatattattttcctagtacctggtagagaatcctggacataatgcttgggatacattaaacatccaataaatgttcattaaagatgaaatcaacatagaagagttgatggaggcagataattttaggactagaagatgtctcaaatcaaatgttatctaatataaagagtataattggattgtttgtaacacaaaggataagtgcttaaggtgatggataccctatttaccctgatgtgattattacacattgcatacttgtatcaaaatatctcatgtgcctcagaaatatatacacctactatgtacccataaaaattaaaagtttaaaattaaaaatatgtatatctaatatagtctatatacctattgtctggtcagtggtttgtcaaaacacacaaatataaagtggcaaaaaattaacccaaattagtattcacgaagcatgtattctcaagagtaatagaagaaccaatacttaatttatagggcaacaactatttgacaaattcttagaagcataaagcatatggtcccttgaaactgtgaaagattttaaataaagtctaagcattataattagatagaaagcatttcaaattgctttacattttaaaacttttgggaagtctttttcatgatgatgtaatttcaagtaataaataatatttatttgagtagatcctatctgttactttgtggctaccttgggcaataactttatctttctttggtcttcataaaatatcaaactatgagttgggacccttttatctccaaaactttattattcaaacatacctcctactttatatattgtgtacttggtatattcctagcatttagcaagatacaaagatcttgattgaagggtccaaaaatgtatgagacacattgcctccagggaccaacagctggatgtggttgcaagacacataagaatgtgactattccacaagatagataaaccctgatagaggcaaaagatggtgttgtgggaaagggtagaactctcctatatgcccaaggaagccagagaaagtttcccaaaggatagaaacgttcagcctgggctttgatctatgattactgaaaggttacctaagtaaaagagaagccgactttcatggagaaagcctgcttgctttaaatttggtggactttaagggggtgttcagaccattcatttttacctcaacttgactttgaatggttagcaatttcatgcaaggagagcagagcccaaccaaaaacacccaaagcctcttcccatgctcttagcccttggcaacctttaatttctgcttgagccctggatagatgctgagccttgaggacataacttgagtttagaagttcagtatccaacaagggcttttagccattgcatgtccccaaaagctaagggcagattggcactgtggagaaacattttcagaagctccctgaaaaggatgaaggaggtcagggcaagtttctctgcaccatagaagccacttcttccctcccattgttaaatatctccacctttccacagacacagggtgtcaccagatctttgatctgtacccacttacatgtcctgtactcaggcccagtatagacaggcctcttcccygagacgagagagaaacagtccaagtccttttgctacagagcaggagcaaagtcagctttcctctcctgcatcaactgaagttcagtgtaacatgatacaggatcactggtgactgagatgaaaagaggtcaaatggaagtgaacccaaaaacagtcagagggaaagtgggaaatagaagggaactttcatttatttagtagttctaaattataggtgcattttctttcagtcattcatgcattcactcaactagtatttgggggtagcactatatgccaggcactgtagtaggcatagaacatgagcaatataggaatgctcttgtctttcacggaggctttattctgatggggaggagggatagtaatgaggcaatcatagattgtgataggtgctattaaggtgataaacgggaaatgtgatagtgagttgtgatgtgataatgaggttgatgagacctcaggtggataatctgggaaggcctcttggaggcaatgtcatttaagctgagaactaaaggatgagtaggagacagctatgcgaaaagtcaggcagaaggaactacaaatgtacagataacaagagctattctctttgtatttcacaacaaccacttgggkatgtcattattcttcatttaacaagcaagaaaacagaagttagaaaagaaggaaagtgtaatgatcagatttctctcctgtctaataaagagattttatggagggatgttttactagcatcttgcatggccacagcacattatctcatggtgacaaggttctcttacctacctgagccttagtttctcctgtaaaagaagcataaaaactcacctgtctgaaggatctcacgaggattaaataaactaataaactgcttaacaccatgctgaactcaaaaaaatgcttcatcagtattagctttttccctttttgccttctttttccagtgtcagtctaaaagacaccagaaagtgtctgggatatgaggtaattattcagtggccatgtatttctcagctgtgaattgtagggaattcaatttcaattttgcctaatagcccatttagtgctgttaaaggtctagagtgattcagtgccctttaatcgtgagtacagatatgtagaaacacaaatgtctttcagtgaacagaaggctgacctgatagcttaaactgtgctggaaagaagtcaatggagcatcacattgtccgtcgccagtgaacactgtttgtcctcttccaagcagtggaagggaaacacagagaggaacatgcccagtcatttgttttctttttcaactatccctgaaaaccttgaatttcttaacggtgtcctggggctctgttgactctaaaattgattagcaagctccctggatacatggactgttttagtagcggaggtacactcaacctttctgcaatggtacaatacgaaacagacaaaaagagcaaactgctttgtataggcttagcattaatgaatttactctctttctcagccccagtatttccaataaaagtagtggatttggtcttgtggcatggtctcttgagtgaacgctgaatttatccactaatggacctaatcactgtgcacaccagaatatgtttccatcaaaaaacatgcctcttgtaaagtcgagaagctataaagtacatattttaataggaaaatttaaaaatgaatgagagaaagtccttatctaccaaaagctttttgaaaacattcactcccacttcttcttgtcctacccacctccccaactagatcctctctccttgctacctctttaccatcaaaaaaaaaaaacgaaaaaagaaaaagctagaaagctccacaccatatgtttctgttattgaacagtaaatttctggttttgtggtttatgaaaaagtgttggaagcattgagtgagagttctagatataagggcctataccaccaggtagtctgcccttctttctttccttcctttcttccttttccacttgaaaaagttttctgccatccatttttatatgccattttctagtattttctgtgaaatatgcccttagatttctagctagaggttcacatctaaaatataaaccaaagcaaaactagaattgaggaacatacttgctgttttcaaagcccggttgaggactgttatcatgggttttttttcctgacataatccatacacaaatactattcttcttgtgaacctttgtgtgcagtattcttctcgaccctgtagggacaggtagacaaggccccatttttcagagctgatagcatactgaactcaatacctctatatagaaaaagaaaattaaccacaccaagtastacgtccagtataagacagttaccagcacagttaccacaaatgccagtaagaattcagcagagaatgcagaaagaactgcaggctggtgcagctagggagaggcaggatgaattcttcagagagattgggtgggtgtgaatgtaggaagtgtttagagatagagggatgggaaagaagcaaagaggagggggaagacattaccggaggaggaaggaactgtgcgtgagggtccttgcttcacagaaaggaagctccatttggaatctgtccaacagagtggaatcttggcactggtaggttttgctatgcttctgccacacatgttctgcagaatggatgtggcactacctagttggaagattgtggggaatgaccaatgagaacaatttgaaacctacttggctaacatgtcctkctagaaggsaaagctaacccagatgggagatggggtggcatccaacccatgatggatgtcctggaaggacaggttcattgaagaggaaaataatttgggtgaggaatcagtaaaaatatgcaaatgttaccattcaggcttaagggtgtatattaaatggggcattgttttcaaggagtctgcctgacctcaaactctccaggaagaaaggtcagcacattgattgctcatgtttccaaggtaggacacgcttggcaccaacrggtggcatgtctcctctgtgctgcctgctgtctgtgacgtcaaatctagcttcaagacattcacagctgctacagaatgttctgtttgagagttcaggaggctttgttgattgggacacctagatgctgaagactgatagggatagggagacatcagaggagagggatttcacaaagccttttggaaggattaaacgttctaataaaatgcacctcctgggtctgagttaaaactcaaatgctttgctaaaaattataaaatatcaacaacagaaacctcataaaccctaaatcctttaccttgtaaggtacctcacaccagagacagtgcattgcattggtttcaacgtcattgcatttttcagcagaaaatctgttaggtttaccatgaatgtaggactacagcaggctgtattgagtttattatgcagttgaggtggcaaatggttttctttaatgatttgcatcatctttatcttcattgttgccaccccgcttctgatatttttctcactgaggtggaccagtgcttcagataatgaactagcatttactgtgaccttgttatactttattacctcctttagccacacatatccccaaactctttacaaaaacaaccattatatgttcatgttttagggaggtacagcaattttgttgtttagtatcaactatgtcacccaaacaacagagtaaatggggtaaactgcttcaagttaaaatccctcaagccactgccacaccaccaaatgaaaattcatgggtcatggtgaggaagaaaaactcttgaggtttcacaagggcttcagggattttagctagagctggattttttcctaaaacttgtggatttttaaaaaatgtgggtggaggagggaggctgcctttattttctattttgcttcaccgaccatttggaaggtttatgctgtataaatcctacaagtatgactcaatacgatccttctaaaagccactgatattgtgcaagaaggccgtgaagaaaacattttaaatcttaagaattctgatggtgaggtacaccacaaagcctccatttctggaggaaaccaaccctatagtgggaccaaaactgacagtacactgctcactttgaatttttttaaaaaattggtcaggtccctcaaatttaagaataatgagacaattrcaaggtttctggtgactgaagctgctgcattataggactcatgagagtccccacaaaggtcagttccaggcctggcccttgctgtatgttgcccattctgtataaatgctaccctttgagttgtatagtgggcggccctacctgtgatgtcacaggcacaggacctgatttcctcacctgaattctattctcagctctgctcttaaattgctacttgacctttgacatttgtgtaactttsgttttgcgttatctgccagtaatcaccatggtccctacaatttctaacattttctcatactcatatttttaccttctatacaatataccctctattacattgtgagaataaataaataaatattatatatatcatcaagaaaatatatgatagaaataaaatatatcatatatataaaattaaggaaagatgtaatagtaataaaagtaaactgaaagtatactcaggaaacccataagaattttagttttgctaaagctttgggtgtttattcaaccttcttagatactttggagtaccttgagttttagtgcccagcatggggagacattgcatggaaataaccattcctaatttgcttagttgaaacagaaaacaggagagtctgctggcagtaagacaaaattattttctttccaaatcttaagaatttggcttaggactgggttttgtcaaagaatgttcttgctgacatctcatccagcttcttccatcccttgagcccatcagttaaaactgttcgatgctcactggagctaagtcctcttgggaggcttttaatggaggtagattactattcattttaaaacaaaaagatcaaatgatgagtgggcgtgcattgggataaagcgatttttgttttgttttgttttgttttgtgggaaataaccaagtcactgggagttttttctaacagaaatgtaaatactgtgttgactatctgttcccagttttttctcatgaggaaaaagagaaaagggaggatttaaaattaattacaggccaggcgtggtggctcacgcctrtaattccagcactttcggaggtcgaggcaggcggatcacgagatcaagagatcaagaccatcctggctaacacggtgaaaccctgtctctactaaaaatacaaaaaattagctgggtgtggtgatgggtgcctgtagtcccagctactcgggaggctgaggcaggagaatggcgtgaacccgggaggtggagcttgcagtgagccgaaatcgcaccactgcactccagcctgggcaacagagcaagactctgtctcaaaacaaaacaaaaaaattaattataaggccatgtagttagaggtaattacaggaagaattccttgcttgcatgggtttttaaatatctgaactagttgccctggtaggtttggaacgtttatttctataaattttctagaaagcaattgatttttttttccctttactttgattgtccatcattccaatcaacctgcaagagatacatccacacctgtagccatcctggttataccttcttcctaaggctggctgaattgcccacttctctgtggctccatagtacttagtacatactactctcacagtgcctttgaaattatatggcagtttgtgtgcttctctagctactagtctgtgaacttcttgagaacagaacatatgttgtttatttttatgcttgtttttattctttcaatcttgtttctcagttcctagtatatctgttatctgcctgacagataacagtattcartaaatagctgttgaattgaataaaaatgagtatttatatagatcaaatagttccaattcaggaaatatgtccagacttgcttaactaactcttaggggaataggcaggaatcatctattctccttgcttctgtgttatctaccagacctccatacacccctacgtttatccccacactttggaacaagttctacttcttgcctctttggtcacaggggaaagatgtctgataaatctacccagattgagttgtaattgactttaatatgtttcccctgagtgacttaagcacctctggtttatttgagctctgggtaattgttggttaggctttataactttcagtaaggagttgaccttgttggaggtttgaaggtcataatcatttacctgccatttataaattctaacagatacaragagccatgtggatatcacagcattattaatggaaccctgtggactcctaaagaacaaagcccctgctaaaatgggatgtgagaacatggcttaaacaggaagctgaagtccatgcttcctctgacttctccagacatggatacagcaactacctaagggaaaaggtggatctacatacaaaattgatcctgtatatttcctcccacaatgccaycaaaatatggctggaaaatgkcaccaaggcctcctaattatcaaatctgatagtcatttgttttatttgwtactcaatttgttatttgactctgttgaatacatctttcttgaatttctttctaccctaggcttccaggattatctcttctctcaccaaccattctttcatggactctttcttctcttttcagcccataagtgttggtatttctcagggttctgtgataagctatcttctcttctaattctacccataatccatcaggaatctcatccactcccatagtttctagtctgtattccaataactctgtgaaattgatattgccaaccagatcactattcatattctagatcaatatgttcttgtttgtttttaattccacaaatattcaacaagttactgtgtcatagtaaacagtgagaatacaaagagtctctgctgttaaaaaacaggtaatataaacagagtgcagtggtaatactcaagaatattttgaaagcactaaataagaaaactcagatcaaaccaggaaatttagaggaagaacttagaaagaaaggatgtcatcagtgattctaaaatgctagttaacagctttgttacgagagtagaaggagtaataccagcagagaacacataaataagragcaaatttctccacatgaatgatctgcagatactcagaaatagcatgtttgtcacaggttaggtttcccagaaagcaggctctggacaagatttgcatgcaggaagaggggatgctcttggctggatacctatgggagaatgaaagaaactggattgggctgaagggagcttgaactgccattcaatcacaacaaagtctctgattatcccagtgagacctttgcagctgcaataactccttaaagttccctaaatgggaagcaaagggacaggcctttagacccttctatcacccagtcattggatgtgggctaccgccgggaaggagcatgactttgggtaaggcggttttcttgagctgaacatatgacccttagagggaatgtcactaagagctgttggtttctaaaacttcctgmagctggaggtgtaagtactatagttttggaggtagaaatttaggcagtattccatggtatccactacggtgtactccttgcaaccattcatacccgcttgcttcttayaataagttctaggccttcaggtggattagtgagatgagctacagctcctgccactgcagctggtctcatggccttaacaaatactcattatccttctcctccactatccaaccattcagaattcccctcaccatcaactagcacctctgcctgtttaggtggcttacatatgggatgatctggacatggttttgagccccatgatcaccacattcttttcagaccatarcactgaacttgtatttttatcatcaaaattgagcaagagagtaccaagagacaccgaattacttgactggtgaacatatttcctgccctcattctgtagcagcagccgaacctgtgcctgatgatccatgttggttatatttgccaggatgttgacccttctcacttcctgggtcttgtctcaagcaacatgacrtgacggggtggtagccatagcttgagatttaatggrcttcttattgtgttatctagatgaagcatttcccctttagaaaccaggatttctaagtcgcagagcccagagttgtaggaacagctgtgggtcacttaggagtgatgataagtgggatcacttacacttttacaccttcccatgttttattcctactggggacatacataaagtctacactacatcctgaaggatggaacctcttcctttcagggaattctccctaaaatgttacctcaaactgtacattcaacagaccattttattactctgtcaagccagaacttccagagcatgcagtgtgtgattatagtaatggatcccatttatgtgtaccttcaatgtgccttcaaagtgtactaggcactttacatcaccgtagttcccacttttgaaccctaacaagatcatgaccacttgatatgatctttgtactagactatcattagtcatctcttacccacattttacagataaagaatctgagtctcaaaagagttctctacttcaccagtgtcacataaagtaataattgtgagagccaagattcagacctactctaaagttagggccctttctactgtattgcttaacctccacacatataataatctcatttaatccttacgaggatattgtaaaatatgtgttattcctgttctccatatgaaaagacagagactccttctagttaggcaacttgcagtgggttatgcccctgggaagtggctcacctgggacccgaacaaaagcctgactctgaagcccaagttctttctactgtactagttgccatggtgtcaacctagcatcagagaaaagtatcggagaagaaaggaaaaataaaggtagtgggtgtagatcattctgtgatgtttaacttttaagccatataggcaatagggtcaagttacttgttttatatgtgtatattgagggttgatgggtggggcagagaatagaccctcttgattcagtgctacctacagcttttacagaagcaccaaccctgaaactacactctgcacttcttacatccactttaaagaattatagattttattgaagatattgtgggagatatatgagaaaatttacattgcatattacccagaagacaattcaagatcccatgagacatctgaatgctccctaaagtctttctttggctgcattgctcagtggggctcccttctctctctgacatttccatctcatggatcagttccttatgttccagtcccttccaaaacctgggctctagacatacgctacaaagccccatgcggtgggggcttctctcacaggggatggggcagccaaaccacgttgtcttctccagtcacttctatccccaactacaaattctggtgaataaaactccctctatctcagtctccatgatatgggaggagtgtgcataccagaaggcagagggaaagttgccatttgggaggtagattatctttcttcctgctaggcagacctctaatgaatgaatcctttcccaaatgccactcagactgcttaagtcctgaagggtctatgcccctcatctttgcacccaaggaccttcgtaatctgacacttgcatctcacctctcatatcctagcctctgtattcctattagtcctactgactcctgctagtcccaggtttaggcctttggacaacttcttttttcctgtcacattctttcctcctcctgagccaagttcttcctgccttttaaacagccccatctaattctgcttccttcacaaacccttctctgacaactctccctatcctaacctctcctgtttgttgttatttatactcacaactcatgtacaaagatatgatattctttaattatttttaactaaatatatctttgcacataaacctccatttctgctaatagtgttaatcctgtcaayttactgtaaacaagtcatttccagggtcagttaagtttttcatgttattgattcaagactcccttccatccttttcttctctttcttttggttgatgatctgcattccaacaaagggattggcctgtaggcccccgttttcctcactgaccaatgacagttttatgtggtctgtaccactatgtattggtatctcctagtattcatagtcctcctttgacttccggttttatggccttctcagtacttatggaccttccataaaggaaacagaaaacctctcagctgctctcttcacaccctgctggagtgtgaagaatcctgtgagcctgacctgagattcatctgccctgacactacctcacaaatggcacatcagaatgaggattttctgataagcacaggcttccctggctctaccttgtgattctcttctaccacctatctcaacttatctgatatgttatgacatctagttctaaagaactcagcctagagtgggagacagagagcaggcagcccatgctcatgtctagcctttcttccatcttttgacattctctctccaatccccaccccttgttcctagagggtgttgatttcctttctacgtcctgtatcatgttctgtagcttaccctactgtaagattcttatataacttccacatgttaaggcttccagactttactacaacttacagatcttttttttttttcctcccaaaaggcccagctcttacaaatcaagagctccttggctttcaaaactgttaactctgtcatgaatttcaaggacatattttggaactcaaagccaagaattggacattttgttcttgatgcttcttttgtgtcctaccctcccagaagcagagagctccaacattctttagtttaatgttagaaacaccaaaagatacttaaaaaattaataaaaggaacaatatattttattttataatattttgctatactagaagctcatgccagttttctacttttaattatatggccttgcattttttaattgtcctctaatgtcttaactctagtattaaaaatttaagattccttagggcagagaagtcagagacgtcttttatattcctcagagcacctggattgatttgttagacaaatatttattgagtactaagagctgttgacaaaaagacaaatgagagtccttgcccttcatgagttcatgagttaataaaaattattattagttaatctaaggaaagtggaaagttaaaaccaagataactcagaggagaaggctataaattaatcagaatgaggaatccaaaacagcttcctagagaaggtgacacttgagctgggttttgcctgttcagctaattaaacacgtggaaaagagttttattccatccacagggatctggatacatgaataaatggaagtatgtttgggaataacaagcatttaattgtgcctagaagaagtaaggagtctttggtgatcagagaggaaggcagtggagagatgagattagtattcaataaatagatccagaggacattttgtgcttattagtttgaattaaactttgtgtttttttgttttgttttgttttgtttattattatactttaagttctagggtacatgtgcacaacgtgcaggtttgttacatatgtatacatgtgccacgttggtgtgctgcacctattaactcttcatttacattaggtatatctcctaatcctatcccttccccctccccgcactgcacaacaggccccrgtgtgtgatgttccccttcctgtgtccaagtgttctcattgttcaattcccacctatgggtgagaacatgcagtgtttggctcttgtctttgccatagtttgctgagattgatggtttccagcttcatccatgtccctacaaaggacatgaactcatcattttttatggctgcatagaattgcatggtgtatatgtgccacattttcttaatccagtctgtcactgatggatatgtgggttggttccaagtctttgctattgtgaacagtgcctcaataaacatacatgtgcatgtgtctatatagcagcatgatttataatcctttgggtatatacccagtaatgggatggctgggtcaaatggtatttctagttctagatctgtaagaaatcgccacactgtcttccacaatggttgaactagtttacagtcccaccaacagtgtaaaagtgttcctatttctccacatcctctccagcacctgttgtttcctgactttttaatgatcgccattctaactggtgtgagatggtatctcattgtggttttgatttgcatttctctgatggccagtgatgatgagcattttttcatgtgtctgttggctgcataaatgtcttcttttgagaagtgtctgttcatatcttttgcccactttttgatggggttgtttgtttttttcttgtaaatttctttgtagattctggatattagtcctttgtcagatgagtatattgcaaacactttttcccattctgtaggttgcctgttcactctgatggtagtttcttttgctgtgcagaagctctttagtttaattagatcccatttgtcaattttggcttttgttgccattgcttttggtgttttaaacatgaagtccttgcccatgcctatgtcctcaatggtattgcctaggctttcttctatggtttttatggttttaggtctaacatttaagtctttaatccatcttgaattaatttttgtataaggtgtaaggaaaggatgcagttatagctttctacatatagctagccagttttcccagcaccatttattaaatagggaatcctttccccatttcttgtttttgtcaggtttgtcaaagatcagatggttgtagatgtgtggtattatttctgagggctcttttctgttcccttggtctatatctctgttttggtaccagtaccctgctgttttggttactgtagccttgtagtttagtttgaagtcaggtagcatgatgcctccagctttgttctttggcttaggattgacttggcaatgcgggctcttttttggttccatatgaactctaaagtagttttttccaattctgtgaagaaagtcattggtggtttgatggggatggcattgagtctataaattaccttgggcagtatggccattttcctgatattgattcttcctacccatgagcatggaatgttcttctgtttgtttgtgtcctcttttatttcgttgagcagtggtttgtagttctccttgaagaggtccttcacagcccttgtaagatggattcctaggtatttattctctttgaagcaattgtgaatgggagttcattcatgctttggctctctgtctgttattggtgtataagaatgcttgtgatttttgcacattaattttgtatcctgagactttgctgaagttgcttatcagcttaaggagattttgtggtaagacgatggggttttctagatatacaatcatgacatctgcaaacagggacaatttgacttcctcttttcctaaatgaataccctttatttccttctcctgcctgattttcctggccagaacttccaacactgtgttgaataggaatggtgagagaggacatccctgtcgtgtgccagttttcaaagggaatgcttccagtttttgcccattcagtatgatattggctgtgggtttgtcataaatagctcttattgttttgagatacatcccatcaatacctaatttattgagagtttttagcctgaagggctgctgaattttgtcaaaggacttttctgcatttattgagataatcatgtggtttttgtgtttggttctgtgtatatgctggattatgttattgatttgcatawgttgaaccagccttgcatctcaggggtgaagcccacttgatcatggtgggtaagctttttgatgtgttgctggattcggtttgccagtatcttattgaggatttttgcatcgatgttcatcagggatattggtctaaaattctcttcttttgttgtgtctctgccaggtagaggtgtttatagtattctctgatggtagtttgcatttctgtgggatcggtggtgatatcccctttatcatttttattgcatctatttgattctcctctattttcttctttattagtcttactaccattctatcaattttcttgatcgtttcaaaaaatctgctcctggatccattaattttttgaagggttttttgtgtctctatctccttcagttctgctctgatcttagttatttcttgccttctgctagcttttgaatgtgtttgctcttgcttctctagttctcttaattgtgatgttaaggtgtcaattttagatctttcctactttctcttgtgggcatttagtgctataaatttccctctacacactgatttaaatgtgtcccagagattctggtatgttgtgtctttgttctcgttkgtttcaaagaacatctttatttctgccttcattttgttatgtagccagtagtcattcaggagcaggttgttcagtttccatgtagttgagcggttttgagtgagtttcttaatcctgagttctagtttgattgcactgtggtctgagagacagtttgttataatttctgttcttttacatctgctgaggagtgctttacttccaactatgtggtcaattttggaataagtgcgatgtggtgctgagaagaatgtatattctgttgatttgtggtggagagttctacagatgtctgttaggtccgcttggtgcagagctgagttcaattcctggatatccttattaactttctgtcttgttgatctgtctaatgttgacagtggggtattaaagtttcccattattattgtgtgagagtctaagtctctttgtaggtctctaaggacttgctttatgaatttgggtgctcctgtattgggtgcatgtatatttaggatagttagctcttcctgtggaattgatctctttatcgttatgtaatggccttgtttgtctcttttgatctttgttggtttacagtctgttttatcagagactaggattgcaacccctgcctttttttgttttccatttgcttggtagatcttcctccatccctttattttgagcctatgtgtgtckctacatgtgagatgggtctcctgaatacagcacactgatgagtcttgactctatccaatttgccagtctgtgtcttttaattggagcatttagcccatttacatttaaggttaatattgttatgtgtgaatttgatcctktcattatgatgtgagctggttattttgctcgttacttgcagtttcttcctagcattgatggtctttacaatttgrcatgtttttgcagtggctggtaccagttgttcctttccatgtttagtgcttccttcaggagctcttgtagggcaggcctggtggtaacagagtctctcagcatttggttgtctgtaaaggattttaattctccttcacttatgaagcttagtttggctggatatgaaattctggcttgaaaattcttttctttacgaatgttgaatgttggtcctcactctcttctggcttgtagartttctgccaagtgatccactgttagtctgttgggcttccctttgtgggtaacccaacctttctctgtggctgcccttaacattttttcggtcatttsaactttggtgaatctgacattatgtgtcttggagttgttcttctcgaggagtatctttatggcrttctctgtatttcctgaatttgaatgttggcctgccttgctaggttggggaagttctcctgaataatatcctgcagtgttttccaacttggttccattctccctgttactttcaggtacaccaatcagacgtagatttggtcttttcacatagtcccatatttcttggaggctttgttcatttctatttactcttttttctctaaacttctcttcttgcttcatttcattcatttgatcttcaatcactgacaccctttcttccagttgatcgaatcggctactgaagcttgtgcattcatcatgtagttctcgtgccatggttttcagctccatcaggtcatttaaggacttctctactctggttactctagttagccattcgtctaattttttttcaaggtttttagcttctttgcgttgggttcaaacttcctcctttagcttggagaagtttgatcgtctgaagccttcttctctcaactcgtcaaagtcattctctgtccagctttgttctgttgctggtgaggagctgcgttcctttggagggggagaggtgctctgatttttagaattttcagcttttctgctctgttttttccctatctttgtggttttatctacctttggtctttgatgatggtgacgtacaggtggggttttggtgtggatgtcctttctgtttgttagttttccttctaacagtcaggaccctcagctgcaggtctgttggaatttgctagaggtccactccagaccctgtttgcctaggtatcagcagcagaggctgcagaacagcgaatattgctgatcagcaaatgttgctgcctgatcgttcttctggaagtttcatctcagaggggtacccagcygtgtgaggtgtcagtcttcccctactggggggtgcctcccagttaggctactcggggttcagagacctacttgaggaggcagtctgtccgttctcacatctcaaactccattctgggagaaccacaactctcttcaaagctgtcagacagggacatttargtctgcagaggtttctgctgccttttgttcggctrtgccctgcccygagaggtggagtctacagaggcaggcaggcctccttgagctgcagtgggctccacccagttggagcttcctggctgctttgtttacctactcaagcctcagcaatggcgggcgccccttccccagcctcactgccrcattgcagttggttctcagactgctgtgctagcwacaagagatgagcaacgctctgtgggcatgggaccctccaagccatgcacgggatataatctcctggtgtgccatttgctaagaccattggaaaagtgcagtattagggtgggagtgacctgattttccaggtgccgtctgtcacagctttgcttggctatgaaaggaaattcmctgaccccttgcacttcccgggtgaggtgatgcctcgccctgcttcggctcacgctcggtgtgctgcacccactgtcctgcacccactgtccgacaagcccagtgagatgaacccggtacctcagttggaaatgcagaaatcacccgtcttctgtgtcgctcacgctgggagctgtagactggagctgttcctatttggccatcttggaactgcccatggaatttaactttgaaaacttaatattacaaaaggattttcaggagggtggtgtcatataaaatacgcagttttagaaaactcactctggccgcagtgtagaaaatgtaaaaaattggattgcatttttatggaaaatcccaaattaaaagggacaaaagtcataaaattgtaaaatttgtatagcgagtggtaaaaacccaaataaagacagtggaatacaaaggaggggaagaaatagaagatgtttaacagattaaatcttcargcgttggatgtggaagttgagagggaaaatgagactgaagtttctaaagtcattgagcaattgtgaaaatactttcaatctctggaacagggaaygccaaatttaaggggaaataccaagttcagatctggctgtattaaatttgacatacccaagggacatgaaatagcaatgtctggtggagggcctcatgttaggatctgtggctcagccaagtgttggagctggaagtactgatacgagctaacataaaagtgactgctgacagcaggcgtgtgggcaagatgatcaatcaggaggactgtggcaaggaggagaagtcaaaggcagagggaaaaatcctagggaacgtggtgtaggcagaagaaaagaatcctcmggggcaagtaagaaggaactgttgagaggaaaggaggagagccaaggagatagggcacaaaatccaggggtgagagaggtaagaaaagtgtggtcagcagagacctgtaaaataaaaacagaaaaaaaaattaggaagcaagtgaagattaaaaccatcagggctctggcataaggagagaataggtaatgagttctgctttttctcgattaacaagaaacaaaagtggaggtgttgaattaatggagggattagaaatccattttttaattttaaaccatattctgaattaaccaagttttaatcagctgaatgaccaatcatgtgaatataagggaagtttaatttggtatttcatatagagacaccctttctaagtgaatgaagttttggtataataaataaacaatatacttaagagaaaaatattccacagctgtaaactatttgctttctctttaccttctggaaatgctaagtaacaacaaaatcctacattgaaacatattatcctacatataagagaattataactccttttctgtttatatatcatgtgattgaagacctatgaggatccctgtctctgcagaagggcttctaaatctttccaaattccaaagaaatgttcccagcctcctgtcgtgttatgtgagcctgtcattcctgttgcagagaaccttttgggagggcatcaccataggggatagtaacccggctgcctctgcctcaaagaaactattttcttccttgcacatagaattttcaagttgcctgcatgggtaaaggaaggcatcayagctaggagctgccctcctcaggaaccccattaagacctgtcaaggttttctacttcctttctatgtttattaatcctagaataaacacggtaacatttgagagcagccattgcatctccggcccatcttagatgtttgtttgattgtatttccgatgcttacagaacaatttcttccccaggaaatgtaccccttgaattacttcacataccatagaaaggcagccctcactgctatgcctgctaagcattctgtgactgaagagagcgcacccaggcttcactgtgaaaatagaattaattctaaatatccccaatcatgaagcaacaggcatcccaaacctagcatttacctactctgtatagagaggtcagcactgaacactgcagatatgctaggagacttttcagactcataagtaatgtgcctttcagtatcaatttgttttatcctgagaaaaatgcctacttcccagcacaataatgtgttcctctcattctttaatcatcatgattagcaaagcacgatttcagtgaatcaccatcaacttgtgtatacgtaggtgggaaggaagggcttgctctaaataagtgctgcatagatagaaactcagaagaataggaaggcacagtcaagtgaatgttctgatacaatgattgttcaaggtagggatttataaattgccatgggttcccaaaagcacgttaataggcatagaaaagaagaattttcccctgatctgtttgtaagtaactaggatataagtcactcgatccaatgaaaagataacactgaaatatctattatttataacacatgagtttttaaaaaaggaaactgatttatttctctcaactcgactcataattccataaaaggatttttttgtgctaatttataatttgaagaattgtcacccttagatcgtgtacactgatgattcccttccattctttctttctcctgaacagaacctgaatttgtttgtttatccacccctccctcaagcatctcagcagactaaggggacactaactagtgccagggacagttctgaatttctcagccaggcagggtcatactgtcctgtagtgactgcaactggtctagtgttggtcatatgccctagattcagtctaaatggaaagatttttattgcctagttgggaaagaggtttcctttctcttgcttcacattgactaaggaagtgtgtagtcctcattgctaccagaagatatctcatcaccagcaggcaaacctgactgaggaaaagccaacatcaaggattatagaggtaagggatacaaagaatttagcctagggggacatgatatggccagtgaatcagctaaacttgaagtctttcctccatgggggcttcccattgtatgagataatttatatcattattatttaagtcaaagtgagtagcacttttctttctttgcacctgaaggtatcttgaattatacatttgtgattaccattttatatgtatgtctgggaagactgctggtaattgaagtcagtgactactctagtgctttgattggaggagtatcaaccacagatgatcttttctaccagtctaatgccagacatgaaatcctgaccattaatgactactttagcctaaagcactgtgtatccatggaggtgcttgttaagatgtcaagaggactgacatcttcaaccattaattccccacaaacatttatgagagtacaaatgtttgttgagtacacttcagagagactcaacaaacatttatcacataaatcctgttaggacctataaagaaaataagattgaagatgaagatrtagcccttgccctcaaaaaatttataatctagtgggagtgacagatatgcacacagtgatataacaagcagttcatgaaggaatcaatgtgccatagagagccttgagaacagccttgattacttcttacaggaggaattggagaagatttcagacaggaaatgacatctgccctggatctgggtagataggacttcaagaaatggggaaaggacagtccagacagttgaaacttacagtgaatttaattgaaacaataaagcaagacctggatgtggagtgttagtctggactcagagctgggaaacctgtgtctgagtttcatctgtcactttgggcaaatcactgtgtactactctgcaccttggtttccttatttgtaaattgaggatttgagtgggtcacctgtaagggwtcttccaactccagcgtgtcatgattctacaaatgtctcaagagatgccaatgctatacacaaccatgaattttattctttggccaaaagttgaccctaatcatacttatatattcctttttaaagtttgtgctgcttgaataggtcctcaaaaccaccctaactcacaaaaatgttttcaccagttaataagcaaaagcatagtggcaggatgtccctttgttggtttcagagcctaaaattgctctgaggaaaacaggaagacatttgttatatttcctactatctgatatacttacctggaagtgttggggcttataatgccagcaataattagaaggttaaattaaattacaccagcaacatctggagcttaagattacatgttcttactgaatatccrctagcagccctttgagatttatttaaagcagccacagtaacaataactgtctaatcttttatgactgaaaagagtcttgagtttagtgttgtgcttttaaggttaaaatgggttttgatatatgagaaaggggaaataaacaaaacgagatgtaatagggagcaaaactactgggctgcacatgagaatatgttggattgacctgtgtgtatcagtacaagttcacttttgcctgttggtgctgcaactaaggcgcccccactcccacccgcccccggtgatatcagtcagttacttgttgttgttcttggcaaaatacagaaatcgattctggttaacctaagcaaaagggaatttattatgataatatggatatatatattaagtgcagcctgaagaattaaaagaagactagaagattgggcttgggaatgcacagagaccaaggaacctccagtgagccaagaggagcaaccaaagtttccagtagacttctggtcagcccacactgttgaaataaatattatcacctgtattcttttattcttatgccagctgtttaaaggcaaggggtgaaacattcacccaaactcagatcacccacccattctgtggttctcgagagagagggaaagaaaggatctgaccttttctgcttctttattggaagcctactctattaccaagattacttcttacacaacagtaataaacaaattcctaaaagctggcatcagatgggggaacaaatgctgggcagtcaaaaaatgacaaatgatctgtaggtaagttttaatgtcttcagttataagtagcataaatttttattaaaatatacataaataagaagggaacttattcatttatataacaagaagtctggagtgggggcagtctttaaaactgattgaatcagcagctcaataaagtcaccatgctccaggttctttctrttttctccttctgccatcgtcagagtgtcaattttgccctctgcctggattgactcatggctgcaaggtagatgcagcagtttcaggtatcacatccagatatgacaaagtctgaggaaggaatgggtccatcttttcctgagcttctttttttttttttttttttaggagtttcactcttgttgcccaggctggagtgcagtggtgcaatctcagctcaccgcaacctccgcctcctgggttcaagtgattctcctgtctcagcctcccaagtagctgggattacaggcatgtgctaccacgcccagctaattttgtatttttagtagagacggggtttctccatgttggtcaggctggtctcgaactcccaacctcaggtgatctgcccacctcggcctcccaaagtgctgagattacaggcatgagccaccacgcccggcctcctgagcttctttcttaggagtggagaaacctttcccagaagcacccagcagattttccctcacatctcattgggtaggattggaccttgggggcattcataagaactagggatgagagtaccatgattggcttagactaaataacatcctccctctattccctgaaaatgaggataaagtcaaccttgcatgactcatgagttacatagggttaatgaatggaatcaatgttttatttgaaaacagggtgtggaaataagaattgggaaggcttccaactgtgtctagcacagtccattatcctggaatctggaaatgctttgtagaaaactggtccactgggtaaaccttgaattggatttccccctaagacataaagcttggatacaatgattgtaataattcttattataagataratatcttggttctaaaataaattgtaccataaatttgtctggttttgagcaatattgttgatttaaaattctgccccatctatttggggcattaaatgcaatcttttattgatatcttttctgcaagcaaatgttaatgaaaggttggactggagaggcaggcaggcaggaagatgacttcccgccttctctcttcaagcagattgatacttctttataccactcacagattgaaggccaacagtctatcactttcccatcaagagatccttgttacaaaaaataatgctaaaatgtcttagttttatagctagtatttttcaggcagggcataatgtgcaattttcactcttgttcatgaagttgtttagtattgtaaattatacattagcccccaaactgctgtaagcatcacctctattatttgtgtgtttcatcaataaatcatgccatttcaataatatgcaaatttctaccaacatttttttggtcttgaaattacaaagcgcaagcttgtatcaataatatatggaaatgtagattgtatctgcaaactgattttattattgggcacttaatggtaataaagtataatgtttagttggctgacttctttatgaaaatataaaaatgggtcccaagctttcctgcattccctttaaaaaaaaaaagacttttatctaattataggggtaaatgatagaattctgagggacaaagaccaacttgacgcccaaagaatagttttatagaaacaaatctgttaaaaggcacttagaggtttgtctgtatttgggactttgtggatgcatataatggtctgtatcctggcaacatttctcactagtaaactgaaaatttcattgctcccaatatacatattaaatggtaaaagcttggattgattaagaaatatcattgtgagtggctttgtcaatcttgacaggtataaaatatacaactggcataaatctgtggatttgctgtggaacagggggctagaatttggttttgattcagaactgccctggcccgaggttatacctgattgaaagtagcaatatggatctttgtaggatagggaataagaggctgccggatgagtctcttgctgaccctctgtgtggcatcctacacatgcagggcctccatccagcccctgggtctcatcacacttttacttagtaaaggtaagttaccttatcagaactcagaatgagcccacaacaccaacccagtggctgaccctctctgaatataaggcaagggattactctttactttcccatgtccctttctttcttgtcctcacatctggcttcctacagtcccttaccaacactctcatgagtgtcatcattctgccccaggatcctctcatcccacttccctggctccttcccacctcaatctccctcctaatgtcatcaattcttagtgttaaatctgggattttgcagagagatcactcattgataccctttcattttactgataatataataattattataattgttataacattagtamccaggaatggagtatggagtatgactgtaacaacaacatggataacaacaataataataaaattgcttttattataaggtttccacatggtagccactggactaggtgatcatacatggtttctcttctttaatcctctcagcagaactatgaggggtcactatcattatctccactttgtgcctgaatattattttccttttgccctgcagctgtgtcccttttgctatccagctatctattgagatagtttttgtgttgtctggaaacttctaattccagatgcattaatgtttcattttcttaaggcttttcttattttatacctctgctaccctcaagattcttaggatgttgtttttatttaaagtactgaagtattctactrgttctactgtttacttataattttaatttttttggtctttttttatttttttaatgtttttggtttacccccaaatatttggtaatttgatttctgtctcttagcttttgraaatcttcttggtgggggtggtatggagaagatgtagattctaattattggtgctctaaaataaaaggaaaaggaaataagtatgctcattgcagtgtgctggaaactttccctctaggtttggaggtgccttgcatttcctaaaggtctccagttatactgagtggtgcctgtctgccaagtaccagggccctttctctgtatttcagcaaatggaagaggcagagaaggaaagtaacaagacagctgatcagaatttagttcactgactagtcacacagagatgcttctgctacttatattggtttacactaagtacacagcacatttttaactgctctgtcctttacaaagtgctcttctgcttgtatttgggggcacagtttcctccagtcttagtcttcatctgatttctgactttcactaatgattcaaaatctctagccctttattggcacaaattcctattttctactgctatgtggtttaatattttttaataccttttctatcactcaaggaattttgtatgggaagaggcagagattccttgatttaatcaactattttaatgcaatctttattcctatttcacagattaaataactttagttagcttaaagaatgtacccaagaatctcaaactctagctattctaaccaaatcctctgatgctagagcctgtgtgcacaaataatatgtattctgatttttaatacaggcttttaagtttatgtataatcacatacaatggctcgttttatccacacagtattacctgtaaggtataataccatgactgttatcccagtttattgataaggaaacagattcagcaatgttaagcaactagctcagaaactcacatttaatagtgtcatgtagcaaatatttttacacatgcatcaaataattaacaccacataataagaactctgggtaccaaaaaaagctttgcctccacactgcaaaacctcacagtgtagaacccaaagtagagctcaaatttcctaattctcaaccagtttatgtatgtttatattaggccttggtcctgttgttattcttttttcaaaattatcttgttaatacacccacacacacccttacactgttgggagattgcaagtggcaaaacctggcttgttttcgatatgactacatcgactagtgcattgatgtttcatgcaagcatacatcaaagaattagcccttaggtttgcaaaagatttccaatatggcctcgatgctccaaaagttatacatctttgttttaaggtagttgtgcaacatgcttggaaataaaagagaaagagccagctgtatcaaagagaaaacctcaacaagtcagaaacttactaaagaatctattcaactggggagtctggtagaccaggctgcctctagacacttcaaataacaccaagcttctcttaagcaacaacattgcactgcttgcttccaaaagactgtcactatcaaccagagataaaatagcaagcctgggatgaaataattataagcatattgcattacattattttgatttcagcactgtaacctaggtccttttactctcagtggaagagtataaaggcagaaagcattaaatatcagtgatgacgggtgtggctgaagtaaatgccattgcctctgctgaaaaaacaggtttgatctaagtactcacttactcccttcattagttatgattgctaataytacattgcattcattacattcctactacctaacttctgttgttgtactaatgaaaagcaaaggaagtaaattaataggaacaatcatttacatttgaaactgcctaattatagataatttttagtaaaattgcctcttttaactccaatcaaaatattgtaaaataaatattatggtatttagatgatatctaaattatgataattcgataggaagataagggaatatattctgaaaggttaagtgacgttctctgggtagcactgcttgcaagtgatcaaatgatgaaaccaaaactnatactctagccatctctctctgaaccctcatggttataccacactgccttgcttccctagcaatgctcagaagaacaactctggactactggaatttttcatctttcagaaagggaccttccaccttacagatatttgggtcttagcattcactgacatcacagaactcttggaatttctctgttctgtccttctacctcaagtcatcagacctgtatatccagcaaaaaatcacagaaatatgtaaaacaatctggagtttctctttattttaccaaaaataattttcttcctgtgacctttaggttaacatgactttttagtcagttattttaagtgccagctattaatcttttgcctgagtaaacacaatgtctaatgtttaatacttattaagaaattcagcatggcatcactaagagctatacatcatttaaaaataggaattttcagctagttgaaaaaaatctcacttcagctctgcagtagctatgattgaatttgcttataaacaataagatgtattctggaatcttggccccatttaagagattgttaattgccagcattcatttcatcttgaggtttcagcccattcatwgaatgcccctccaaaaattgaagacaaaatacataaccatagagtcttacagagagtcagatttgtatcttccttggcattttgttggaaaactttcactttaaaaaatgctttacattcactaaaataacaaaaccaagagctatagctcataaatcaacaaaggagataaaataggagtcataaaaaatacttggttaatccagaagaagacagaaaaaaaagagaaaagatggaacaaggaatatatggtgaaaatagaaaacaaatagtgatagtgatagacctaaacctaattataccaacaatgacaataaatgtaagtggtctaaatgctccaataaaaaaacaaggattgttagattagatttttaaaatcaggacataactatatgctgccaaaaacaaacacactttaaatataaagatacggctagattaaaagtaaaaaggatgaataatatatgccatgctaacactaatcaaaagaaagctgaagtggctatataaacattagacaaagtagrttttagaacaaagaatattaaaagggttaaaggagataatttcataatgataagtgggctaattcaaaagaacaaaacagtcctaaatacatgtatacctaattaccaaattgcaaaatacatgataatgaggaaaaaaaatgataaagccataagaagaagtagacaaaatccacaataattgctagagttatcaaagcccctttgtcaataatttatagaacaagaagatataaaatcatcaatgatataacactatcaatcaacttgacccaattgatttatagaacatttcactcaacaacgacagaatacacattcctttcaaatgtacatgaaaaatttaccattatagacaatatcctgggccataaagacattgtcagtaaactttaaaagattcaagtaatacaaagtatgttctctaaatacagtagaattaaatttaaaatcaatgacacatttctgagaaatcctcaaatatttgaaaaactacataacatacttccaaatagctcaaggggaaagtcaacaggggaaattaggaagtattttgaactgaattaatgcgaaaatacaacgtatcagaatttctgggatactgctaaaccaatatgttggaggaaatttatgtgctaaatgcttatcttggtaaagaagaaaggtctcaaatcagtaacctcattttctacctcaggaagatagaaattaaagagcaaagaaagcccaaaattagaggaagaaatgaaatgatatagcttaaagtggaaattaatgaaataggaaacagaaaaacaatagaaaaacaagtgaaaccaaaatttgcttctttgacaagattaagtaaaattagtaattctctagccagactgatcatgaaaataagagacacaaattgctaatatcagtaatgagagagatgacgtaattaccaagtctgtagagatactggtatatctacacaataaagaaatattgtgaacagcttatgcctataaatgtgacatttagatgaaatggacacatttcttgaaaaacacaaattaccaaagcgcactcaaaaataaatagataacctgaacagccctagacctactaaagaaattgaatttgtagttaaaaccttctaacaaagaaaattccaggacatatagtttaattggaaaaattctaccaaatatttaagacataataccaatcctacacaattcttccagaaaattgaagtactagaggcaatactttccaacctaattcatgaagccagcattactcaaatatcaaaaacaaagacattgcaagaaaacagaactacaggtcaatatctctataaaaagagaaaaaaaattctgaaaaacattgtagcaaatttaattcaacaacgtatacaaaagaccacgacaaaatggggtttatcccataaatggaaggtttgtctaacattcaaaatttaatttaactcaccatattaaaaaactagaaaaatctatgatcatcccagtagatgcaggaaaagcatttaacaaaatccaatatctatttctgataaaaactgttagcaaaccaggaatagcaaaccaggaatagaagggaactttctcaatcaatggccatctgtgaaaaaccaacaccatacttcgtagtaaaaaaaccaaatgctttctttcctactactgttgagtacaagataaggatggctgctgttactacttttgttcaacatttaactaggggggttagacagtacaatagggagaaaaagaaatataaagtatccagattggaaaggaagatgtaaagctgtctctatttacagatgacacaagtgtctatatagaaaattcagtgaaatccacaaaagcagctagtagaataagtgagttgagcaaggctgctatctactagagaaatatgcaaaatttaactgtatttgtttatattagtaatgacaattagaaataaaaatgtttaaaagaatacatttataatagcatttaaaaatgaaacataggaatatatctgacaaaagatatatgagatatatacatggaaaactataaaacattactgaaagacatacagaagacctaagtaaatggacaaataaaagaaaatacctttttcatggcttggaagaatcaatattctccccatattgatttatacatttaatgcagtcccaatcaaattccctacaggttttttgtggaaattgaaaactgattctaaaattcatgtgtaaatgcaaaggacctagaatagggaaaacaatttgaaaacagaacacagttggagagctaacatagcctgatttcaagaatatcataaagctatatggtattggcatacagatagacaggatcagcggaaccgaatagaaatcatttcacttgtatatagacaattgatttttgacaaagatgtgagagcagttcagtggagaaatgacagtcttttcaacatattgtgctggagtaattggaaggctatatgcatgaaaaaaattatagaataaaaaatgaaaagctgaactgtgatctttatctcacaatgtataaaaattaactcaaagtgaatcacaggcctaaatataaaacctaaaattacaaaacttctaaaagaaaacatagaaaataaatctttatggcttgggattaggtgaagatttcttaggtataacaccaaaaatatgatccataaaagaacaaattgatcattggatttggggtcaggaaatgactccagccacctttgtctttttgaaccctggaagacagatgatgaacgtgaactccaaatttattcaacattcctgttcaggaaactaaaatttgaattacattcaaaggaattctttttgtttgtatgtttttattttccaatatagcagtaatgactaaactttgtatagcagagttcaagttatagatggattttctatatatcatcttgattacacagcagctttgtaaagaggatgttgttagtatgtccatcttacatatgagtaaactaagtctcagataggtttaattacttgtccaagattccactgctagaaagtggcggccctggctccaacccaggtttcctgacttcagagcctggttgtttttctcctgtttcactttgcctctctttacagaatggtgaattggtccctgattttttttaaagcttctttaagtcagttcttactagatgagattaatgaaagcattaactcttttaagacaccagaatattacttagtaagcctttatctttcaaactcaccatggctaccatccatgtttgcaagtgtggctgaaaggaaaaaatgcacaaccaactgccctttccatcttgaatagaaatagattctgccttcacctttaatgacacattggcactgygtactcaggctgctgtaaattaatataattcccaaagtgactaccaaatgcccatggtgtaacctcttcacacagtaggatctgatctgatattcctctgatgttgtctaaatagatgaatcacttcagggagtgtccctttgaattcagtgctcttggcatttgccccagttctataatagccacataccccaggggtaaagtaatggatctctggcaatctggctgtcccctttatttctctttcacatttgtttacacatttgtgactgtcctctgagaacagcacaaagtagaaaggataatatcctcccactatcctctccaagggtcaaaaccacatggacagtcttatcagtctcagtcagattagtcttcggttgtgctcttagacacagttaagccatttaaagcctaagtagagtgtcgttaacagaatcaaatttagaccagcacatttcttgcaaaagacaaatttgagaaaggtaaatgaataaaagtgaacctttcacattatagtcaagcatttaacatttggaaggaggtgggggacactttataaaactacagaaatgcaaaactgtgttttcttattagtaatagtcctagctcttttccttggaaaataaattcagtgttatacttgcacatcttcatgagaaatggaaatggagcgagagatttgggaaattatgatcagaaataaaattcttttaaatgctaacatacagatcttttgtccaatgttaacaacagtctttgcccttttgctttgcattatttctgcctttaaacctctagtctttttttttattgttcaaggtatgtccagtcttcataacaattctgacagaaacagagagttgatttccactctactgtctcctagtaaaggcaacatagtacaaagaaaacgtaagcatatctaagctgtctctgctactcagctttttgactgggaggaacttacttaaccatgctgtagttcagttgcttcctatatgaagtgagatcataagccatggatcattctgagaacaacatgagttactataaagtatgtcaaatgcacagcatatggaagatatccaatcaacatcatttgtatcttttccctttaatgactttaagaatatgactgatttctctctgttctatggagttgttgatacattttcctttatttgtatcaaatagtaagtagatttttatttggccaccagaattcaacaggaataatgcaatctccaattcctgtactatagttgattatggttttctgttctttgaacttgaaaagagatatgattttcatgcctgcatctggagtttacaagttgaaatgtgtcaggtaggtgaaatatcttactttaagagaaagagcagttaatatgcaaatattagatattggaaagagatcaacaattgtccacccttggatggaggcagagacatggattatccaaaatctcaaataattcttcttgttctgaaacgccataaagagccagccaccctgtcaaagaaatatagacttacccctcaatgccataccctgattccactccagcacagtaggacttttggcattctaacagatcagtagaatccacaaggctgataaccataaggtaattgtagggataatgagtatagtgtggtagtaaagattagacgcactagtccttgctaactgtgtgaattgtgataaagattaaacaaacctctttctatttaaccacgaatctccaattttctttttgcaaaatggtggtaataatggtacctgtggggagtaccagacacatatagatgcttaatcaatattagatactgtttttattagttactaaaaggaaaccatttcctgtttatgtaattctaaccaccattacaaagtaaaataatgtaggctcttcccatcaatttactccacccattttagcttttcttaggtttaactgatctttatctgacatctttctgagggcttcccctccccatgtactactgttaccccctaggatcttcacacttatgagaaagctgtgttatgtgctggttaagaacagggctgaacttgaaccctggctcctcctccttactgtctttggtgccttggccatctctaagaaggtatgtatggaaggggataataatagtacctgtctcatggggttgttgtggtaactgagttaatacatgcaaagcatctagaacagtgccaggcaagtagtatgtgatctgtgagtgatagctatgattaaatgctagcaattagaaataacaraatttcttcatcttttttctcttctaaaaacatttgcttattaagggggcctgacttcctcttgtgaattttttttccctgtatctcctccttttctttttcccaacagtaaaaaaagggggaattggggggaatgttttctatatataacttacagccctcataagttgtcagtacaaatgtcctatgttacagtattgaagacataaatgatgatgactccctccttggcctctattctgtgtttcccactattcacatgagcctacttcattggaacaggattttggtgaactgccaaatgtgccccaagtttgacatggtatgaccttcagtatgggttttaattcttgtgtacttctctgtgttccacattagactgtgatcttcttgagtacaaagagccatattctaatttcattgtgtctacagcacctaatacacataccgctaaactgccatataacaaamtaaatgaatgaatgaagtcatattgaaagtatactattctagccctctgtccagcaacagagtaaacttccaagttagttttgggataattctggaactttaaaattttcagggacacttgtgcattctattctaggtctttctccctccctaattttatcattcctgccacagttcattgaccccctactccaaacacactttgtgttttcctgtatctgtgccctactcttaccattctttttggaatgtctttttctacttatctgaatctttagctcacacctcacatcaacgtttttttctctaccctaagtgtaagtcatttcacctttttctaaccttctatagcagctgatgtctaaaccaattagctgtcacttaacacatacagttttgtatttttagctatcatttttaagaaaaatacttaaacagattttaaattccttgagagcaatgatcatgtcttatacttctgtacctcatactaggtggaatacccaataaatcattgttaatgaggtggcttactcaaagccaccttagacatactgccaggcaatataaaactaaatgcagcataatgaaaacattaatttgtgggtaaataggaagattcattgtacagaaacacattaggacaaagacagaagttgccagcagtttcaactttattagctccttttgactttttgctttatttgtatttggtttgatgcatcttttaatttttgttttatttatgctttggggcaggggtagtggggaaaaggcatttaactttactctaagtctagttttatgtactaacaaaaactctactgaagaattgtttattttacaatgaaacatttcaaaacaaaacgagacaactaatgcatctctgccatctgttctgatgaagcgtggggaaagaatagatgggggygaaatattatatgcacagttcccttcctccccttcaaaactttcagtaacatgctgccaatggctgtggcatggatatcacccagttttacggtgtgtggcaatatatttgagcatcctgattatcttaatacatggagctaccaaatccaaagcagtgtgaaaaacgagcaggatgctggaaggtcatgtaagttcttgttacatattttatattctagtgaatgagtcttttaaaaatgtagatgaagaaaaaagcatgaccaaacgttgctccaaatctcagagcagcacaaagatcttgtgccaaggaccaaggttgtcttttatactgaacacttcctctgccccagtgctcaacagctcgggtcctatgcattttccttactctgcattcacgcgttaaaaatttttatatctagtcatcgtgtatttactatcatctgagtaatgtgtcagcattatatggaggctagattagcagcttcttttactcgttaccctattgacatttgcctttgattgtatatccataaaggagaatcaagtcccatttgtttttagatgtgatagaacactttatgattggtgtgggctgcctcaagtcatcagctgggcatagagccatctcttttaggtaacctctacttcagctcagtttgcatgctgcttttcttgtggtctgcatctgacagatgcatagtccatgcatttttatgaaactacattcaagccacctattcctctcctctagttatcaaacaccttttcttaccattcctggattatttcctttatccagtgttgaacttccagtttttccttgcttcatccagtcttccagagtgtcaaaaagaactgatattttgcacattcagccgctatctccattttccattcactcatttattcatccctctgtcaacttatatagatgcacctggtatgtgccaggcactattatgcatgttggtggaacaagcaaagcttcagcattcatggaccttcagttccgatggagggattcagagagttaacaaagtagacaaacacacatcatgccatgtggtaatcaaagccatgaagggaaatataacagggtaagggagggcagggggtggaaatgaggtggtgagacaagactttacatgagagataagaaaaacaagacatgagagggacacttgtccctaggtcacacagtgagtgaccaagccagattcaaagcccagatgcctggctcaagagctcttcaacactgcaccaagctgtgctcttgaccccacaacattctgtagtggattgctgagagtatttccaggggaagggtccatacctgctgtagatagcactgcaataagaattaacacagtgtgaggacacaaggaattgaggagaatttggagtaccaatgcatagtcctatttattgaaagcagatcaaccaacaaacaaggtttaacagataaatagcaagattgccaatatagtcagctttttataaatccartaagtaggctttgtaagcatttacataaaagcctcagtttgaaatctgagattgcatctgacaaatctattgcaagtataaattgtgctaatttcaggagattcttaaacccataaactcagcaccacrctccttgttcagtaaagcaaatctcttggtcaatattccttcagatgtggtgaatactgagtaattaatcttaacaaagttaatctttgtccacttccatgaaattagtttctaaagaagtgttaaaagcactggctatacaacagtgtctattaataaaacttctgggtccaaatgaacagaacctgttctaatgatataagagatatggaaaatgctgacaggttgtatgtcagcatacgtgtagcatatatgcaaacgcaaagcaagcctaatcatgccattctttacaagtcagggtcattaacagtaccactagggaaaatagaaattagatttcatgtaggatggtttggaagcatgaagagaatagaatgccttaccttaaaacagaactagtattcagtgatttttggatttataactattgtttgttgcatttcgaaaagtgttttctttataaaagcctactaggccaggcaccgtggctcacacctataatcccaacactttgagagggtgaggtgggtggatcacttgaggccaagagtttgagacaacctgggcaacatagaagaccgttctttaaaaaaattaaaaaccagatggacgtggtggtagtcctagctactcaggaggctgaggcgggaggattgcttgagtccagaagtttgaggctgcaataaacaacaatcatgcctcatgcctctgcattccaccatggatgacagaatgagaccttgtgtcaaaaaaaaaaargggccatctaattggaaaaatggcaataactatataatggcaacaacacagacagaaaataatttcttccattgttctttttcttaatcttatcttttatgggatttctatcaaacttgtcacttgaggagggccaaatcacgaaatagcaacacttttgaaccaaaggttctgaggtttagccacaattagtaaacagaagaccctaatgaaactcaatttgttaaacctcaaaatttccagttacccgaaagaaagtataaggaagcagcataccctgtttcattaaaggaaataaatccaggccatcacaaaattccatttctaattccttcaaggaaatactgaaatatttttagtgatttgctataaggtatagattggttttgaaatataaagtgttatatataacttgggaagctccttttttctttcaggcttcgaattcgtatcccccatccttccatataaaatggtttttaaagcataagtgcactgaataaggcagtgttagcagaaaacaaggtaagatataagggaatagtgcattttcattcttccgataggacggctacctttagtatttggagctatcatttaatgtttaagtaactgttttaaacagagcagaagttaatgaaataaagatagagcttctccctccagaagctttatccttctcaagagttagctaggacagtagaagtgttgagtgtagaaagctattcttaaaaaaccaacacaaccttgcccttgagaaaccaagtacagataagacaagacatgtacatcaaagatgaatcacaatatggtgtgatcttgtataatgagcagtaaagaggaaagcgatgtgtggggcttttgcggggagcttcttaagagaggaggaggaggagtcaaagataaagaatgttctaggtggaagaatgaccagcagcaaaggtcagaggaaacgtaattgggacagtggatcagactggctggagcaacaggttatatctaggttatatggaaccttaaatgccatgatataaaattggtatttccttctgtagccaataagacagccatcggaggtttttcactgatcatacatgtaatggggcaaaggaggagtatttttggaagattaattcaataataagatacaatatggattagaaaggagagtgattagaggcaggtgatctaattagaagaccacttcacaagtccagacttgtagacagcacacaccagggagatggcagtgaaatgaacacatatgagaagctttttgaagatattagaactgcctacagagtgactgcatgagggacaaggccgtgtcacagatgattagcttttaaagcttgggtaaacagcaatatgttggatccttaattgttagcgtttgctagtctgattaaacgctacatatttttctttcagaggtgaataaagagaagcttctttttattctatgagtagggctttacacagaaaggacagggcacacagaatcataggctatgggtaaaatatcatcaacaatattaataacgcttcctgttcacctgaaaccaagtaatgaagaaaagggaggacccttggcagaaagggggagttaagggtttggttacctctccaagctgttactttgctggcagagagtgataggcttgttcctgcagcctctcatctcccaaggaactgatacttttcttatcccatgaaacaggggtgggacgttcctcagtggtctcagcatatgcctcagaaacattttggaccacatgcaagggcttgcctgagacttcccaagaaggggccctttgggccctctctattttagggttataggtatagacttgatctgattaagagtagccaggcattcaggtgatgtgctcaggcacaagtaactttctaaaacataaccaaagccagacacacccttataattcaaacatagcattagcgcctaaactcaaactgctattgtagtaaattgaaggatgcttcctccccacgtatgttcacattatgacctttggaatctgtaaatgttatcttatttggaaaaattgtcttagcagatgtaattaagttatggctcctgagatgagggtcattctggattatccaggtgggctctatatacaataaatgtcctcctaagagatacgcagagaagaaggcaatgtgataaaagaggcagagacttgagtgacatagctgcaagtaaagaagccagcaaccatctgaaactagaagagctatggaacagatttgccactagagcctctgtaaggagtatgaccctacaacaccttgagtttggacttctggcttccaaaactgtgtaagaataaatttatattgttttaggccatcaaatttgtgataatttgtacaatagacctagaaaactaagatagctgtattgaaaaatcagttagcatcagccagctttatatttaatggactgtacgtcttaacagtttatatggcactctggtgaccaaaaagaaagatctagtctttacatgatattatgtataataataaaaatattggctctataaattgcacgcctattatatactagccctcctccaggatcttaatagacatgaactacatatctaggtagagccaagattggaccttctgactctaaatccaatgctcttattattttatttatttattcattcatttattyatttatttatttatttatttatttatttatttatttattttgagatggagtttcacacttgttgcccaggctggagtgcaagggcatgacctcagctcatcacaacctccacctcccaggttcaagcgattcacctgcctcagcctccagagtagctgggattacagccatgtaccaccatgcatggctaattttttgtacttttttttagtagagacagggtttcaccatgctggccaagctggtctcaaactcctgacctcaggtgatccgcccgcctcggcctctcaaagtgccggtattacaggcgtgagccaccgcccccagccagtgccttttttattaagtgtctttatgcagcagaaaggaatcatgaggaagaaagcactcttcaaaatttgtaaatgaagaaatcaaattttttttcaaaaggcaactgaatagtttaatagttttttccttctgattgttacatctttaaaaatgcaaaagaataaaaagaaacaggaattaaacctgaaaaataaagatcgtgacttggaaaaaaaagaaaacattgaatcagtcttgttttcctcgactctcctcacctcttgttctccatggtgaagtcagaattcctgatggacagaggagtactcagatcctgggagagtggcccctgatagactagtcttctggcagtggccatatgaatgatctctaagacagaattcttgcattatgtttctagattccttttggctagagttagttctgggtttagaggtttcagaagcatcagctttcttggaaggaagagctaggagacttcctttaaataccatttgcacagcaaggacaccatttgcacttagatagtatgtctgtgggtgggagggggctgctaatgccccactttgcaccatatgaaccctgcaataggctttagcaaacaatctgaggtcagatttaaagggaatcctaaggaatctaggcctccctaaccctaaggttggccagtggagtggttaagcaactctgcgcaaattggggctcacctttcagggctcagcaagagagaacaggagaaagtaggccaggctctcagagcaaagtcattaagaaaattgctttttaggggtatctgtagtatatacagtcctttacagaaaggactctctttccctggaaccaacaggttatctgctgtaatagaaaactcctaggttctccataccatttgtaaagacttctttatcccaggaacttaaacaccatttgtagtatatactccattgtatacacacataccccgagatgtggttaagttttagtagatggagaggtgtaaccaacttatcctgactgcttgaaccacttgtgcaattccatgagaactctgctaatagagacagaagaaagaaattgtatgtttgattcttatctcaaatgagagcctttttagctatttcttcaggatatttttaacatcagattttgtaaggctttgatgaaacaaacagccattttggatggctaaagttgaggaaacactgctattttcaataacatcataatgaaagaagtattcacaggtatagcacaatgtgatggattaacaatgcatcttttctaaactaactaatatactgtcttcaagttttatgttgtattatagtgagcagagcccagtgttaggagtcaaggttagatccaagtttcaaatgggccacatacatctgagtgactgaggaaaagtcattttacctctgagcttttatttcctgaactttaactccaagttagttatccttacttaccaggataactaatttattgcaagaaacaaacaagataacatgggaaagcatttagcacatataggcatgcagtaaaaaaattctgttgaatctttagcttcgatgaggcaaaaatgtggctgtttcttcctacatctccacctaggaatttaaaaaaaaaaaaaaaaagacaaaagctcactttttccatcctgaactttccattctggacattcttactaaaacttggcttcattttatgtgaatatttttatgtattttaaaagtcaatagaaatcagtttcagatcactaactccaaaagggaaagtgagtaattatacaacatagagtgaggcaggaatgtcaacatgatcacttaaaacagtattcgtatctgcatcttaaagagaaggcttctatagtgcataaagttgtgacacatgaacaacaaaaagccaaaacggtaaagattccaaagaaaataacttgctgatgtcctaagcttgaagaacatttttaatgcactttctttgttcccatcctctaggctagatgtggaagttatggctaaagtccttggcattgtcataataacacagatatttaaagggctatggctcatatttcaggagctggcctttgagtggcctcaaggaacaagagtaccattttattcagctctgttggcactttgacctttttgggaaacatgctgtattatctttcacactgttataccattttttaatttgcctgtcaaattaacgtagtagactgtttacagctgttttatgtaaagttttactgataaaaattctccataaatgtggactcttgctgttttaaaaagaaccactttattaatcaaaggcttttaaatccaaattccaacataaatatggcattttataccaaggttttctaactgtaggaagcatataaaaggaaacaccaaatttaaaaaatttgtgaaatatcttctcaaaccacawgtacaaatccaagtttgaggctactaaacaatacaatagtgtttagaccctgctgttcaaaaggctttggaaatttcaaaacatataaaatcttgattcaaaaattacaacttctcccagaagaatactgcagaaaataaaaataacttagctgggctcccactcccctttccaaacatatcataaagtctaggaaggccagattctcatcctatataactctctgagaattcccacagggaaatctgtgaaagaattcagaaactttccttgcggaaattctcatagagagacataggacaagaatctggtttataaacaataaacataaacttttttaagatttgatctttgcccttaattaagctccagatgttaagtgggaagagatcatcttggggccccaatattctgtttcctgggtttccaagaattcagtcagtcattcagcaactgcattgccataaaaagacaataggatatttgtaaaattgccacatcctttttaatccagttttcaataggatgggagctaggacacataggacaaattgaattttaagcagaggagtaatatgattatatttgcatatgtggggtttttcaagtacaaaaatggcatatgcttattgtaaaacatttgaagaaagaaacacatataaaaataaaataatgaaagtcctcaaaagaaatctaatagactttgccaattaatataattcagggctgggcgcagtggctcactcctgtaatcccagcactttgggaggccaaggtgggaggatcacctgaggtctggaatttgagactagcctgaccaacatggagaaaacccatctctactaaaaatacgaaattagccgggcgtgttggcacatgcctgtaatcccagctactcaggaggctaaggcaggagaatcgcttgaacccaggaggcagaggttgcggtgagccaagatcacgccattgcactccagcctgggcaacaagagcgaaactccatctaaaataaataaataaaaataaaataaaataaaaattatatatatatatataattcagatatatttttttcatagaacaaagagaaaaaataaggtcaggttatcaggtagcaactgaataattttgaaaacttcacctacctagaattcattgtatagtattctccaagcaaaggagagtaggagttttttaatgtgccctactcattaggacagaaacaagaatggaagtaggggtcatgaaggtcagaaataggctttgtcatgctaactgccatcagaacactgaaagtggaaggagggcaaggaaggaggagcccacagatcagacccacagaagagttcagaagtcagatcagtcacagggaggagaaaacaagactgctagaaaaccttaatatcttctcctccaccacctgatcttaactttcaggttaacccatctgtgcatggcactagagtgctgtgtgagcactctagtctgggagcaagaacagacaggctttacagtgtgatggctaacactgactgagtacttactgtgtgccaaatactattctaagaagcrtacatgcatatctcatttcatcctaacagcaacccaatgagacgggactattattagcaccattttacaaatggcaaaacttaggcctaaagagatcaagtaatttgctcaatcacataaccaataaatgataatgaagttaacttttattttttkagtttttctatagatacacaaaccagtgtcactatattcactatattgaccagtttgttgaggggggaraaaagtcatttaaaaaagcaccagtctaataaataggatggttgagattttgttttggataagaaatcatcagtctagccaattcagtcaaaattaataatytgtcttttgaagtaaacacaacctcaatgcactcttgaatgccagttctttcaaatgccatatacctttcctaaccttcttaatgagctccagttattcccaacatcaattgtttatttggggagaggttaggagctgacattgtttataggcaaggagaaataaatattttagcattccacaaaaccctttctcaggttcatttgcccatatgctcaggaatgtttaccctgatcctcagtgaatcttttacctttccaacaccctggagtatctttgttcaaagcaagaccatcctacatgccaggagcattgtctgctaagagctcacacatacagtatctgtgcgctttctttcaatataagcagtattttggttgaaggcagcatcaaaacccagagttttggggcaccttttcagtcttctctctacccatctttctcagagctctagatacccacaggctgacttcctgaatgctcctctcaaaagaattcctccctggccaagaccaaacttctatttattcattgcagtagatgtgagaggcasagaatcaatctggtgaacaaattataatcaatttaaaaaacaattttggttaactaaatgaatccctaatgggcaggttgatagaacggaccatttctggagcaagaaaattttctcaatactaacaatacttccaactcccatcttatatattattcaaataagagtcaaaaagctccaaaaggttgccagtggccacatttgattgttaacttcaaaagggcctttctgcttttgcaatttttccatgcacacagtgagcaaaatccataaatgtattttcagatttcacataagagggcatcatagtccaagctgaactctraaatcaatagtctcaaatggtagtttttaatcttcttcaagaatctgataagagktatatatacacacacatagaaatactgcaataagatcccatcatgtgarcagttgtaaagaaaagaaatggaaactataccctaacaccagtctttaaataacagcctcatccttccaacctggtttcctcattcctaaaatgaagccattcaaatttcctaatctctcatgttttgtcaactctaggactttttttttttaccactttttttcgtatgctcacagaaagcctgtttttattatactcttgcaatggtaatgatacaatctctaaagacaagttaacagaagaccacatagattcagaatatttgcttcatggtgaagaggtgtcaaaaaataaacaaacaaaaacttcctaaaatgtctttaaaatggaaagtatgtatactagaaacaacctaaataagaaaatgacatgatatttatattaataccttcagatagaaagtgtttcccatgtatttaattttggtacagatgtgattgtgaaggctgtttatttttggtacaaaagataaaattagaggaacaaaataaggtccaggttctcagtagtttacctattatactcaaatgatgagtaggaagtattgacataggaaaacttcttcactgccctcaaaagtaatagagaataaaatagggcagatccactcataaaytgaaacatttctgagcagaaggattggagacaatgaaaacaaatcctatctgtcaaccaaagaaccactgaagatatctgaaaagagttatctgaaagaggaaggaagaggcctttaaaattaagtggaaaatacaacccccatcatttcacctcagtgatgsttaatagtttggacctagctacaaatagaacagcgagcatttggtcagctgcctggaggaagaccacaaacacaaagcagggatgacgtaagatccagttgatgtaaaatccagtaggtataataccaagtaggtgagaaatccttaaaagtagacttagctttatgagagagggaaacacgctgtcctttgctattttcacagtgccagaagcaatgttgttagcacaaaggcacttaatatttgtagaataagtgaatggatgcatgtcaggtaatgttgggaattaagttccaatttgcacatgtgataaatgaaagaagcttcaggccatcaaaagctattaacagagctgggacataagatcaagattagtgaagagcagagcataagaaaagatcaaagaaagaaagacatttactactagagcagaagkatatgggagcaaggtatctggaagcttttgagtgggaaccaggaaacctttgtctcaaccctccacctcgatgcattatatgacctcagacagttaatctgacttcatattttcctgttactgacattctctcccacttttaagggagcataagagattccttaaacacagtagtgaatggatacttttcctttggggctggacatcatcaacagatctgtgtccaaaacatatgctttaagtatttctagtttcttttctgaatcagtgctaaggatgaaagtttattcactcaacaaatatttagggagcatctgctatttgccagatattattctaggcaggggtaactaccctttactttgagtagttcactattttgagacacaatctatagaaagcaattgggaagctacagaatatttaggatcactttatttttattattgctaagtgtcttaaggtttacacatcatctcacctctcattcatttctcttccctatgccatctgactcgagcctcctggctacttggaaactaccttcctatgacgccatatatgactgcctaattctttgaactttgctcaggtatttttttttcaacttttgttgcagcacttgatattattgattgttctaactttattaaaactccaaccttccctggttttcatctcaatgatataatgagttctaaacatttatcaactgagtttggaamcacagagatattagtgtagatctcatctttgtcatcttgtgaacctgagcaaattacttaacccaagtcagtgagtttcttcatccataaaactaggtgcttgtatcttcattcaacacccccgcttacactgttgtttttaaggattttatgaagttaaagcctggtacctggcacatagtaaaataataggatccacgtaagagttccattttggttccccttttctctatctgcactactactgccataacttgaggccctcctctctgaattattgcagcggccttctcacctgaccccyctgccttcaatctctcatggcttcattctactctccacctaggggctttccaaaatgcaaatctgatcatatcaccatccttcttaaaattcrtcagtggaatccagtgacctgtcagataaacggctcaaactcctaaacctgatgtgacccaggctcatctctgcccacattaaccacaaaagcttccttcgccctttactatggccatgttgaatgatcctagttcccagactgctctgtgcactcacacagctccatgtcatcgcatgtgactcatgttctacttggaacactcttttctgcctggaaaacttctgtatgttcttcaggattcagctcaccattatatccttcttacttcttcccaaaacagacagagttagatctcactctgaagtggttcagtattatctaatgcatacattatgttttaaccattagttctgcttatctgtcttcccatttaggtatgttctccatgagggactgtatgtttgctcccagttcttttcatagagcctgaaacctagtatgttcaatacatgtttgttggcctaattacataagtgtgagtgttagtgctttggcatacaaaacagaattggaaaagtggaaaaaaaaaaaacagaagatggggcttaagtcagtccaaatgtgagagtgaatgaaccaagagtaaaggggaagatttgcaaaatcaataatgaaggcagtatgaaacagaattagactctgcctaataacaaacatgtgtacaacatatgtgtttttttctgtggtccgctgaggaaacagtttctactttttcaaaagcaaataaatatataggggcatatttaagttctagaacatggagcaataatcaattgcaattctgaaaattgcattttcagaaataggtctccactaaggttttgttctcaacatatcatttaaraaaacataatctcaatgtaatcaaatgctcacatgtaatcaataatgtgagccatggggttggctaattgactgtgcagtgaccaactcctgtagagctcgttggctgagatgagaaatagcaaaggccgttacaggaaatagacttgtcttgtggaatcatgagaatttagcctcctttgagaaggaactctgagcctagccatgtaacagcaccaagaggagaatgatgttgaaatcatgtgtgtccatgtgcatttccatggctttaactctcttataaagattcccttgaagtacctcaatacacaagaaagagctagtgatgttgtattgttaagtctcaaactgttatattttagcattgaccactgaatttatttcttagtgaatttatttcttatttattctttaataacaacagtgtaagcgggggtgttgaatgaagatacaagcacctagttttatggatgaagaaactcactgacttgggttaagtaatttgctcaggttcacaagatgacaaagatgagatctacactaatatctctgtggttccaaactcagttgataaatgtttagaactcattataccattgagatgaaaaccagggaaggttggagttttaacaaagttaggataatcaataactcatcatatatttatggggacaagttcattttgtgattccctggaactgaaattattatttcaccacagttgttacagcacatttcttgtttgaacttagtaacaaaatgtcaagagagtatactgataatttataaatttaactctttggggcttttatactggtatggtccaaaatcaagttttattttctgaagttacaatgaaaataagaataaagtaaagtataataaggaaaacaattatatggtaaaaatcattaactctgatattaaattatggtcgaaatttcaaattctctgattgaattaatttgaataataaaactatgaatatttttaaaaacttatttaaaaggtctttgaacttttattctttgttaaacttggcatagaacgtttcctatattctctactgttttgtgactattgtcctaatatagatcaaaagttgtcaactacagctgagtgggccaaatccagcctgttgcttgcttttgtaagtaaagttttgctgaacacagccacacattcatttacacattgtctgtggctgctttcatgatctaatgtcagagctgagtagttgcaagggacactgtatgtcccacaatgcctaaagtatttgctgtctgacactttacagaaaaagtttcctgacctttaatattaacaatgaatattaaaacaaataaagcttcctctttattatatgcaacacagagctactaggctgacaaacttaaaggcaatttctcttaaaaaatgaaaaataaaaagattttaaaacaaaagttgccagtcatcagaaatgaatttcagctctgccattaattttttccaacaactaatggacagaagtttcttactcaccaccatgtatgtttagaagattaatgactggcattttatgagcacagtaagtgagttatttggctccactattttatataatcctttgaaaatcttaagtaacatacattttcaaatatgggggatatggactgcaatctagaactgttttcttgtaggaaaatggagataagatgtaaaatcactaagttagagactctcatgactcacagaatctttctgagttctatttaaatcatttgaaactgaaattaatgattcatatatgtgatagctcttgcagaagtaagaaagaatcatgattcatctaatattagcgtatgtgctttgttcttatagcacaaggtggagaaatgcatgtttaacgcttttagatgtgtgttcttgcacatgttcttttctcaattttgtatcccaaatggtaaatagggctaattaaattaactttctcattgcattactgtgaaaatattcatataaaatacctgaaactgagaagtaatttgtgatccctctgattgaaaatggtggctttggtgcacattcaactaatgactaaaggatattgtgtatagatttttacctgttctcatctacatcatctgtgtgaaaaaattttaaacagtaaataatttccttaacataatttggtataaagtaacattttttgtaaagtgaatcatactttgctagttatttaaattacattttcagaaatgggtctccactaaggttttgttctcaacacatcatttttaaaaacattttcctaattaaaacaaatctaacttttcatagagaaatataatttgctaataatcgtattttaccatttatttaaattgcattttcagaaataggtctccactaagattttgttctcaacatattatttaagaaaacataatcccaatgaaaacaaatcaaacttttcatagagaaatataatttactaaaaattatgcttgaaacaaagaagtttataaaaaaatagtatgccaaaaaaaattccaaataaataaattgcattatataaaacaccaaattgataatagttcatttgggtttctgtaacaarataccttagactgagtagtttatgaaaaaaaatttattggccgggtgcagtggcttacacctgtaacctcagtacttcaggaggctgaggcaggatggttctctcttggggtgtcctcatgtggcagtgagggcaaggcagctccttttgacttcttttcattagggcactaaacttmttcattagggctcttctcaaaacgcatcacctcttactactatcatatttggtattaggttctaacatatgaattttggaggaacaccaacattcagaccatagcaacagtattattcagtgtctaaaatgtggaaagggagaagtttcatctcattgcataatgcttatagaggaaacaaaaaaaggaagaaaataaaaaggaaatggagaaataaaagctttcacattcaattgaacaattcttctctacataaagccgccatgattatgtttttaaactatattttggacaatttccagacatccttagttgaggtgcagaactatatgcagtttaaacacatttaataattgcatgtatataatatgtgccctatctctttaagaacttgctttttctttcatctttcatcagcacactactgggaatgagggtgggaggtgggggtaaagacaagtacattaaaaatccagcacaaaagtagagaggacagcagagtcaaagtttatattcataattatttccttagatggaagcattttatgctatatattaacccaatttgcaagtcaggtcacctgtgtcatttatgttttgcacacaaagagatttccatgtgctacagagcaaatactaataatgaaatcagagtgccctaataataactttcaaagcagggaccagctattgtttttagctctgacaattgtgattccctaggttaggccagcaactgtagtagggcagcagtaggtaccacaaggggtagaactgtgactgttttatttacccttttacttctggtactagtaagtatttcttgacctaccgaaggagttagagttgtcctttcttcatttctgctattttctctscctttttttctcatgataattagttaccttaattctcactcccttctctttctttgtactattgttaatttttttattaatttaatttattaaatttctcctctcacatcaatccatatataaccacctttttctcaccctctcatcataaaggaatctaagagagcatagccatagaaaaatgaatcacaaacctaaccaaactagcaacaaaaacaataaatgttgcatttttttcatgaggakagggactagatactcaaaargatagatattatgttcttttcattggtagtgggctggcgtattccacatgcacacrgagtttgagaagtttttgatgttgactatttttttccataagttattgggattcaggaggtatttggttacatgagtaagttctttagtggtgatttgtgagattttgatgcacctatcatctgagcagtgtacactgcaccatatttgtagtcttttatccctcaccctcctcccattcttccccccaagtccccaaagtccattgtatcattcttatgcctttgcgtccttatagcttagctcccacatatcagtgagaacacrcgatgtttggttttacattcctgagttacttcacttagaataatagtctccartctcatccaggtcactgcagatgctgttaattcattcctttttatggctgtgtagtatttcatcatataccacagtttctttatccacttgttgattgatggggatttgggttggtttcatgattttgcaattgtgaattgtgctgctataaacatgcgtgtgcaagtgtcttctttgaataatgacttcttttcctctgggtagatacccagtagtgggattgctggatcaaatgatagttctacttttagttctttaaggagtctccacactgttttccatagcagctgtactagtttacattccctccagcagtgtagaagtgttccctgatcaccacatcaggaaactttggtcacatttttggaaatgtgaaatgctctggaaagtctcagcaatagcattgaacaagtagaagaaagaaattcagaactcaaagacaaggtcttcgaattaycccaatccaagaaagacaaagaaaaaagaataagaaaatatgaacaaagcctctgagaagtctgggtttatgttaaacaaccaaatctaagaataatcaatgttcctgaggaagaagagaattctaaaagcttagaaaacatatttggggggtaatcgaggaaaacttccccagccttgctagacacctagacatccaaatacaagaagcacaaagaacatccaggaaattaatcgcaaaaatatctttgcctaggcacattgtcattaggttatccaaagttaagacaaaggaaagaattttaagagctatgagacagaagcaccaagtaacctttacaggaaaacctatcagattaacagcagatttctcagcaaaaaccctacaagctagaagggattggggccctatcttcagcctcctcaaacaaaacaattatcagccaagaattttgtatccagcgaaactaagcatcatatatgaaggaaagatgaggtatttttcagacaagcaaatgctgagataatttgccattaacaagccaccactacaagaactgctaaaaggagctctaaatcttaaaacaaatcctggaaatacatcaaaacagaacctctttaaagtataaatcactcaggacctataaatcaaaaatacaagttaaaaagcaagaacaaaaaataaaaataaacccaaagcacacagccaataaagagcatgatgaatgcaatggtacctcacatttcaatactaacattgaatgtaaatggcctaaatgctccacttaaaagatacagaactgcagaatggataagaactcaccaaacaaccatctgcacccttcaggagactcacctaacacataaggactcaaaaaaatttaagtaaagggttggaaaaagacatttcatgcgaaaggacaccaaaagcaagcaggggtagctattcttatatcagacaaaataaactttaaagcaacagcagttaaaagagacaaagatggacattatataatggtaaaaggccttgtccaacaggaaaatatcacagtcctaaacatatatgcacctaacactggagctcccaaatttataaaacaattgctgatagacctaagaaacgatgttgataattatgatagttcaggggagtaggaaattgaaataatcagagaaggaaatgaggtctgatctacatctgcccgaattgtatctgccagaattgtatctgcaccaaaccaattagttttacccacatctatgagatttgaatgtaaatcactagatatgcaacatttggttatcctcacaacttcaagaaggctacactaaaatcatctcaaggcagtattcggccctgtgcttaaagatcyccagagaaggaacatttccaactgccaggtaccaggaagtttttcctaagcctaactataattctctcttctgtaatataagcccagatactacccagctgactaaaacagctgcttatcttcatctggagaatatttatttgccaatttgaagaattgtttttgtagtttccctccacttcagcattccctgggccaagtgatcttagttgccttagctttgcctattttgtgacctttttgacaggttcatgcctgccattcccaagtacactgtatttcacttaatacctaagaataaacgaggtagaatttgggaagtgctgagtcaagtgtctgggtaacctcctggtttctctttkctgcagttctttattcatcttgtgttaccaagcttcatttttccacagtagcattattttgctacttcctcataagtttaggatccattcttatatttagagctttcccgtcaaacttaagccatgttttcctcatcttctaacttaaaattatgtctcctggatacattactattctattgtcacttggcctatgacttaggggtttagacctcattttaaacttctacctatttgacgttaggaaaatcccatagtactttttcagcagaataaaatgtctgggggaaagaaaaacaccttagaggtggtaatatctgaattgtagagaagtttacagaactctttcattatccagatgatgaaacaggcttagaatgattaaacaatttgtcccaggtcacaaagattcttgggaacagaggcaggattgaaaccaagatcaattgattctcagttgcatgcactttctacaatacactgaagcctttcaaccatacctcatgtataataacaaagttaacaagctaggattgccgatgagaatgatatgaaaattagaagtttaaaggaatttaacagaaaactgcttttgttgtaaattccacaatcttatcagtaaatagtatggattatagaactagacttccattttttttgtccttttttgttttctgtaggcaaggccttgctctgttgccgaggctggagttcattggtgtgatcatagctcactgtaaccttgaactccttggcgtaagtgattttactgcctcagccttccaaataactgggtcttatagccatgcaccaccacacacaactaattttttttttatgttttattttgtagagacagggtctccctatattgcccaggatggtctcaaactcctgagctcaagtgatcctcctgcatcggccttgcaaagcacctggattacaggtgaagcccccaggcacagcccatcctgtattaaactagacaaatttatgtattttagttagccaggaaaaaaaaaagctacaagaatcctttaattaattaaaatgggtccttcccactaaattgtcttttattttaaagcttattatataaatcttcaagtgtgtgcaaatatagaaattacagaatattgaatctagattcagcaattgtcaacatatagtcaaccttgttttatctataatcccaatgtgacccaaaattatttgatggaaatttcaggcatcatattatttcatctgtaaatatttcagtgtatatttctccaagataaaggtacttgttttaaaccataacaaaagttatcacaggcacaaatattaacaataatttctatttaccatgtacaccatcacaaaattaatatcatcaaatagccagccaatgttcatatttctttgatcttcatatgtgcacatgtatatataagtttgtatgtttgatcaagatcaaaataaggttttgtaatagaaatgcaattgcaatataagtaattaactgatatgtctcttaaatctcttttattctacaggttttttttctcatttttccccttgtaatcttttgttgaagaaaccagggattatttttgccctgtatggtttctgtggtctgcatttggctgaaaacgtccccatgatgtcacttaacattcatctgagtcttgtatttcctataaattgatggttatgtccagaggcttgatcagattcactgggggccgtgagagactactttatagtattgtattattctatcaggagataagctgttattaactattgctgaggtctgttaattcattaggaattgcaaaaaatatattttactttattcgctagaatgtttctaaagaacattccacttgttaactaattgcccacttgtcagtacttttgtcaatatctcattcgtaactgcttgtctatagcttgtacttttagagattactcrgtaacggtgcaggaactcaggaacattctataagatagaattttctagaacattctataaaatagaatgtcatctttttacttaaatatcatttgggctagatataaagtctctggcttacactacattgtcttctgcataaaatgttgctgtcaaaaagtttgataataatctgagtttcttttcattataaatgacttggtctttttgcctggaaaccccaacgatttattagtattataaaaaagaaacttttagctgtaaaactattaaagtctcctagttttgttagagtatgtctcagcaatggctgttattggtttttttttccagagacatgatacactctttcaatgtgtaatatcgatcatatttcttttaaaaaacaagtttagtatttgttctgtttcattgctctgattttcttcttctggaactcccatatgtgtctctctggcatactttcatcatctgtagagaagttattctgccctttctattttgtcttataatgcctttgtatggacagttttattctgctgctcagttggtttcagtgagtaagtgtttctgtactgtgagaagggaggtgcgggcaagaataaatttttttgattcagaactctagagctccctcttttgaaaggcatgataaaaaaatcctcattctttgaaatgtgctttccctgctcctaccccatttttaactagaccctctcttttctgtatcttattgctccagtcctattcaatttggattctcttcccaggaktttctccatagtgtggaataggatcctgtcttgttagggggctttggttaaatgcttttaagaatttgtctggcccagattgatctagcaccataagaccttaatgagtcacagacactgtgcactacccatagttggattaggcaaaacaccctcccaattcagcagccatgtatgatttatgcacatacattctgtcacctcattttgctttagatgttgtctgcgggcctttgattttgctatcttagttgttctatttttgtagaatgtaagtacatctatactgtatctgcccagaattttgccccacattatcttttaaaaataagcaaatcaacaacaaaaagatgatataagacatcattttgtgtggtatttccaagtccttagccataaaacttttaacctacagtagaactgcaagagaattgctcatgataattctaacacttgggcaatgcaaaatcttgaaccatcagaaaaagaaagtctctgactaacttttaatttactaaaaaactcattttcaataaataattagaacactctattctggtgtttagtattttgacattctgaggctgtgaatgctaagagtaactgagttctgttcaactagtccaatgttttctaggaccgaatttcaacatatatgttataaagacctgtctcaatatttattatggttaatttactaagaatatgtttactgtatttagaaagaatttataacttctggtttatggaaagcatgttgatttttcttttttgtcacattgatttttcaattgatttttctcagaataatcagaagtgcatttctctgaagtgtgtctttcctaaaggtgaaatttaccttacaaatcaatggcaaccataaggttatggtaaaaggggtgagtaggggggaaattgggagaactcctggaattcaacatccaatacaatttgaattattgttttctgaaggaaaattaaaatgttcattaaaggacagaagaactgaatattatttaaaaattataatatctaggaaataatattcaataaattatattgaatagtacattaaggaatttgagttacatatctgtatttgtaaaaagttaaggtattcttctaaacaaatctaggtcacataggrgcattgaaaactctcaaaattgagaaacaaggcccataagcagcaaaagtcctaaataagtagaatttaataaatgcctgttcctgatgcttgggtacttaaaatggcacatcaataataaactcttaagtcattcattcaagatacatgtattttatatgtcaagccccgttcttaacacataaggaagttaatatgatrttatccctgcatttgacaaatatggtctagtagattaaccaggaatgtaaacagattcataaaatgtcatatgatatgtttcaaaatggaagcagcacacagtaaagaggatagagatatcacttcctagtactcacagagaggtgattaataaggtcccgaaagattggaagtgtgacaaagaggaaagagtatattcagtggagtgaacagtatatacaagggcatggatgtatgacaaaagattgcattatgttcaatgtgactagaccagagaatctgaggaggaaataaatgaagctacaaagggagatcaaaggaaaatagggattcctgtatgtcatgctaaagagactctatcttgtagaytggtaattttcaatcctatgaaaccccacaggttaataatgggccactcaaatatattaaattctattctctggaacttgtaaatgttaccttataaggaaggaaaggtctttatagatgtgattaagttaaagatctttagatggagagcttaacctggatcatccaggtgggccctgtatccagtcacaagtgtccctataagagagtggcaaagaaagatttgacagaaacactgaggaggcaatgtgaccacagagtaagagattcgagtgaaatagccacaaggcaaggaatgctgacagccaccggaagctggaagagtcaaggaacaacttctcccttagatccttctgggacagtgaaccctaccaacaacttggtttttacccaatgaaactgctgacttatagactccagaactctaagaaaataaatttctgttgttttaagccaccaagtagcaaccacagggagctaataccaacccattgtccttttttaaaaattgggatataattcacataccataaaaatcacccttatgtattcacagagatgtgtaacaagcacctctgtataattctagaatattttcatcacgtcaaaaagaaactccatgcccattggtagttactctccattcccacctctggcaaccattaatctacttcctgtttctatgcatttgcctattctggatgttttgtataatacagttgtggacttgtgtgtctgctttttttcacttagaataatattttcaaggatcatccatgttatagcatgaatgagtacttcattgcttcttctgactgcataatattccattgtatggatataccgtaattgtttatccattcatcaatkaatgcacatttgggttgcttcaactttttggctattataaatattattgctataaaaattttacgaacattcatgtacaagtttctgtctgaacatttctttttagttgtcttcggtatacacctaggagtgaaatcactaagttatatggtaactctatgtataattttttgaggaattgttttccaaaggagttgtaccatttatattcccagtggcaatgtatgagggttccaatgacactatattcctgccagtacttgttattgtctctttgattttagccatcctaggaggtatgaaatgatatgccaytgtggttttgatttccatttccctaatgactaatgatgttaagcatcttttcatgtgctttttggccatttgtttataatctttggaaaaaacatctattcagattttttgtccactgtttaattgggttatttatgtttttattattgaattataagagttctttgtgtattttagatagaagttccctattggatatatgatatgcaaatattttactattcaatgtrttgactttttaacttcttgtttctagtctctgaagcacaaagtttttaattttgatgaagtccaatttatctttttgcccccctttggttgtttgttctgttgatacctaacaaaccattgcctaagccaaggtcctgaaaatttatgcctgttttcttctaagagtcttatagtttttgctcttacattcatatctttgctctattctgggttgatttttgtagaccgtgtaaagtagatatccaccttgtattaaccatgtcttttattttctatattctgatgttttagtgtcttgggccctgatgatgctggaggaactgacccttttagagttagtcaattcttagatatagtaaaccaccagcccatgaggatttctttcaaatgctaatcacccaatccagagcttttaacctcaaccatcttctttaaccagctctcacactctgggccactatccacctaccttaattgcctaaggccaggtaccatacaactagggacttcccctatgctccaaagcccactaaaattattcaaagtagccaatcctacatctgcttaccctgactcacttattcctttcacaaaaattacagttaaggctcttgttcacaattttcccttttcctctgcctcttgttgatcctggatctcccatgtgtggccttccrtggtgtggtgtgcctcttcttttgggatctatgagtataacaaactgtctttgcaatggcagtcatcttctgatctgttggccttgccatgcccaaataatcttaaaaacatgtacgaaaacatggcttcattcttttttatgtagatatccagttgcyycagaaccatttgtcaaaaagaccattatttcccccactgagtggtcttggtccccagtcaaaatcaatttactatagatatatgggtttatttctggactctcaattttatttcattgatctagatgtctaccttatggccagtaccacactgtcttgatttctgtagctgtgtagtaagttttgaaattgggaagtgtgagtccttcacttttttttttctttttcaagattgtattggctattttagctgtgtgaattttcatatgacttttaaaataagcttgttaatttctgcaaaataaaagcagcagggattttatagcgattgtgttggatctatgaatcattgatctctctgttttctatctctattttgtttatctgtattctaatagttattattttttttcttctgctttctttgggcctattttgctcttatttttctagttttgtaagttggaatgtcagattattgatttaagatctttctttcttttaatataagcatttacacctacaaattttactctaagcactgcttacctacatccagtaaggcttggtatattgtgttttcattttcatttatttcaaagtattttctaacgtcccttgttakatctttgtcctatttaggtgtgtgttgcttaattcacatgtatttgtaaattttccaaatttctgtctatgtttctgtctattattggtttstaatatcatttcattgctaccagggaacatgctttttatcattttaattcttttaaatttactgaaacttctttttatggcctaacacaggcttcatcctggagaatgtctcatgtacacttgagaagaatgtattattctgctgttattgagtgaaatattttgtatatgcatgtcaggtttaattggtttatagtgtkgttcaagtcctctatttctttattgatcttctgtctggctgttctatccattattgaaagtgggaaagtgatgtcttcaaatattatttttccattcacttctgtaagtttttgcatcatgtattttgggaccctgttgtttggtgcacatttgtgtattattgttatattttcttagtggattaacccttttattattataaaataatcttgtctctagtaagggattttttcttaaattttattttttctggtattagtgtaaccactctagttctattttagtttttgtttgtatggtatatcttttcccaaccttttaccttcaacctaggatctaaagtgcacctcttatagagagcatagagttggatcaggttttttttttttaatccattatgccaarctaagccttaaatcagcgtttaattaatttacatttaatgtaattcctgataagataggatttrtgtctgccattttgctatttgttttctatatgtcttaagtcattttttattcccctatttctccattactgccttctttggtattaagtagaattcttctagtgtatcattttaattttcttgtcatttattatattattaatactaatatattttttaaagttattttattagtagtcaacctggggcttgcagttaatatcttaatttacaacaatctagtttggattaatatgaacttaatttcaatagtataccaaacctctgctcctatatagctccagtctctccctgttttgttgtgcttccttggtcatacaaattacatctttgtacattgtatacacattaacacagatttataattattactttctaaagttgtctttcaaatccgataaagagctacaaacagaaagaaatttgtgctttcttttatatttactttttargtatctttaccagttttctttatttcttcatatggattcaaattatagtctattgacctttcattttrgcctgaaggacttccttgagtagtttttgaagagcagatttgctgccaatgagttaccacagtttttttgcttatttgaaagtgtcttgatttctccttcatttctgaaggatagttttgctgaatgtagaattcttggtagatgtttttttctctcagctttttgcaygtcatgccactgcattctgaccaccatagtttctgatgagaaatcagctgctaatcctattgagaatccctggaacataatgagtcacttctttcttgctgcttcaagattctctttgtctttgtatttcagtggtttgactatgatgcatataggtatgaatctctctgattttattctacatagagtgtgttgagtttgttggatgtagattcatgattttttatcaaactggaaagttttagccattatttatatatatattctttccactcctttctctcctctcctgtgactcccactgtgcatatatttgatggtgttccccaaatgtctgaggctttgttcatttttcctcattcttttttccttctgctcctcagacttgatagcatcagttgactcatcttcaagtttgctgattctttattctgcctgctcaaatcttctatcgagcccctctagtaaaattttttcttctgttattttacttctcaattccagaatttctgttttgctctattttatatttctatctctttattgatctctatttgatgcaaaatcattctcatgcttgtctttagttcctcggacatagttttctttaattctttgaatgcaactaaaatggcttatttaaatctttgtctagtaagtacaatgtctgggcttcctcagagaggtttttttttttttcatcttttaaagttcttgatactttttttttaattttattattattatactttaagttttagggtacatgtgcgcaacatgcaggtttgttacatatgtatacatgtgccatgttggtgtgctgcatccattaactcgtcatttagcattaggtatatctcctaatgctatccctctcccgtccccccaccccacaacagtccccggtgtgtgatgttccccttcctgtgtacatgtgttctcattgttcaattcccacctatgagtgagaacatgcggtgtttggttttttgtccttgcaatagtttgctgagaatgatkgtttccagtttcatccatgtccctacaaaggacatgaactcataatttttatggctgcatagtattccatggtgtttatgtrccacattttcttaatccagtctatcattgttggacatttaggttggttccaagtmtctgctattgtgaatagtgccgctataaacatacgtgtgcatgtgtctttatagcagcatgatttataatcctttgggtatatacccagtaatgggatggctgggtcaaatggtatttctagttctagatccctgaggaatcgccacactgacttccacaatggttgaactagtttacagtcccaccaacagtgtaaaagtgttcctatttctccacattctctccagcacctgttgtttcctgactttttaatgaacaccattctaactggcgtgagatggtatctcattgtggttttgatttgcatttttctgatggccagtgatgatgagcattttttcatgtgttttttggctgcatwaatgtcttcttttgagaagtgcctgttcatatcctttgcccactttttgatggggttgtttgtttttttcttgtaaattcgtttgagttcattgtagattctggatattagccctttgtgagatgagtaggtggcaaaaattttctcccatgctataggttgcctgttcactctgatggtagtttcttttgttgtgcagaagttctttagtttaattagatcctatttgtcaattttggtttttgttgccattgcttttggtgttttagacatgaaagtccttgcccatgcctatgtccttaatggtattgcctatgttttcttctagggtttttatggttttaggtctaacatttaagtctttaatccatttgaattaatttttgtataaggtgtaaggaagggatccagtttcagctttctacatatggctagccagttttcccagcaccatttattaaatagggaatcctttccccattgcttgtttttgtcaggtttgtcaaagatcagatagttgtagatatacggcattatttctcagggctctgttctgttccattggtgtatatctctgttttggtaccagtatgatgctgttttggttactgtagccttgtagtatagtttgaagtcaggtagcgtgatgcctccagctttgtccttttggcttaagattgacttggcaatgcaggctcttttttggttccatatgaactttaaagtagttttttccaattctgtgaagaaagtcattggtagcttgatggggatrgcattgaatctataaattaccttgggcagtatggccattttcacgatattgattctgcctacccatgagcatggaatgttcttccatttgtttgtatcctcttttacttcattgagcagtggtttgtagttctccttgaagaggtccttcacatcccttgtaagttggattcctaggtattttattgtctttgaagcaattgtgaatgggagttcactcatgatttggctctctgtttgtctgttattggtgtataagaatgcttgtgatttttgtacattgattttgtatcctgagactttgctgaagttgcttatcagcttgaggagattttgggctgagacaatggggttttctagatgtacaatcatgtcatctgcaaacagggacaatttgacttcctcttttcctaattgaataccctttatttctttctcctgcctgattgccctggccagaacttccaacactacgttgaataggagtggtaagagagggcatccctgtcttgtgccagttttcaaagggactgcttccagtttttgcccattcagtatgatattggctgtgggtttgtcataaatagctcttattattttgagatacgttccatcaatacctaatttattgagagtttttagcatgaagggttgttgaattttgttttgtcagaggccttttctgcatctattgagataatcatgtggtttttgtctttggttctgtttatatgctggattacatttattgatttgcatatgttgaaccagccttgcatcccagggatgaagcccacttgatcatggtggataagctttttgatgtgcctgagagacagtttatattgactgcttttgtactgcatgtgtgccatacttttagtttctttgaatgtctcctaattttttgttgaaactacattttaaaaaatgttgcaactcttgaaatcagaatctcctacctccccagggtttgtgaaagttgctgtttgtagttggtgcttgttttgtttgagctaattatttaataygtgatttctttgtcataggtggccattggagtctctgatagctgacttagtgttcagctaatgattggacaaagattttcttaaattcctggagctcacaagtcctccaatctttgcctaagggctctgtgtgcatttggagcacaccttgaacactccagcaggcagtatgaaactctgccttcactttcacttcctgcctccatagagccacaaggttaggcagagwtgagaatttagatctttctcaggtcttagctgagcatgcagatagcactgagtaygctcacatccctacacatgaacttgtacttctagtttcccagcattatgtctgtgcttttcaaatcatcctgtggacgtatctttccacagcttctccttttaagcttttggtaagctgattatttgcttcaactcttatgtactgcctcaggcaacagtgatgtgaaacaattgccactcagtcttttctacaaataattgaaaatcatttctgttaagaaaaatattcacattgggtgaactctaagtcaagtcacatagagacaatattatgagtggaatatttcagggaaccatcagacaggtcaaataatgatagttctctggaaatggagtttggagagagcgctaaccctgttctatcccctccgggggctgccagactgccagtgtttatcatgattgcaagttgttggtttcccaggttattgcagagctgggggcaggggagggagaatgagaaaagagcagagtaaaagacaaaaaagcttagtttttactgacattcagccatttttttaaataaaagcttacctgatttctgctagtctttgattaatttccagagttctgaaaaagtttacactgacaatttttgccagtatttttattgcttgtatggaggagagggttttcagagtcccttattttgccattttcattatcaccccatgtcctcttttaawaacawatatttttaataacatctctaactattctaaaatgaaattcatggataacataacctaccaagacatttttttgttttttagacggagtctcgctctgtcgccaggctggagtgcagtggcgcgaccttggcttactgcaacctccacctcctgggttcaagcaattctcctgcctcagcctcccaagtagctgggactacaggtgcctaccaccatgcccggctaatttttgtatttttagtagagatggggtttcaccatgttggccaggatggtctcggcctcttgaccttgtgatccaccggcctcggaactcccaaagtgctgggattacaggcatgagccactattcctggccagtacacattatyttaaaattactaatatgattgccyaattgtaatttaaagaagaagaaaggaatatcataataataattgaaaatgcttggggacaactacactggaagacataatcagacacacctgtttgtataatcactttgaattgggatgttacaaattattgcagttatattttcagaggattcaaatrtcatatgtgccatggatattgatattataattttcaaaaatgattaacaattctcagtaaggttcaaatgaaacaaagtatagtcttcagttagtttacattggatttgcatttatgggaaattaggtgtctattaaaaccatgaaaagaaatatttaattttttatgtaagattgaatttggtcctaggcttaaatcattacatacagattttttaaaaatctacatgaatagttggtgggacagtaaaatctaacatgatatggaacttccccttacctccctgactactacccactgaatgtcagttaacagtcccataataatttatactttgagacacccttcccaagaaaaatggccctcataaacttccaaaatatcccctagaaggcagtaccattcctctgagagccactgctttagaagagccagctgttagttgttttttggctttgggttttttaaaatctgaggtgcaccaagtttcaaagaaaggtccccaataagaaaaccaacaagctgactaaatgcatgtgtgctatggtccctgctcactactcctctgccccacattccacctttcaggaagtttgagtactgaaataatactaaataatttgcagacactttgggggattggatgctcaaacacttttttcccctcttttatcttatttggaatgagagttttatttagtgcattcagacgaacgaatattaaaaacttccttaggtcctcaaagaagggccttgacatctttccttagtgagctggtccaatgttctaaatcctctgagcaggatccctgtggtgtgtgacccagatagcgtcccagagactttcactttatttccttgtgaagacacgtgaaagctgctttatcaaggagtcactaagtctggtcacaacacagtttcaaggaaccaacactgggacacttaccattttgatgattttatcagctttgatggtgagcctaattacaaaagtcctatcaaatgaatatccactggttcttgatagaccacaaccaaattgtatttcccccttgtgttcctagctatttatgaatattgttgcaaatgctgtaattgccatcaccttcttctgactttctcaatataatacctaattagtcagtgtcagtgttgccagatgatatgaaatgctgtggcttctggccctcattttctaatggatttggaattgtatgtatttatgtcattgctcttcctttatagcaactacatgccctatccctgaatctgtaaatattctgaggcaggtatatcttgtagtcccccaatagcaagagtaccctgcttatagtttttggacatttgtatttaatgttgctccttttatttctgtatgcattctcactagatagggctttagctttaaaaactgtgcgaatttcattccaccagagggcaccatggtaaacttcactttcaaaaggatccttaacaactcagttaagaaatccctaaaaccgaaatattgaaacaaatgaatgtaattaaagcagcaatacctttgaccaagatatttattccatcgtgacttttaaatctctatagaatgattcattttgctaagggtatgttaatcactctcaagcacaactttgacaaatcaaaaatagatagcaggctttattatggccaatgtgtgagctccacagactgtcaaaaaaagaaaacaacaataacaaaaaaaaacccagcacagttctgttaggagacatacctctccttttctggctccaaaagagaatgaatgctttttgaatcctaggaggtaaaccaatatcgtaatttcctacatgctacaaaatagccatctttagtaaagctccaatttcagggtggattttaattgtttactactaataaaccttgggagttaatttataccatccctcaagtcccaacacaaacagattcccttttccagaactcatggtggcaagattccatagaactccccagatgatggyagctactatcagagctctcaactctgacaggaattaacaaataacaggttacaaacaggaaacacagtgtctcatatccatggctccactgatgcatggtactatgtaacatgtagggtatgttaattccctgatatttattcacttattcattcgacacatagttattgagtatctcctgtgtaccacgttgtaagctctggggatacagtgatgagggcaattgacctgatccttgtcttaatggagtttgattactagtagggggaagtcatataaaaagacgatgataaacaaggaatcaaataaaaacataagtaatttcagtttgagaggtcacagaaagttaataaaaaggttctatgagaatgaagggaactctcacacagcttgtgagagtaggactgtctgtgtagatagcatgagataggagaaagagctagccatgtgataacatggagacagggaccagcaaaatatttaagtctcttcagctggaaagactgtgctgtgttctgataacaaaaaggaggcctccatagctagaacagtgagtcctaggcagagtgaggcaaattaaactggggccagatcctgggaaggattttgaattattctcaggcatgttttaagcaggatggcatagtccagagaatggatttcaagggaaggaggcaagagctggggaagacagggtgccagaaagtattgaaaccaaatagcaagttattgcagtggctcagaaggagaaaacaatggtgattatggagatgaacagagtagccttattcaaggtgtgttttagaagtagaatctacaggacttgctgataaattaaacatggaaagaaaattaagacaaagatgacttacaggttcttagcttgagcaactgggtgaatggttatgttgtcgactaagcctgaggaaggaacagctttcaaggatagatggaaggaataattaggtatccaacttctacgtgttaaatgaaaggcgactgtgatacaccccagggaaatatattcaggactgccctctgagccctctagacataggtttcatttgtaccacaaccatctccccttccaaatacccacagagatgtttcctatatctatgttttcaaggtgtgtggtcgtgaagaacagggagcccttcactcctgtctgcattgcccgctaaactacaggctgacgtgccttctgattttcttttctgctgtcagagcatttgcttccctctgtcctacaggacaactctaaatcattatctccacaacacctgctccatatcaaaagtgttagatttttagccagaagacatgcactatttttcttactagctgggtgacctggggcatgccatttaacttctgggagccctgcaggtctttgtaaagacaatatcaatgattacatgtaaaagcactttgtaaactgtaagcagttaygtaaataggcttgttattctcatttttgtctcagtctccaccactgtaacaaataatcttcctttttttttttttttttttttgctctgttctcctcgcttttcttcttgcgtgcttcttctgtctcttgtcctttctgccacataaatttgctttcctgaaaaaggctggttatttggagacatcatcaccagccaatcagagctctctattccttctggctggaaagccaatcagatgtaagctccaggtctcttttcagtgttgctagggcttcaggtctacttctaaaagctgacttgcttgctttccgctagttcattctctgtctctctctgctccccacttctcccacccccactctattcctctcactcctcccctcttctgggtttggagcagttccaaatacttaaggcttccggaagtttgggttatggataagcaaggtttgactgtatattttttcccttgagaaatagaggacagctattccatgttcaatattgaagcaaatgttttagcagcttaatgtcccttggctacataaaatttagttctgtttatgtgttttgggtgtacagatcactttttattcagatggactagagcataaactggcattgagttttctggcaatgaaacgtcatagcactggaacctcactgggctttacaaaaatgcattcaaaatattttaaagtacttccactttataactgatgacagaagatgataaatacattgtggttattttgctcctgttttttgaactttcagtgctgggattattggagacaactaccctgagatagcagtgatttgggaactaatacctaatggctaagtgggtgtcctcagccctcacatcctgcttatctatggaaactaagtaacatgggaatgatagctagaaatccacccttttcagaggacccaagagtccatctttaaatgctgtatggctgggtatgctgtgaggattctcttaacacagaacagctctgccttccaaaaccctaaagacgtttgataaggaaaaatagctaacaagttatgcctttctcataacctttgaaacctacttaaaaactgaaacagtacaagaatttgcagtttaaaatgaccagagaagtggcagaaagccagaattctgtcagagacggcttagaaaagcttaatgattaacaaatgggtcactgccttcaggctctgacctttagaactaaccaaytttagccttttggttatgttccttcaactcgttttatatcaaggaaaaaaaaatactctctaatggcacagtaccacccatccaaaaaaaggattcttagcagtccagtatttggtcagtagcttttctgataacatggagttggtcctaagcacagtattaacaactgttaaattatattttttgttagagtttaaggaaggccctaagcacgactgcatatcctgcaggtgaaatgtacgaaatttcggttaacatggtaacggctctaaaaatacctaggctacagtttaaccacagagtttcctccttaacgtaaaaaagccaccatcacgagctgttagaaagtgcaacaaaagcaatctctgtcggactttgtgcaagcaggctattaaatcaggcctggcagtgacaatctgcagccactctgcatcaaagtaataattaaagttttgcaagcccaaacagcaatgcacaaaccacctaagaaatatgttacattgataagtcctttttttctgcctgtaacttctcttctcccctacccccaaccaccaggtggactaagcagggcgtggcaggggcaccgtgacaaagagtcaccacaccataaccacagggccccacccgaaggaaaacctagggcaggctgccacggttttcccagcaacctctgcaccaggatcccatagagtatgcacaggaggctaaatcactcacctggggtttcccatctgggctctttgcttggcagagacagagagggtggggtcaaccttttccttgatgcttttgcagttagcaagttggaaacacatttgactcttttgaattctgtgccttggctattcaggagtctgtcatgtctgggcttactaaattctaccatgtctaggctrccgggtttaataaatagaaatacctgacatccagttaaattggaattttgaataaacagtgaagaatttagtgagtgtaagtatatcccatgcaatgcttgggatacttacactacatacttatatacttatactacaaataatttcatagtttacctgaaattcaaatttgactggatgtactttcagagtctttttatccaccaacacccaattaacaaattggtttttatttgtttgggctttttaacttcattttgyttttatttagttttgctttgccttgcaagccttgggtcagtgtagaaaggctaatccaaggaaatgagctagcatttgctgagctcattcttaaatcaggcttcatcttaggtacttttgatgcatggtcttttaaaatcctcacatcatcctctataatagcctacttaaaatccacattttatagaggagggtacctcagctcagaaaggttaagtgatttgaccaaggtcacacagctaacaaggaggcaaagctaggtgtaagcctaagtgagtatgaccccaactggctttctcaactacttagtacatctgcaatagtcacatttaaatgtaatagttaatttttgcctgtttatcagacattaggttcttttccttaacaaacgtcaactcaatagcatagatttcataagcgaaaagctcaaattgacagctgaattgggaactgttctccatcaactcctggtacataataaactattttattaatctctttactaaaaatgaacttccaggccatttctgactactccacactagagctatagttgttctaagtgctttctatatagtaattaatctaatattgaaatcaaccctatgatatagtcagtactataattttcaatttatagtgtagagaaattgaagttcacagcctttcccaaggtcatacactggtaagggaattaagcatgatttaatctcatcttcctggctgcaaagcctaggttgtgtggctttgaggaattacttagcctctctgagcctaagttttttcatgtgtaaaatgggaattataactacagtactatctatatcattgttaaccatctaaataatggttaattcatttaccagtgtttgaccttgagaaagtctctgaacttaaacagctttgcacatagtaagcactcaacaaacatgaacttatacaattattttgagaattatctttagtagacacctttgacaataaaggacataagagaatagtctatgtcagggattggcaacatttttctgttaagacccaaaaagtaaatatgttagactttttaggccaagagtcaaaatcaaggatattatgtgggcaattacatgacaagatagaaaacaaatttctataaatctttattgacaaaaatggaaaatttgataataatagttaagtataattttctataatataggtctactgatgagaaaaattgaattcttttattgtrkgagagtgatawcatttcacttaattggggttcaaagttagtgcttcctatcatcagartcaattgcccatgcccatctgttaatgctgattcataatgaggttttacatattttgtctttgaaaatatcttttcacacaaatagatactgtcaaatactaatatctgttgatgaacatatgattttaatttagcacaatcattacttaaaaagcacttaaagaattctattagattcttctcttggtatttgccttttagcatgtcattatattaattacttccaattgaagggtaggtggaagctcctcaattgcacagttaaatggattttgaaataaggaaatttcatttgcacttgcatcaaagtccaaaaaaatccactgctggaattgtagtttgaactcaaaagatatatctgctgcacgtttgtgtggaaatggaggtcttgcttcttgttttaacttttgacagcacaggaaatgtagaaagcagtttgacattacatgtgattcaaacaacattagttgtcactgaaatgactttaccacagtataaatttcacttgtaagtgctgttttgcctaacaattttaggttgaatttttaaagaaacattaacagtctgtaggaaagctcatttccaaaactattcagtattcaattataggtgatagtggtgcatctcattcataaaaatttcaatcttggccctgagctcaaacaaatcataatgaaatgttactactacttagcaattgtttctgccatgtgatagagaagtagaatattcagattctattctaacaaaactttacaggactaatgatggttaagtccgcaaaagtaaatgaatatcaccattgacactactgtttcaattacacatgatagatttaaakatgttccacaaagcaccgctgatgaataatatgagtcactataggtttaagatgccttacattttgaaaagctatatgaatttgtacaattaaaccctttttctgctttaaaataaatattttaccaccgtctattggaacacatcttagaagattccccttcaggttgtgcagaatttgtgttctctcagtttttttggaaatgttgtcacctatagttttacaatgcaggctattcattaggctaattctttaatcactgtagactcagaattgactcctcaaataaataataactgagtggtatcagctatatctgtcaacycatcaagatgcaaggaaaaccactcaaaattayttgccttgtcttttaatcaacaattgccattgcttccagtattctcaactattcaagcaactgttctcaccaaaaagctaatagtcttaaacaggtttgttctatctggataatttattcaactgctataatcaaacacaatttaatttattcatcctcagtaaatagctttccttgcttgggaaacaaatgagctactcagaaaattatttttgatgcagtgttatttgcactttttatttttgtgaaaaaattctactgtgatgatatattcaatttaattttttatttctatgaytattggttactggtgagttgagaataatgtgatgagtgtttaacctagaaatgcctgtatatattgtatttttttagcatagccaaagtgtcatgcacaataracacaatgctttgccatctaatttgataacagtcatctacactccactgtacctgtcatttgaagtccacttttctcttcttttactgttttgagatgataggtatgaaatggcagtttaaaaaataagatgtcacagtacaacgtggcatgtaaaacacaatcaaatgataactatgtcagtatgatttgtagtgtacccagcagcactgcaaagcaataaaagcaacatatacagtcaatatgtcacaactactctactctgccatcgtagtgggaaagtgatcatagataatagatatatatatgaaagaaagagcatggctggttccaataaaactttatttatggatactgaaatttgaacttcatataatttgtatgtaccaaaaatattgttatttttgtatttttcaatcacttaaaaatttaaagaccattatatcagctggggggatataaaaaaaccagacagaggtcagatttggcccatggatggtagtttaccaacccctgttctaggtaactaagtataaagtagatttcagaaaacattgataaatatttttctaaaatttagaaacttttaagtgatatataatttgtactttaaaactgtctctgtttgatatatcatcttaatatttgtttaatcacagaaacctagtgtaatctataattcaaagggacggtcatctacaattagagggaaaattcaaggagaatcaactgaaagcctattatcactaataaaagaattttttaaaagctgaatataaaaaacaaaaaatacttttaatatgtatatatatataaatacacatacaaatatatacataattcagtagttttactatacttcagcaatggccaatttgaaaatattgtatttttaaaaaactatccacaagaataacgaaaacaacagactacctaggaataagcctaaaataattgtacgtgagtagatgaagaaaacttctaaaactttgctaaaggatctacaaaatgacctggatatatggggaaatataccatgttaatatacaagaagacataataaatatgtcagtttgctacacattaatttattaagtcaaagcaaggctgtgacttaagtgccaagcaaggcacttggcgagtttattctgaaatttatctgaaagacgaaattcttaaaatctgcaaagatatttctgggggaagaaaaattagactatactatgcgttctactggatatcagaacatatcaaaaagctatataaattaaaataaaatggcacttttgtagtaatgatcaaacagtttaatggttcagaatagacagtctagaaatagacatatatttatttaagaatttagttcataaaggaggcatttcaaatcaatggaaaaagaatggatgatttaaataaatggtacagagacaactgactatccatctaaaaagagttagattttcactgtcccataccatgtaaaataataaattcaagatagagtcagagactgatcttatgatgaataagaaaaggtataaaagtgctagaagaaagtataggatatttttatattcttcaaatgggaaagcctttttctaaaaaagacacaaaaccggccgggcacagtggctcacgcctgtaatcccagcacttcgggaggccgaggctggcggatcacgaggtcaggagatcgagaccatcctggctaacacagtgaaaccccgtctctactaaaaaatacaaaaaaaaaaaaaattagctgggcatggtggcgggcgcctgtggtcccagctatttgggaggctgaggcaggaaaacagcatgaacccgggaggcagagcttgcagtgagcggagatcacgccactgcactccagcctgggtgacagagagagactccgtcgtctcaaaaaaaaaaaaaaaaaaaaaaaaaagatacaaaaccccaagactaaaaaatgaaaacaatgaacggatacataaaactcaaatttctctattacctagcaagcaactggttgaatacatttgcaatataggtaacaaaagtaggattaatatgcagaaaatatgagcaagacaaataacccaagagtcaaacaggcaaaatttgtgaatagacagtacacagaagaaatgcaaatgatcaataagcatgaaaagataatcaacctccttcgttgttgcaattttttattgcaatgtgacaagccactccaaactttagtgacataaaacaatcattatattatgccaagaactctgtgggtcagaattttggacaggttacaatgcagaygtttgtctctgtgccttggtgtctggggtctcggctggaaagactcaaaagctgggaggtgactggacagcggggggctgataccttcaggagccatcttcactcacaagtctgttggttgatgctgttgtaagctggagctgtctgccagaaacctatgaagcctctgtaaatgtcctgagattcttcacaacatgatggctgggttccaagattgagtcagaaccagccataagttgtatcatcttttatgacttagctcaaaagtcactgagtgtcagttctgccttaaccacagaccctcttagtttcaagggaaggggatatagaccctacctcttgatagaaaagttgtcaaagtcatatttaagaagagaatcagggatgggagatattgttgcaaccatttttggaaaatctatctggcaaattagttatcaggaaaaggcatattaaatacctagaaaccacttacttaccacgtatcagactgataattcttcccaggttcattcattcatygggaaaaagagccagaggagtgacagaaaagaaagaaaaaaaaatcatttgaaattttagcactatttttccctattaaataaaaaacaccttggtctggggggaattttttttgttcaaaatattattaaactggccattttactagaatgtgaaaaaagtatttattttgtacactctgcttaaatagcaatccattttcacatttaagtaaaccaaagcaaagaaattccctgttattaatttaattcactcttcaacattaaaacatatatggtcaagtgccacacaacaacattccagttaatgacactagtggtcctataagattgtaatggagctgaaaaattcctatgacctcgtgatgttgtagccatcataatgccagagcaaaatgcattgctcatatgtttgtggtgatgctgctgtaaataaacctattgctttgccagtcatataaaagtatagcacatacaaatatatayagtacataatactttatagtggtagtaaatgactatgttactggtttatgtatttatctatactattgtagggacccagggaaaacttctccttcaccctctgaaggtttgatggaaatcaactgacaaaacagcagattaataaaaaaggcaaatacaaatttattataattttacatgacttgggagcctttagaatgaagacacaaagatgaaggaaacagtccatttttatactttggttcaacaaagtatgtatagcatgtgcaaatatgattggacaaaaagggtatgatctaatgctaatagactgagtgggagaacccagtaaggcctgtctgtttagattcttcctggcctttctgtgcagcgttccttacttctgggtaaggggcaggagcctctctagaatggggggtcttatgacctacagtcaaacaaggtaggtgagataattttttatggccaatttttatacagaaaggcaggggtgaggtgggagttaaagtaatattttaaaattttattttaagttaaagtaatatttttaagctggctttggggaaaagggttctggtttctatgacgtgccttgggaagaagggattctagtttcaatggccagccttaagagagaatgagtggccagaaacaggatggcaaaagatcagggagaaccttttgcttctgaggccttccttttgaggtactgttttctgagctccaataccatattttttatcattattttagagtgtacttcttagacttattttttttttagttagctgtaaaatggcctcaggcagttccttcagtaagtattcctaaagaagacattgttataggagataaacagcttcatgtgtgttaatgctccttgaagaccttctagtgggacagtacggggaggtggaagacagtgatattgacgaccctgaccctgtgtatacctaagctaatctgtgtgtttatgtcttagtttttaatgataaagcttaaaaagtaaaaaaaaaattaaaaatacaaatttataaaataaggatataaagaaaatattttcgtacagctatgcaatgtgtgttttaagctaagtgttattacaaaagagaaagtttaaaaaaaagtttacaaagtacaaatgttaaggaagctaagattaatttattattgaagaaaatttgttaaaataaatttagagtagcctatgtgtacagtgtatataaagtctacagaagattacagcaatgtcctaggccttcacattcattcaccattgactcactgactcacccacagcaactttcatcttgcaatctctatctatggtaagtgtccatacacatgtaccattgtttatcttctacactgtatttttattgtaccttttctatgtgtagatacacaaatacgtaacatgtgttacagtcacctgtagtattcagtacagtaacatctgtacagatttgtagcctaggagcaatccactagaccatatagcctaggtatgtagtaggttatactagctacatttgtgtaagtactctctatgatattcacataatgcaaaatcacctaatgatgaatttctcagaacatattcccattgtttatgttcttctgaacataaatttaattgcattttttccctgtagcttacagttgtcttctactgggagtcaaataaatacatttagaagatragaagaaaataacaataaggatgtgtgcgtgtktgtgtgtgtgtawgtgtgtgtatgtggagataatgtgtgtgcatgcatgcgacacacacacacagagatgtggagaatacaccttatcttgtatttgagcttttcaaagaatatttctgacttatatgcaagaaagtaagaaactcaagtgtagctaaccttgtctgattttaggaagccatacaaatattatttcraagagaattttcccatataaaataattcactacgtttaatgaataatttataataaatggtttgatatttcttatgaagttaagtgttactctttttttgtatcttaagtgcatagtttatatggtagtatttttaacaagactattgaaacagacttccttttccaaaaataaaatgttttatgttcttagccaaaaccattttgatatttttaaaatattgtgaatgtgaatgtatgattttatattgatttactttacccacaatatttatatattgttcattgtagagttaactacatggtatgtaggggaagatttgcatatatttcacacaggcaggttgctgtatatactaatatgtgagtgtaatcccattctgattttggtatacctgccaccatagaaataaagctggcgattcagtgactagaaaaagacaatgaagagtgcaagctttttccagccatgcctgagtaacagttggagctgctttccccacaacattatctttttgacacttgcaagagaataatattcatttgcaattgctaatgcaatacaaacaccaagttagcaaattaaaaagttaaatttctcaaagcgacattgactcatctatattacatacaataaataaatattttatttgcttcatcattcaattcaatttcccaatatgcattatttgaaatagaggtaaatttttctatgaggtgcctattcttattttctccttttttcactaaagggattcaggaaatgccaccccaaaatatgacacattggtatgtttattgctttgaactgaggacacttggggaacagtggatgccggcagaggcttcctctgagctccctttagtcttcctaaagacagcccccaaaaggaactaaattgtcatgaatcccctccctgggaatcttatcaaccaaggaagattaacttcgatcacaggagaggagattggaggtggacaccatgaccccacagattaacacctatttttctgagggctgctcccagataacttgtattacgtgagagaccttatgtctgcgtaagacaaccatttattcaccatacattgtctccccttatcctcccattgcttgtgttgccaccatcccctggaagtgccaagcccctactcctttctgtacctcaggatgctatataatcatctgatccttcttccaatcccatattttatgggactcccatgcatacatgttattaaatatggttttctcctattaatctgttttatggcaatttaatttgtagcccagccaaagaacctagcagactgaagggaagccatttttccttaccctactgcaccatcctaaatctttgtgcaaaaggagaaactagcacagtgaaattgtttctaaattagaaaccagagtgtaaatcagttctcattgcaggcagctctcagtttatgaactctctgttggtaatctgattgtttccaattaggaatgggtgttcccatagaaataatgttgtaatctgccatctcaggcttgcctgaaaaagtttatcattgatacaatagaaatactaccatttgcacaaatgaaagagcaatacaatcaaaacaaagcaatgtttctatttatattggacattggttattaacaaaaagccagatgaagaaggagatggagtcttttgtgagattcggaaggggacttcggggaactcttactagttcatagtcctttatgacatctaatttcattttaaaagaatgtggtttttcttgtccctgcaactctaagcattaaagccatttttaatttattttggggtttttttgttctctttgaagctaggggttgttttgttctgttgttgtggtagaagttggtgtcttgttcataaatggaataaaagagaaagggaagagaagataatttggtgagctaagaagagatcttgtgacaacaggacaagaaattgaagaggaagagagagagtaacaagactggaaattttaaaaggatatatatactttaagaaggaaactggcttagtagtgagctgttaactgaaaacttctggtaagaatgagagcaagtggggaggaggtcatttgtggttatagtagggagtaggaggtagcaagagtaaaccatcagatggacatcaagccagaataatttgcttgctgcctgagctgggggtaagtgccaaggttagttgcgtagaagcttggaaaaatagtctgcatggatattcataacctagggtgaaaccagatatgtatgaagagatttcagcaggtaactcaataattgtatgctaaatgtccatgaaatcagtgagactagctccattttaatgtccctgagaagacccatgtatcactcacaagtgtggggagaaaagtttgatctttggaatttgttctttaaataatggaatgacrtcccatatgtcacctcatcatcgagatcacgccctagcagatgtacacatttccctgcaaacaaagagtaaacaggtgtgtgaggtggatatgttagcgcaggaaagcraaaggaggaatttatgtttttgactctaaaaatgggaaaaccatgagtcttgaatatgtcataagaaagaagtaaaccacctgctatgttctaggcataagaggtgctttggttaattgcattaaattatatactaactaattaataacagacacctggtaaaaacagataccttgttaataaggagaacttttggataacctggtctataattgaagttataggtcagaagcaaacaccttgaggttatgaaatatcatgtctttccagagatgagccaggacaactttttcattttctttctcttttgctatcacagctgaatctccttttaacaattgtaacttcttataccagttaaggccattttattgaactcttttcctgcaacaataacaataattgttattattttttgcccctattttgtgtcagctatatattaatatataaaatttctaattttctaatcttcataacagccctttaaggtagatcatacttctgcttaacagatggggctaactgaagctcagtgatataagatttgtacatcacattatattattatacagttatttatacagacacacacagtcttttgctgagggtcagaaatgcaagtgttcagttaaaaataacctccatcatcaaatttttcaggttcagcatttgcagtgacgtraatctcaggtgggaaataagggaaaatgattgaaacctatttcaatcacccattttcatattatggaaacaaaacaaagataataatatggaaacaaagataaccaagaaaaatgaacaatattttactaatgtgtgaacaccagtacattaataaawttaacttttaaaacattgcaaagaaatggtaggctgatatgaagataaaagctaatttgcaaagaaatggtaggctgatatgaagatcaaaaataattgtgcttttcatcaaattgagatttttgttagttatgaaagcataattttaaaataaataaaatgctgtaggcttccacaagatgaaggctgttgcctcttacactttttattcccaagtttagtttatttgctttggctttagctaagctttgtgaagagttgttattatgtaaacagaaaagaagctagtggatctgcaaagtacaaaatgaacatattgtttagtgtcctagagcttataccaccagattctgatgttttgcttcaataccacagatttcaggtgtttgcaaacagtgctttctgatttccaaaactataaaactttttaattagaatattaattctccaagtcattgccttggtataaagtatctctagccataaatgtaaaaatatgtatctgtataaaaatatgaggtgacatgtaataaagtttttattgttatggattttagaatgactatattgctcatgaatggcatggccataaagtaattagatggataggctgggaagagtggctgtaaaataaatatgtatgatattctgtgacattttgtataatagcacacacaatgttttattttcatgttcttgcccatctgaaactcagcatttttcccaacaaaaagaatgatggcataatagtctaaaaagtttagaatgcatggaaataaggaaagcattttccaaccatattattgtggtttgcagacttagtgtatgtgttctgtaaagaaaacaagaaagccaaatacgtgaagagaagattcccaaggataaaactgataataactagagtgaaattattttacatgtcagtccaaaattaattctagactctgctaagtggttgagagattttttatagtgattagcatagtgctggatgcatagtaggcctacaataatgttgcttgagttaactaatctttcttggtttcagaaaacagttcctgcgtttaaaaatgttcatttttttctaatcccatgcttagaacgtgttgctatagaaacgactgaatgtcatttcggtttcacaggacctccggataaagagaagagtgggtagtttgtaaagcagcagacttcatatgattgggagaaagtcataagattttatgaaaaaccagctaccgtcacatctacatagctagatagtcttttacaatggctgctgggacagagtggcaaaaggcagtaaagcagggactagagagaaaacccttttttccttgacagattgttctttatgattaaaaagatagggaatcagcagggattagaaaacgctccctgattgccagggggagaggggaggggacctgattaatcacaaatactggtaacacactaacagtttgagcctttacaatgctgcaaaggccttttggcatgacatctgcccccagtatggcaggatcacctgtttaatcacggaagctgaagaacttgcttctaaaaaaatgccttgtttatttttatcctatgggaacaaaagtcatgatctattaagtattattgtattttagaaacttcaagtgtctttatgttcttttctttccttttaaatgccacttaawgcattgattgttagggtcccacacaatttgggaagcattaagataactttatcttgctagatatgaactttattgtcctataacaccaatgctttccttctgacaacttccaaaaaaagccagctatgcataactaggcggaatttacctgttagacggtgtattcaagtcatgatttgtattcaggtaatgattagcattctccataaacacgagtgtaaaaacagcttaatcctaaatgtttaccagaaaataatctctagtgagcagaaggcaatacagagaaagccacttctttggtgccctttatttttatacgattgtgagataggattaagaaatataatgctagagtaatgatccaaaatttggttttcattaatttccaaagacaaatctttgaacattcagccttctaaagtagaaagataaccaaagaattccacaatgtatgttaatttttcaaaaattattgcccgaaatacttttgacattcttaatactccgtaaagttttgttttgttttgtttttattctctactctgaaaagtgaagtgtagccgtgcagtttactagacaaagacgtgtctttgatttagtatcgtcctgatatgcttgactattaggatgccacctctaaaggcttttttaaaacgtttctaaagtgtgatatacacatagacacccstgaaggcttttaaaatcaagtacggtcatgttggatttttgcaatacacttgttatgtgctaggtattgtgttaaacacttactattatcttgtttaattttttttaacaatctttaaggcaggcagtattattactcttattttacaggaaaacagatgcttagagggattaagtagctcgtccaatgtcacacagataaatgtcagaaacagaattcaaacccaaatttttctgactccagagatgcttctcaggatgaaagaaatatttcctcagggaaatcccacatagatataactgctgaagtctgtcaccaataaactctagatttattgcttgccaagactatttctaaaactgtgcttctagccctaatgacttctatacctatagagtccaagttaacattcaatttattccaggtgaagtgaaacaagactgattccgtgcttttataggaaaggagtgactcatgagtggtaaaatttcaaactctcctggtctgctaggagaactgtttatggaaaatgggactttcagcactatttctacagccactttgagtcaagaggaaccagctattctggctaagatactattgtccttgtgtacccacaaagtgcacaaagctagatgatctaatctaaggagttgaattcgtgcacaacatttcttgacgttcttggaattcaccataaaaaataaaggtaataactaaatcaagagctgtttccttgatcagaacttagttataatacaaattggcttcctaacttcagctgtccctgagctaaaatgctttatatatggtggtaaatcaggaaattagcgatcttctctaattagctgtaaacaacaaaacttctggtgggagcttaaaggctttgagcaccaagtatcaatgtgagcagcatttaacaataactataatattggtaataaataccttgatacacttttwaaaagtgtttattttactattaacattaaaatcttcataatcatgccctcaaagtcagtataatgtgaagagaaatgcatctgaaagcagtaccttatttacttatgaaaaaatagacctttataaattgcaaaatattcttaccatactcctgggcccatggatttggttttaagaggttgatctctactactgcctgagagtataatgtttcaacttggcttcagagtgctttcctagaagaagctagatgaaaatatagttaaatattgtttcagtcagggtcccagcaagaaatagatggtatatgtgaaagagttttatgtaaagaatttaaggggctgggcacactggctcacacctgtaatcccaacactttgggaggccaaggcrggtggatcatttgaggtcaggagttcaaaaccagcctggccaacatggtgaaatcctgtctctgctaaaaatacacacccgcaaaattagccaggtgtgtggcatgtgcctgtaatcccagttacttgggaggatgaggcaggagaatagcttgaacccaggaggcggaggttgcagtgagcaaagattgcacctctgcactccatcctaggcaacagagtgagattctgtctccaaaaaaagaatttaaggaaggggtatttacaaaacagtgggcacggttaaggcagccagccagggatgttgtggcacctaggaactagtaacagcaggaagccgttactactcctaggcctaaatgggtgagggaagaaaaggttaccaatcaatgccccatgagagttggaaccaggggaaaagagccacctgaaaggaactttagctgtaaaggagctcaccattgccaacacctggcaaagcaggaaggaacaggaggaatcaatatcccagcctctgtctcctacctgagaatcccctgcctatgtcaccaattgaccaaaaccttccagaaaccagaactctagggaattcagcccataaaggggccagtctccctgggcacagatcaaagcagagaagggcaaggaatggacatgggagagcaagaataaccagcataaatagacttcttgtctattcaaagaaagaagagtcatggggagggaggaaagaaactgattatccatgtaaatattataatatatgcaatactaaaaagtaaacaggaaaaattttataatatacaataaatttagaatgcctatatcacccattaatagaaatcaatttaataacatgaagaatctaatagaccagttagcaaaatgacatgaacagactgtttgcaaaagagaaaatatatatgggcttttagtcatatgaagaatgtttagtcttactatattagaaccaaagcgagatctattcttcctagcaagtaacaaaaattacttaatataagcaaggatacagtgaaatgggtcttttgtataccactaatagaaactataaattggtatagtgtttctgaaaatctatttaacagtaattccactttcaatatctatcttaaggaaataattagaaacatagataaaaatctgcacaaagatgtgcataatagtgttaattataaaggaaaaaaggaaacgaatgttcaacattaatgaaacgattaaccaaattatgcaacatacatttcatcaaatattatagaggcattaaaatatttacaatgagggcttttggtcttatggtaagcagaaattcggtacgcaaaattatatgtacgatgtgatcacaaccatgtttagagaaaaaacataacactaaaggaaaaatatcaaaatgttacttatcagaataatgaaaatatggtgatatttttacattttccctctttatatccttgcctacttgccaaattttctgaaatgaggatatattcattaatatttattgaatgccattgttgcactagtcactgtcctgggacctggacatacaaagctcatgaagcacagtctttgcctcaagttgcttacaatctagtgtcttatttttatattgtaatttccaaaataataggataataaagctatcatttattaaattagggtggatgaggggaagtagtattcgatatatttggtctctttccctcacaccacctttcaaagccaataggaatcctggctgcctattactttaaaatatatccaaaatctcatgaaatgtaaactaataaagttttcaggaaaaaaaaaaccataagaaaatatctttatgatcttgaagtaggctattggcaaaaacatcttaagcaggacacagaagtgttaactataaatgaaaaaaataagttaggctatattaaaattaaaactctattcatcaaatcatactattaagagggttaaaaggcaggccacttagsaaggaagttttaagtaaattcatatttaagattcatatccacaatatataaagaactcctatatcacaataagaaaaagacagcccaaaagaaaaatgggcaaagatttgaacaggcagtgacaaaagcatatatgaatgacaaacatgcaaggattttcaaatattagtcaccatggaatacaaattaaaacgacaatgtaatagtatctctacatcccagattaaaaagacagatagtagccaattctggcaacaatgtggagcaactcagctttcatacacacctggtggaagtacaaactggtacaatcactttagaaaaccatttggcagtatttactaaagctgaattaagtgcgctccatgattccggaattccagtactagagaatcacatacatatgttcttcacattaaatatgtaataaccaaaatctacaaacaatccctatgttcatcaacagtggaatggataagtaacttgtagtgtatacgtataagcaatactgtcccacaatgagaattaattaactacaactacatctaacaacatttatataacaaacataatattgagtgaaagaagccagacacaaaaaatatataccatatcattctgtttatgtaaagttcaaaaacagctaaagtaatctatgatgttggaattgattactgattacctgcagcaggaagagagtgcctggaaaaggagcagaaggtagcttctggggttctggtaatgctctgtttcttgatctgactgccagttttacagatgtgttcactttatgaaaattcatcaaggcataattttctctatgtatgttaaacctctattaaaatttacattatatatattatatatttatgtgtacatatattgtgtgcatgtatgtgaaatgacaacatttcaacaaatgaagttttaatgagttagttgacttttattagcaattcatgaaccagacagcatccagtctataaaatagacaagagctccactggccatgaagtcatggccagtgaattggtttaatagagagctccactggccgtgagttggttcttgtaaggcaacttgagcgggaacaaggaaacatctagtgcaaaaggtaaattggttaacatcaggttactaaaggttactctccttgtatggattaaagcagaggggacttggttattatgcccgctcagctcaggttgactgggcccttttaattggttgctgtggatttccyttttttttttttttttttttttttttttmaraaaacttactttctcccctaatctctcaggtcagaccttgcaagtaaacagcttaggttttggtttggtgatcaggaacattagcatgagtgactccagtttaggttggactattgggacctagtacaagatcttagcccaaatcaatagcctctcataatttttatttaagagtatatacacatattcacacacacacacaaacacacacacacctatatatttcatccaaactgtagccacttctggcttcctctactgttctctctaatctaagacttctgcaatagctgcttgccccagttccactcttgcacccctgtatcttcaccagtagccagaatgagaattttaagacagaaggcatgccatgtctgtccttggctcataacgagtagtagcttcccgtgtaaatccaagtaaaatcctcagaggtaacacatatccctgacagtctatataaaatagcctcactcaaacctgttatgtatccctttacctgctttatttttccttatagttcttatcaccaactgacataccatttacttgattatttatttataatggcctttctgccacgagtatgtaggctacaggagagcagggactttatctttctgctttacagccttcacgtctagaaaagtgcatggcataatggatggatggatggatgaatagattgatttgattgtcaccaaaaaatgtagaaaatgggcagaatatgtattattagccttcttttataggtttggaaactaagagaataaaattatgtgaggaaacaaagaaaatgaaattacttactcagtgttattcaggagtacagccaggtcttctgttcctctctctcaccctcctcttctctctctttttctccctctgctcttcacctcccacaaacccactcatgcacacaaagacactggcacaaggagaatgaaataagaacaattttcctcattaatgaaagtatgcatgtgaactactctgttcactacaatttttagccattttactcatagtcataaaatatattttatattatgtatgtgtaagatatgttatatataatatataacatatcctacatatacgtacgtgtgtgtgtgtgtgtgtgtgtgtgtgtgtgtgttatataatcctattggctgagaattaaatgaggatgacagccaggtaaagatttattatattggaattgggcctttttatataagccttgatttgtggtcgtttgttctatttgaaaacatgataagaaagaatctattgttttgcttgccaaaatatgtgggacctagggctggtttctttagtattttgcactagaaacttttttaaacaaagtaagacttttttttaagatcttgcccgccttgcaagaataaaaaaacttttaagcctctgaagacaaagtttttgtcagtgaatgtccagaaattgagattgtttcagtcagaagtctcacctccctgttctcggaatgaattgtagagcccctggaatagacaagggtgtgtaaggttaattgctgtttctatatagatatcaattaccttttcaaagggctacctagtgggatttaccacttggcactttgtctaaaagctagcaaaaaggggggtggggagaggaccaatttggttgtcaacctattgatccttcagtgttggttaaaaaaaataaaagttttaggccctttcagttactaagtagctaactacacagttttgttttgtttttttatttaaaaaatgggaaacagtgattatgtgctcagctgctagcattaatgtttcacctcctccctcttagaaaacagtaactataatatcaagccataactttaaaagcagattaaattaaaaaatgaagttccaaattcattgagtgtaatgaggccaatgtcagatcattcgttcatcaagtagttacagcttttaataaggcagaaaattatagttaaagggaaatatggcttttatttatgaatacaaaatagccattaatgtcacaggagaaagcaatgtcaaagtttattctgaaactcagacttgcagatgagcagaggaaagtatagggtagtaagaatatatgtgtaactctaatatgggagctctaccttcatcctgaccacgcaatctggaagctttgtaacctaaagcaggttagttaaccaatctgaatctcaccttcctggggatgtaaaatgaggatggcttttgtgaagactaaatgaggtcatggttctaaaaatgttttgtagctgaaataatgtataggattattactgtgctataataatttattgaatccctttcctgcctctctctacctcctaaagccacttctgtaagatttaactaaagtttccccctcatccttgaggttcacttatccctactgttgtagattaggatattttaccccaattaaatgagaatttctcatatgttccatgtctgaatgagccttcctaaggcagaacagaactatgaccttctctgaaacccaaactattaatgttgtacatacataaacaagcagctccctgagaccttaaaggtaggggtattggagatagaaagtaaaaagtagaagaaatgtcttctttccccacctcaagatggaacactgtcccattttcctaagtattttttcttgtcccattttcctaaatattttttctatctatagtagaaaaagttactatttaatgaacacttattatatgccaagcactgtgctatgcrttatttcatataatcctcacaacagactaatgcattctgtactattattgccagtatagacaagagaactataatcagagcaattaagtagtttgaccagtgtcacatatctggtaagtggagagtcaggatttgaacctaaacctgctcaattccttttccaggcttttcctattatttacctcctacatttcaacttcttttgtgaagaagttgacacagacattatttctttgcatgtctgtgtttgcctttctatccctttaaagtttcatctttggtgtgcttgtaatgagtagggtagggacctataaacaaagatgactaaggtgtggtccctctgcttaagtagagggacttaattattggcatctttctgcccataatccactggcagaaaaatgacaggcaaacaaatcactctatgacatggaagaatttgtgtgcatgtgtgtatgtgtgtgtgtgtagcagtttttgtttgtgttctgcaacttttaagttcaggtgtacatgtgcaggatgctcaggtttgttacataggtaatcatgtgccatggtggtttgctgcacagatcatcccatcccctaggtattaagcccagcatccattagctcttcatcctgatgctgtccctccccaatgcccccatccccaacagaccccagtgtgtgttattccccccttgtatccatggaataatttaagaggtcataacagatggagcatcagcctcctcatctgtaacttggaaataatactctacctttcaaaactgttgttatgatagagtgaaatgcttatgtcaagtatatagcaaataccctaacttgtagtaaggggtcagtgtatggaatctataatgtggccagacagtccaaggactgggataccagactagaaaagcaatttggagccagattttgagaaccttgaacgccattccaaagaatgtggaccttcagcttgataaaaacartttgccaaagttaataattattccaaaaagaaattagagctggtgctattttacattacctttcaaaattcattgtaagtgagatggagttggtggaagctgttgtaactggtttaaaggmattttatatttgatgtgctaaaaggaaagatggtatttttaartttgatgccttttattttttcttccacagtaattagtgaatgccaaaggcagcaactggaggctgtgagctactcctctcgatatgctctgggcctcttttatgaagctggtacgaagattgatgtcccttgggctgggcagtacatcaccagtaatccctgcatacgcttcgtctccattgataataagaagcgcaatataggtcagtacccctattatttcccttaaatacagcaacaatggtgggtgtagatcatgaaaaatgctgtttaattgagtgttgccattctgaacagagcaagcatttaactccaagccacaggggataaaatttaatgtcacatttggccagtaataaaatacacagtgaaaccagcaaagtttttcagaatttcattcaccacatggtttatattactgagttcatgaaaatagtgtcagaaggtttaagatttcaaaatggcccaagttctattgctttaatatggatgcatctatatgcacatgtatctctcatttgtttcttggtgaagtttgtttttgtttgtttggtttgggtatttttttttaatttgataagtgctgctcttccactccctcggctagaaattaaaggagaattttactatgttatgaaaatccttcatttcaatataattttattgtttatttacattttatctggggaaaaatggtaaatttactttataaacaatgtaacgggtaaaatgttttatgagagcttcactagaatgtggtgaatctacactccaccctttttgttgaagatagttataaaaattagatttgaattgtaagaaaaacataactgattccttttaggcaaaaaggtgaagaaagtgtattctcatttgtaggactgcagtgatccctgagaatgctgctttttgtggaataaccgttaaggatgtaaaatgactaaaactcttgaattgtcctgtcaatctgttacagtgttttatgggacagtaatggcttcaccaagccattagttagaagtctggcttgataaaatcaccaactaatgtctcttggctcgccagaccttcataatgatagaactgggctggagtatggtttttatatcagagctcatgatcttagaaaaatgtttcttttataacttaaaactcccttagggctggactgtttatgttaacatgataccacatatatgtacaatcagcagttcataaaatgccttagaacttcaatggactatttttaactctacaactgctttgttctgagaaaaggagactaacccttgatcttttcatgttatatgccatgaattagacattatcctgtgtatatttcatcataagatatgatatctgtcagggtgtattaagttgtctataacagaaaaaaaaatttaaacttgtttaatagcataaagacatttgttatattatctgctatggactgaattgtgtctcctccacagacataggttgaagccctaatcccaatatggttgtatttagagataggacttttaggaggtaattaagattaaatgaggtcctaaaggtagcgccctaaccctgtggggttgatgaccttaaaagaagagcaaaagagaaagctctctctttctatcccggcttgcacacaccatgtgaggacatagtaagaaggcagctgtctgcaagccaggaagatagccccagctaagccaaatctaccagcaccttgatcttggacttctcagcctccagaactgtgagaaatttctgttgtttaagtcacccagtctatggtattttgttatggtagcctgagttgactaatacattatctaaggagaagattggagagacttcagggttcattgattcaggaactgagcaatctcttcaaagacctaggttttatctttctctgctctcttccactcccaatactgacatcctcagaggactggcagcaagatggcaatagctgttggagtcacactgaacttaacaacatgcttaggaatgaaatgaactatcactggctctgttcctttctaagaatcaaggaaatcttgggaggccaaggtgggtggatcaagaggtcaggagttcaagaccagactggccaatgtaatgaaaccctatctctactaaaaatacaaaaaactagctgggcatggtgacaagygcctgtaattccagctactcgggaggctgaggcaggagaatcactcttgaacccaggaggcagaggttgcagtgagcaaagatcgtgccactgcacaccagcctgggtgacagtgcaagactccatctcaaaaaataataacaataaataataatactaatcaaggaaatctttacagaagccctttaatagacttctcctcatgtgccacaggccagaattggattacttgagtactccaaaaccaggtgctagcaaagagggtggaagcaatgtgataagcctatacaagtccagttctactcctggaactggtactagggtcatctttcctttagttatgaggagtgctacctgaataaaatagagttttgttaggaagaaggaaggaagtactaaatgctggattagcaatcaataatgtccattatcttcaagtagagtcacatcttatatgggaggtaaagttctaaagttgtcacataaaaagagtcatgtacattcaaaattaccttcaaagtttcttaaaacyacatgacattttagagaatgatgtaacatctttcagtaaattcagtacaactattttcccaacattcaatagatttctgtttctttggtgaagccagattaaaagttgatttggatttataggacccagtgatattttctactatgaaaggcacacaggaaggaaagaaatagcagagtcatatctcctaacggactatacatctgctataaaaatggagtgggatggtgggtaaaagcacccacagtacagtgcagtaataatttataaaattatgcaaatttgaaagagtacaacataaaatattaataaattatctcatgattggaagcatttgaaataatagaattttaaaaattttttatatcagcaatcatacaatattgaaaggagtggctacatgaattggaaaccatgtttttgctaaagcccatggtggtgccacttcagcaagcaaagaaatacctgcttttctttgacaactgtatgggaaattaatcttcaattatgcgagttttaaattaagtgagacagaatgccagtaatggcatttcataacgtaaaatctaactgctttgcatttaaactatttttttctcactatctgggggccagggtactaaatgggtctagttgaattcgcatactacaaatgcccatgtaatgtaacttcactctattttattgatattgatatttaactaggacagtaagagtttttttgtttttttttttaatgtagtttcgctctgtggcccaggctgtagtgtagtggcaagatctctgctcactgcaacctctgcctcctgagcttaagcgattctcctgcctcaggctcccaagtagctgggagtacaggtgcccgcctccatgcccagctaattatttttgtacttgtagtagagacggggcttcaccaagttggccagtctggtcttgaacccctgacctcaaatgatccaactgccttggcctcccaaagtgctgggattacaggcatgagccactgtacccggccaggagatgtttctttatgccagtaacactaccccacacccttgctttatgtggggtgtttgattgaatcaataattaatactacaatgtacatacacaaccaatgaaacatttgtgttctgtcaaggtagagaagcaacaagataaacaaagtctggcatggttgagaccacaaaatacagtcagttgttaagtcttgaagagagctagaggatatagaagtagcccaaagatcaaggcataataatttgttagaagtcaggaataggtagtacagtagatgtagaaagccacagccagaaccaaaatttccttaggcagagggagtagattccaagatgtactagaccgacttcaagtaacaatagttatgaatatgccccaatatccttgtttgtgtttcccaaaatgtgttcagtggaacactatttccttgagttgctctttgaaaaagggctctgtcatcaaataaatttgcaaaatactacagacatttattttggagaatatcaggacatattatctttttaaaggatattcctacagaaaagacacctttttacttcttttaatctagaatttcctaaatgtactttatcatgggatattgtatttcagcaccaaacctactaacatcccacagaaatggttcccaagtatatatttgagaaaccctgacttgatgtcacctttcatgcttcacacctgggcaggaattgtaggccagataattggagtgggaggttcgttcctgaaggcatcaattgggaaatacttgagattttttttagaaatgaaagaacccttgttgccaataaactcaaatcttcatggagttaaaatttgagaaaatttatgttaaaataaggtgtttatcatattaacttgggtagtttttaaaattagtaagattggcgtagtgggaagtatttggactcacaagacctacattcagattctggttctgaaaaatgctactgttgtacttttgtataggtcttgtatttgtaacgctagtgtttttagtaaacatacccaaaaactttaatggcctgaacatgactgaggtttatttcttgctcacctaaagcccaaacaggtgtttgtgattgataggtagctttcttcaaagctttatttaggaacccaggctccatccattttttgactctgccaacttcatcaggtaactaccagagtcagtgtgctcataggcatcaatctgtggatggaaagaggatggaggagagccagaggagtttttaggggtaggcctagaaatggtgcacctcaagtgtgctcacattctgttggttaggacacagttatgtgaccacacttatttggaaggaaagctggaaatgtagtctacctatatatgtaggaagaagaaaaagtggatttggtgaacatctagccagtttctactaaaacatttagtataaattgttctgtaaaaggaacagattatacctgtgtgaatgataaataggtttcaacacaagtgagaatcattcaataagtagttgccacctagaacaacaactaagaatgattcccaggctgggtatagactcagtagaaaaagatcttccaacaatcagcaatatctgtcatgtagagaacataaggaatagtgccacaagtgagatacatttacctctcaagaagatctctgaggtccatcccaggatcttaaatttgaagttagactgtccaggagtccagactcaactcagttccaccatttactagctgtgtaactttgggtaaattaaactatctgttgcctcctcaataagataagtaaaataataccataccaataccaaagggttactgagaattaaatgattcgaacatatgaagactttgtgtggcatttagaaagtaagtatttatggtacgtattattatrattaacagttccagtcttcaatttggatattatagtctctgaagcaaagggcataaatataaaagtctaacttaggtgaatgcagcctctgttaccaatacagataggagttagggcaacttaaataaataaaatgagtaagcaaccctgaaaatgatcagaaatttagcattctttccttgtcaccatctgaggagtgttaatgatcaataaaatagccaataggcagcaatctgaggagattaagacaatctatctgaattctagagatgtgatggccaatagccaatagtcagcaatctgaggagattaagacaatctatctgaattctagagatgtgatggccaatagccataatgacatagttttcaatatcttatcaaagaaaataatccaactcatcttaaaagaagaaaagcaaatgaacaaacttagaatgtattcatrgaatttatcctcacaagaattttattgttagaatctttgagtaacaaacactaatataatatataataccttcaatggctgttttgcaaaatatgcagaagtgttattccatatggctatttattacgtcaactctttataaaaagaaggacataatatgagatgttataaataactgggatgggcctgaggctttaaatcctgtcaccttgtgacacttaaaagagttcatgattattccaattaaacaaatagccgtgaactttataacacaaaattgtccacttaagaattgaatcggggggcagttccaagacggctgaataggaacagctccagtctacagctcccggcatgagtaacgcagaagacaggtgatttctgcatttccaactgaggtaccgggttcatctcactggggcttgttggacagtgggtgcagaatggtgggtgcaggacaccgagcatgagccaaagcagggagaggcatcacctcacgtgggaagcgcaaggggtagggaattccctttcatagccaagcaaagctgcgacagacagcacttggaaaatcagtcactcccaccctaatactgctcttttccaatggtcttagcaaacggcacaccaggagattatatcccgcgcaaggatcagagggtcccatgcccacggagccttgctcatctctcgttgctagcacagcagtctgagatcgaactgcaaggcagcagcgaggctgggggaggggtgcccaccattgctgaagttcgagtaggtaaacaaagcgatctggaagctcgaactgggtggagcccaccgcagctcaaggaggcctgcctgcctctgtagaccccacctctgggggcagggcatagccaaacaaaaggcagcagaaacctctgcagacttaaatgtccctgcctgacagctttgaagagagtagtggttctcccagaatggagtttgagatctgagaacggacagactgcctcctcaagtgggcccctgacccccgagtagcctatctcggaggcacccctcagtaggggcagactgacacgtcacacggccaggtatcctgctgagacgaaacctccacaggaacaatcagacagcaacatttgctgttcagcaatattccctgttctgcagcctccactgctgatacccaggcaaacggtctggagtggatctccagaaaactccaacagacctgcagctgagggtcctgactgttagaaggaaaactaacaaacagaaaggacatccacaccaaaaccccatctgtacgtcagcatcatcaaagaccaaaggtagataaaactgcaaagatggggaaaaaacagaacagaaaaactgaaaattctaaaaatcagagcgcctctcctcctccaaaggaatgcagctcctcaccagcaacggaacaaaacaggacagagaatgactttgacaagttgagagaagaaggcttcagatgatcaaacttctcsragctaaaggaggaagttctaacccatggcgaagaagttaaaaaccttgaaaaaagattagacaaatggctaactagaataaccaatgcagagaagtccttaaaggacctgatggagctgaaaaccatggcacaagaactacgtgacgaatgcacaagcttcagtagccgattcaatcaactggaagaaagggtatcaatgatggatgatcagatgaatgaaatgaagcgagaagagaagtttagagaaaaaagaataaatagaaacaaacaaagcctccaagaaatataggactatgtgaaaagaccaaatctacgtctgatkggtgtacccgaaagtgaaggggagaatggaaccaagttggaaaacactctgcaggatgttatccagagaatttcctgaacctagcaaagcaggccaacattcaaattcaggaaatagagagaacgccacaaagataattgtcgagaagagcaactccaagacacataattgtcagattcaccaaagttgaaatgaaggaaaaaatgttaagggcagccagagagaaaggtcgggttaccctcaaggggaagcccatcagactaacagctgatctctcggcagaaattacaagccagaagagagggggggccaatattcaacattcttaamggaaagaattttcaacccagaatttcatatccagccaaactaagcttcataagtgaaagagaattaaaatcctttacagacaagcaaatgctgagagatttttgtcaccaccaggcctgccctacaagagctcctgaaggaagcactaaacatggaaaggaacaactggtaccagccactgcaaaaacatgccaaattgtaaagaccattgatgctaggaagaaaccgcatcaactaacgagcaaaataaccagctaacatcataatgacaggatcaaattcatacataacaatattaactttacatgtaaacaggctaaatgctccaatcaaaagacagagactggcaaattggataaagagtcaagacccatcagtgtgctgtattcaggaaacccatctcacttgcagagacacacataggctcaaaataaagggatggaggaagatctaccaagcataccaagcaaatggaaaacaaaggcaggggttgcaatcctagtctctgataaaacagactttaaaccaacaaagatcaaaagagacaaagaagaccattacataatggtaaagggatcaattcaacaagaagagctaactatcctaaatatatatgcacccaatacaggagcacccagattcataaagcaagtccttagagacctacaaagagacttagactcccatacaataataatgggagatttaacacctcattgtcaacatcagatagatcaacgagacagaaacttaacaaggatatccaggaattgaattcagatctgcacccagcagacctaatagacatctacagaactctccacctcaaatcaacagaatatacattcttctcagcaccacactgcacctattccaaaattgaccacatagttggaagtaaagcactcctcagcaaatgtaaaagaacagaaattataacaaactgtctctgagacgacagtgcaatcaaacaagaactcaggattaagaaactcactcaaaactgctcaactacatggaaactgaacaagctgctcctgaatgactactggctacataatgaaatgaaggcagaaataaagatgttctttgaaaccaacgagaacaaagacacaacataccagaatctctgggacacatttacagcagtgtgtagagggaaatttatagcactaaatgcccacaagagaaagcaggaaagatctaaaattgacaccctaacatcacaattaaaagaactagagaagcaagagcaaacacattcaaaagctagcagaaggcaggaaataactaagatcagagctagctaagctaaataactaaggagatagagttattaaaacccttcaaaaaatcaatgaatccaggagctggttttttgaaaagatcagcaaaattgatagaccgctaccaagactaaaaaagaagaaaacagagaagaatcaaataggtgcaataaaaaatgataaaggggatatccccactgatcccacagaaataccaagtaccatcacagaatactataaacacctctacgcaaataaactataaaatctagaagaaatggataaattcctggacacatacaccttcctaagactaaaccaggaagaagttgaatctcttaatagaccaataacaggctctgaaattgaggcaataattaatagcttaccaaccaaaaaaagtcgaggaccagacagattcaccaccgaattccaccagaggtacaaggaggagctggtaccattccttctgaaactattccaatcggtagaaaaagagggaatcctccctaactcattttatgaggccagcatcatgctgataccaaagcctggcagagacacaacaaaaaaagagaaccttaggccaatatccctgatgaacatcgatgcaaaaatcctcaataagatactggcaaaccaaatccagcagcacatcaaaaagcttatctaccatgatcaagtgagcttcatcactgggatgcaaggctggttcaacatatgcaaatcaataaacgtaatccagcatgtaaacagaaccaaagacaaaagccacatgattatctcaatagatgcagaaaaggcctttgacaaaattcaacaacccttcatgctaaaaactctcaataaattaggtattgatgggatgtatctcaaaataataagagctatttatgacaaacccacaaccaatatcatcctgaatgggcaaaaactggaagcattccctttgaaaactggcacaagacagggatgccctctctcaccactcctattcaacatagtgttggaagttctggccagggcaatcaggcaggagaaagaaataaagggtattcaattaggaaaagaggaagtcaaattgtccctgtttgcagatgacatgactgtatatctagaaaaccccatcatctcaccacaaaatctccttaagctgataagcaacttcagcaaagtctcaggatacaaaatcaatgtacaaaaatcacaagcattcttatacaccaataacagacagagagccaaatcatgagtgaaatcccattcacaattgcttcaaagacaataaaatactaggaagccaacttacaagggatgtgaaggacctcttcaaggagaactacaaaccactactcaacaaaataaaagaggacacaaacaaatggaagaacattccatgcttatggataggaagaatcaatatcatgaaaatggccatactgcccaaggtaatttatagattcaatgccatccccatcaagctaccaatgactttcttcacagaattggaaaaaactactttaaagttcatatggaaccaaaaaagagcctgctaacaaagctggaggcatcacgctacctgacttcaaactatactacaaggctacagtaaccaaaacagcatggtactggtaccaaaacagcgatatagaccaatggaacagaacagagccctcagaaataataccacacatctacaactatctgatttttgacaaacctgacaaagacaagaaatggggaaaggattccctatttaacaaatggtgctgggaaaactggctagccatatgtaggaagctgaaactggatcccttccttacaccgtacacaaaaattaattcaagatggattaaagacttaaatgttagacctaaaaccataaaaaccatagaagaaaacataggcattaccatttaggacatagggatgggcaaggacttcatgtctaaagcaccaaaagcaatggcaacaaaagccaaaattgacaaatgggatctaattaaactaaagagcttctgcacagcaaaagaaactaccatcagagtgaatgggcaacctacagaatgggaaaaaatttttgcaatctactcatctgacaaaggactaatatcctgaatctagaaagaactcaaacaaatttacaagaaaaaaaacaaccccaccaacaagtgggcgaaggatatgaacagacacttctcaaaagaagacatttgtgcagccagcagacacatgaaaaaatgctccttatcactggccatcagagaaatgcaaaacaaaaccacaatgagatatcatctcacaccagttagaatagtgatcattaaaatgtcaggaaacaacaggtgctggagaggatgtggagaaataggaacacttttacactgttggtgggactgtaaactagttcaacccttgtggaatacagtgcggcgattcctcagggatctagaactagaaataccatttgacccagccaacccattactgggtgtatacccaaaggaatataaatcatgctgctataaagacacatgcacacatacatttattgcagcactactcacaatagcaaagacttggaaccaacccgaatgtccaacaatgatagactggattaagaaaatgtggcacatatacaccatggaatactatgcagccataaaaaaggatgagttcatgtcctttgtagggacatggatgaagctggaaaccgtcattctcagcaaactatcgcaaggacaaaaaaccaaacaccgcatgttctcactcataggtgggaattgaacaatgagaacacttggacacaggaaggagaacatcgcacaccagggcatgtcatggggtgggaggaggggggagggatagcattaggagatatacctaatgtaaattatgagttaatggatgcagcacaccaacatggcacatgtatacatatgtaacaaacctgcacgttgtgcacatgtaccctagaacttaaagtataataaaaatgtatacatattaaaaaaaaaaaagaattgaatgaacatggaacyatttgaacttgcagaaaatgcaatccagacaggcaaaactttttaagtagaacaaaaaaggaagactgagaagaagggaaaaggagagaaggaaaagaaaagaagaaccataatcatgaaaaactgtcaggtttcscgtttgggcttttgttttaaaatatcagacctctcagataaattagtaatcctcatcttaaaataataagcagtgactagtaatcatgacattttgtcatttatataatagacatagttatttgtaattcagttatgtaactgatgttttccctataaatctgttaaagcaatttaattaacagctgtcaaatactaattgcaaatattcatctcattattttagtgttgtcatagaatatcatgtgatagtaatatcagatcttggggtggtctctcaggaagaaaaatatatatatatacayaatgtatatatgtacttatatacaatatgtgtatatacacatatatacatacgtaaaaataaatattttttgttatttaaattaataggcacaaattataaaatagaatattgtgatttcatatatttctcacttttaaaaccaaatatggggaccaggttcacttgctcatgcctataatctcaccactttgggaggccaaggcaggaggattgcctgaggccaggagttcacaccagcctggaatatgtagatcccaactccatctctgttatttaaaataaaggggaggggacttttattagagaatgaaataacccagcccattttgtaaggagaacatttgcacacaaagtaaaaacaaacaacagacccctttcagcctctagtttccctgtcaagttatcctcaaggggaaagatttacatctaagacaacatttgccctctcacttgcaaagcaacttaactcagtatgaaaatcaatgccagagatggaatgaaagtagaaaatcagctaactatagaaatcaaaaataaactttaaatacatcttatggaatatactgctgtggaagtgtctttcagcacaattgaactcccaaatatttgtgtctttcatcctcattcaattgaacaaatatatacaaatatgtattgaattccttctgtgtgccaggcattgtgctaagaactgaggactccatagtccctaccgtcatgaaacacagtttcatgaagtctgctcaaatgagaaattctgaaggaagtaaggtgatgctctgttgcactcrtaatttgcagtcaagtaagagttctcatgaatataaaaagatgctcggatctatacaatatatagaatgctaactcacactcatgatcaaaaccaggaagggccrtgttgccttgtgacaatattatgagctttcaaaggaaaagttatggtcttctgtcaacattaacccaataatctcttttctttaaggtgaggaaatgaaaaatgagggctatggaacatttaaatccatgaataaatcagaaactttaatagggaatatgatttaactttctcctggggatgccaaaaaagttcaatagatgcatataagtcatgaaatgtccaagaaatagcaaaaggttaagtctacagctgcctggcatttctatagctataaacaagtccaaattacagatctatacagcatccatactaaaacgtgagtcttaaacattaaataccctaastcccatttgtgtcaacattacacctcatgttctgcctgccttgctctctgaaaatgatattttcccttgtggataggcctaaatgtgtggctgtcaggctgagatttataaaagaccttcaggttggccaagaattggttcagaatctaagagccagccagatgtggtggggactgagtatagtttctatccatcatttgtccgggggaaagcaggaatgagaatcagaygactgttcatgatgaataaatgtgtggatctgaaatttataggtcatagatgagatgagagcatcagaaaacatggacagaggccaccgtctctgctgccaactgagaaaggaaacagcaagaggaaaccccactgtgtgttggctctgtaaagagatagggatggccaatgtaaagacagagggaaaaccagcaagggtcacaggtgggaactggcgcagtctttcagacctccccactaacaaaggtcaagtaataagtgtgtaacaaactattctgtagtgaaaaaactgctgtattaaatataatagcaacttacttttgctattataattacagtccttttaataggattattctttcttctggggagcatttataaagataagatgctagtttgaaaatgggaggagagagagctaaattactctgcctaattgaggagaaaatttcagatatcctgaggcaatgggggaggggaaggaacaaagaaagggcgaaaagaaaaccaggtggtggaagttccagcttgaccagagggattaatatgtagattttaaacttgtttgctgtttagtttactttgtggccctcccacaactctctacaacctcagtatggttctggtgtgagcagttgctttatatccatcattgcttttttattggggggggttggtgtttaaattaagatagcccagacactttttggaatatctaggatgaacttagataggaacgttatggtttctttaggttggttcctttgcagaaatttagtctgctgcctaaatggcaatatcgacatctatttgataaccttattttgaattaaaacagagctcttcatactctgaatctcaaatatagaaagctcagcttgctgtttccataatacctgcaccatgtcaatctgttcagagagggaacctggaaaaaggctgtctgtgggactgagctgttttgaaggatcttgaagttaagtccttactgtggtctgaagtgaagctgtcaacactctgggtcgtaagcccagggctcaaaataatgtgagctgctctgcttcccagataagtgcctggttttcatcattctggaggcatctcaaaacctttgcaagttgagaacagtatcataaaactgcgtaaatcacagactgcttgtgagcctcaggtcctgggaaacagtaaagacttgagctggataagaatttgacaagtcttcattgtggtccatttttatctgggaccatgacaacattatcccaaagagatgggatcattcctttgcctagagctccctcagaaaagatttcaccactttcctcactatcaagaattcctcttcagatcagtctaaatgtctcatgggctaaagaagtaatacgctctgactgcagagcctgctgctttctccaaaattagaagctttctccattagtgggaatacatgccacaatccatcacacatgtgacacatctgttgatacttcttatcttgatcaagattgaaaataagagacactaacatcacggcataataggaatgtgtattcagtgcttgataaatatttgctgagccagtagtcctttttgcaactctgaaatgcccttccctgctcctgaaataacattgagaattaatacttcagcactggtcacccacttagcaagcaaggaaaagtaatggctagtcagcaaattgtttatctctaaaacagtctagatgtctgttaccactaccctttaaatcacataaaatgaataagctcttcgtttaattgctgaatctgaaagccactgaaaagcatatgtgagttcttcgcaattagaatgattagaagcctctttttggatgttctgtaccatgcctagaacactgggaatacttgactatatagtattgtcagtaaaacctgaaaaggagaaacaagtattcttagcaacagttttactgtggtctctgaggagtatacatctgctttgaatgatgccccgtaacacaaaccgtgatttccaaggttacacttcaaagaatcccactgttctctttgtgaaggatatttctttttaatagtttgttaaagaacaactgtgctccagctgagatatttaacttagaaaatatatgataagctctgcaaatgtgccatttctctgccacagtttagcaattatctctctttttatatcagaatgatattaaaatgaaatgctatcttgcattggaatcttgccataaatgatgagttcatattaacccaacttggtgagtgattaattctttattgtataattcatgatttggtttttattattatgagtggtaaaaaataaccagtattatctaatatactgcaatggacttctgaatcacacagacctattttcatactgtaactcagcacttagaattaggttgaagcatatgatattgctgtctttatagattaaaaatggtccaatatcagcattttcatgtgattcaacctaatagctctgtgatcatgattaatcttcttaatctctctgagcttcacttacttacctgaactgtaactataatggctcccagaaatgttataaagattgaatgagatagtatatccaaaacttctaatatcatgcctggcacataggtgcatagtaaatgccaactttataattgttgtcacatacaaattattttatggttttggtccattagttatataaatttttattttgagagacrgaagagagaatgacacactaatagtgcaggtttagttaaaaatcaccctttgttaaaaataatacttatacttacacattaggaaggctaaacaatatcttattacctgaataagttattaaactcagagaacatgaagttagatgcagttctttttatgggatgtcaaatcattttttgaataagaatttttccaaaaaaaatttacactacaaatagtctgagaagactaagcactgtgaagtaaatcgttagcaaatcaaagagctgagactaattcaagagcaggtttcgaagtctgactgcagaatctcaccacaggaaatcacttcattgcgtttcataaatactttatatcagttagcatttttaactctgttcagaatcaccaatccatctttttgcccagatgtgacattattgagtaaattgagcctaaagagtcctttggtttattaccagtaaatttcttgttattaagtgagctgagaaggcttttatatgccctctaaaatcgtatgtgggccctgctatttttaattgtcattgcccctacagattccatatatgtgctcatttatataatgagaagaatccatatgtactgtacaggacattgaattccctgcataatatgaatgaatattaagcactggaatcagaaaagaatctcttgaaattccattaatatttataactgatctgtgggactaggggaattctttagtataaaatattccaaattcatgtttgtaaaaaatgaagcatccttgaatttaaaatatagttttcctcactaaaatagatttctattataaatatagcaagtgaattcttgctgttgttatatatccttacattatttaacagagtcaggaaaggcactttagaaccttgaggtcagttgaacctaattcactcttttttattaaaaataaaatgcctatttgtttactgtattcataatagtagtttctcgggagtggctaacaatatcataaagattatagtccctctgatttaagagcttttgccaaaatacccagatccaatcgttgtttttcctgtcaaaatataacaggaagagtaactccatttgtcttattaggaaagaagataagaatgtccacagtaaaccagtagatttcctccacaaaaggagccaggaatattttgacactatcataaataaaaatttcaccatctgcttagtctcaatttttcaaattcagcattttataatgtcaaggcaaaaacttctctttactaaaccaaatggatgacagcaaagctttaggtcaaatcccccagccctgagatgtattttgctcatttgagcagctacaaatctaaagctgaacccaattatgcaactgcagtgataaagtgatatccttagaggcaaaccagtatgctggctcaaggggaaaaccttgcccaattcaggaaaatagtccaatcataataccacttaacacaaaatttcatagagggcataatgctgagtaggccaaaataacaatgtataataaggggtggctgcatactgctggtgagtattgggaaagtggagcattttagtggactgtcatcatagaaaaccagggcttttttaggcattgtggaaggagaactccagtgagagcctggaaaaccaaatgtgagttaggacaaatcctctgctccagggacgtttcaattaaaggactattgaaaccctttcgtttttccttttggcagtgcaaataaaagctgcaacagactgaaaatctccttgtgtcccaggataaatagatgttttcatgaagcttgggaggtgtcggccaaagaaaatcttctcccaaacagatcctgaaatatatgcagtctcactaaatgtggccttttctttgaatggacagaatctatggaatttttaaaggaacgaatacaaggaaaatagaggaaaattatcccagccctggacagaaagtagaattcagaatatatttttgagagttgttttactccttttttgttgtttttggaaaatatatatatatgttaagatcaaacttacgttcatcactggctcttgattgcctactttcattattctgaactttttcctcccccatctttcccatttttgaaaatggagccaccaatctcctagcttttttgggcaaaaatccgaaatcatccttgatattttccactcctgcaccacaatatgcaatctgaaaccaaatcgtattgatatttttttcaaaaatagactttgaattcacttctcttcatcgtcactgtcactgtcaagacactgtcttattttaactggcttttccatccttgcccctttccagttcattcttcaaataaccagaatggttttcttagagcacacatctgttcatgccactcactttcctgttcaaagccctttaatgccttccctttgcacatgagattaaatctcacatccttaacatggctggcaaggtcctgaatgatctagtacaggggtcagcagatgttttataaaggccagatactttagactttgcaagccatacagtctgttgcagctactcaaatctactgatgtaacccaagcaatagacatataaaagaatgggcgtggctgtgttctaataaaactttatttacaaacacaagtggcaggccagatttggcctgaagcccatagtttgccaacccctgatctcactatctcctcactccttagctctccagtcacacctctctttcctcccatacttttttccacctcgagacctttgtctattctgttctctacctagactgtctcagtttaaatgtcctttccacagagggcattcctgaagtcctaatttaattaaaatggtttctctatttyatttttatgatttattttatacttatattttaattttctgtaactatacattgatttatgtgattatgtgtttaatgcctgttttaccttcaagttgtaaggtccatgaattaagaaattggatatcattgtatctctagcacctggcacatagcttaatacacagtaaattctcaatgaaatgtttgttaagtaaatagtgaattaatgagatctgatcaaaacaagggagcagaaaacaaaagataacaatttgggaatctgagatctgaaatatgagatgcttttcttgagttcatttattcctaaggtaggtcattttaaaagttctatacttgaaatagggaatatgtattaaccagggtgatgaataggcatgtcccaaatcttactgctacaaaggcgcttgtggctgacacactgtggcttacacaaagtcagatgcaggttgagcagctctacttcatctggtagctctgccacttggaagataagccccaaaagtcagcctggaaataggaaagaaatggaggaagcacaagagctttgaacagctttggcctaaggttgatacactttactttccctcctaatccattgaccaaaaaagtattaaaagtaatggtaaaaccacagttacttttgcaccaacctaatagttacatggctgcaactttcctgccaagtagactgggagtactyagggagcacctagaatatgtggtgagtagaaactatctttttgagagaatataaaaaatcttttaaatatatttcctaatattaaggaaaattggttatatgaaaatactataaacctcwcagattagtatgaaataggttatatcttttaccatttgtaaaaagcttttcttaagttttattttacaatttagtacatttaagctagcatctcacttggtagtaaacctgggtgtcttcctctcatgcttccctcaggctgttttccacaaaaccctttaaagtatggtagagcaaaatactcatttttaataatttcatgttatgagccatgatttttctatgtactctatgttttggttacttttaaataattatatggcacgtttctttttacaagtaaaagatcaaaataaaaaaattgactgtagtgaaatgatcttcacaagaaaaggaatatatatgtatgttctctttgcctctgaaagtacttatgtctacataagtaattcattgtttatacattcagtgtctatttattgcactccatgggctaggcattgttctaggtattctggtgaatgatacagccaatattcttgtttgttctcattctttttttttttttttttttttgagatggagttttgctctcattgcccaggctggagtgcaatggcatgatctcggctcaccgcaacctctgctttccaggttcaagcaattctcctgcctcagcctcccaagtagctgggattacaggcatgcaccaccacacccggctaattttgtatttttagtagaggcagagtttctccacgttggtcaggctggtctcgaactcccgacctcaggtgatccgcccgcctaggcctcccaaattgctgttttttgttttttttttttgagacagaatcttgctctgttaccccagctggagtgcagtggcacgatcttggctcactgcaacctctgcctctcaggttcaagcgattctcctgcctcagcctcccgagtagctgggattacaggcacgtgccaccatgcccagctaattttgtatttttagtagagatggggtttcaccatgttggtcaggctggtctcgaactcctgacctcgtgatctgcccgcctcggcctcccaaagtgctgggattacaggtgagagccaccgcacccagcctctccttgtacttacattctacagggaatattaaaatatattcctgcataataataaatagttagaattccttataaataaaatatcaccatgtttagtgttttccttttttcttttatttctacaaatttctggagtatatatattttaaagtttatgcaatggaatgtttattggattgaagaggtagtatcataaaacaatgtctttttatctgactggtaatcctagttgggtctttagaaatccttgagttacacttacaggaatgtaaaaatgtaccttcttttaaagagacacttgtaaactttgagactatatatactccatcaaagagaaaggaaatgatcctctaatttgaaatcaatctcctgaggtttatcctccatacgaaagtatttcataggagagatctgtctcacaaaaccaaatctatttcctgcacttgcaagtaaagtcagaagcctaaaaaatgatggagaggaatgaactctaacatgagttcttggccaagtggaaaacttctctggttcagaacttcctaaggcaccctgcagcagggattctgtagagctacaaggatttttatcctgtgcttgggaacctggaaatctcacctccttggttttccacactggaaaccttcaagatattgcttcctctgtaaaggtctgaattattgcaagatattgagaatttccaattcagtagttagatgtgactggaataatcaaagaagtctcaagtcctaagaacgaggtgtagggagagaatgttatctaaaacgccatgtgatatagaaatgcatatgagtcttgagctgtcatttacacaatgtatatctgggtgtcagggaaaccatggatctgcctcacaggtctgcctcacagcccaacatcagcttctgcctccctcttgctgtgtcagtacatacatacatattcacttgtgtgtgtgctaagtgtgtctcatcctttagcagaacttatttctatatatgaaccaaagagaagcatttatagtggaatttagaataatttgtatcaggagtttgaaaaataaaaagaaatgaaattaaaaactagaacaacattgctcaatctttaaaacaccacacctgtaatcttaattcagcttgtccctggtcactgtgagccaggtaccatgttgtgtgctttacatgttttattgcattttatcatcacaacaaccctatgaggtaaatattattatccctattttatagttgagaaaactaaagtttagagaaattaaggaagaccatgacttcaacctgagcttagtttgtctccaaatcgtacttttttgataaaagtaaaaaaatctctgccctgaagaccttaataaaaaacaccccaggaacacttacttctttccccaccacctactctgcaacacattgaaattgactgatacctagaaactagagtcttctctttcatatcctacctaatctatgcattctgtcatttgtataaagaaaatagctgtagcttttaaaatttatttgctcaagaagagattataacaccaaatgtggtagttcaaacttaacttgctcccctcacatatttcccagatttgggttaatgaaatcctcagtccgtgtctctaccacaaatcctcacattccacagccaccaccatgtctaccatccaaaatcctggaaatggaagaaccttagaaatctagctttctggctgggcgcagtggctcacacggtggctcggcactttgggaggccgaggcgggcaggatcatgaggtcaggagatccagaccatcctggctaacacggtgaaaccccgtctccactaaaaatacaaaaaattagccaggcatggtggcgggcgcctgtagtcccagctactcaggaggctgaggcgggagaacggcgtgagcccgggaggcggagcttgcagtgagccgagatcgcgccactgcactccagcctggcaacagagcgagactccgtctcaaaaaaaaaaaaaaaaaaaaaaggaaatctagctttcctactgtcactcacatgatgagtgatattcaaactcatggcatgattcatgaagataactcaagttattaggaatcccaagaagctcagtgttctctcgtgctcaagagcacgtatatcaaactacatgtgagcaagagtaatgttattttagggataaacttggattcatcttaagatatctttaaaaagtattataagtcatccagattctgtatatatcaatttacctgctgttagttacacatgactttccatggatctgtgacgcttgtgaatcacttgtccgtttcagtatgtgaattgcatacatgtgctatgtcaagaaccgttagatagtagcagagctaaactagaccaaagctttcttaaataatgcagtgctttttcttaccaaactacaaaatagtccgttgtatttaaactcaaaagtaggatggaagtgaaggcctaaaattcacagtggctcaaggattgagaaagctcagttgaagggaagcgtttccatcattttggccctgcagtttcttagttttagtctcttctctaaagacacaaatttccacactagaaaaatcaaggagtggttgggaaggatgaacttttcttctcaaatcatcactgccaactgatttttagactgctggaaaattaaggctgaaagaataagatggacttctgcaacccctttacttcacatatgaagaaattgaggcccagaagaagtgtttccagtaattatttggtcatgctttctaaaggaaatagtcaaatctaatcttctgttttacactagagatataaagtaagatttgggggagatgggaggaggagaaggagagggaaaagaaaaagaaaataaaactgatatttgtaagaacgagcataaatatgccagacacagtactaaaggcttcacacactagaatagtttaagttgcaagtgacataaaactcatctcaaatggcttaagcaagaaaaggagtggggagacttattattgttcctgaaaaatccaggagtaaagctataggcaactctagatagattcgatcaacatcatgcaaacttagcttctgctcaatttcttgactctactttctgctgcattggattcattcatgatgacaccaggtagtaccaaggatttcaatgccaagtatgattatttttaaaaaacagagagagagcaagaccattttcctcaaagcacaataattttggaattgagtcttattgacctgattggcctggctttagtyatgtacccattatccagccagtcactgtggccaggagggatggataaactgattagttgtaacctaggctactttcatcaaggctgaaagtagaggaggggtgattcccctaaaacaaaatttggataatgttcccccaaaagaggtagtggatgctgagcagctgacatccaccacacagacgttctctcatctggtcctcctaactagcctggaggtcagtagttagttagctacactacatcatgccatccctcaacagggtcctggatttcttgcatctattatgtagattaccagacagaagacctttaccatctgtgaactgttttgagccccttcatgagacccaaagccaatccagtaggaaaataaagattaaaatcaatttgtgagggcaatgtatttttttctccctaaaatagggagtactctctgccccatctctcaggcccagccttgcctgtcatccctcacccctatgtcagcctaatgacctaatgtgtcaggcttaatgacccctaagtcagccatttccactgatcgcttagtctattataaagtcttatctagtgtgatgatttaacacaacacctwgatgttacatctactcygctctcagggctttagaatgcaactacaatcagtaggaaattatccctagttgcccaacccagccccagctcttgccttcctaccctgtcccatagcctctatccagcacccgaaagtattgctaaaatagataacattttgtttattattcaggtagtttatattgctggtgaatgctatcatttactttctcagctgacgaagacagaacacactcttgtgtgaacaatttttcattgtttactggaagattatttcctaaacttgtatacatttacttatgttgtagctatggagaaacatcttctgaaactggaagtaggaactttaggggagttctcattttattttcaattcatcgtgtggggttttacacacttgtttatatttaactaaatgcctatcagaatggttatcttatgtggagttgtttagaggatgtctgtgtgtcttgtttaaacataagaaatccaaacttatgtagccttgaataacaacgattacaaacatacatgcgtattagttttaaaacttcccttcctagcctttatttaaaatggcaaatgcatacatccacagatctattagtacccacaggcctagaataaacaagtcaaagacctaaagaagaaaagaagctaataggtgtgtcggttttttaaaagctagtatttccacctcaatgatagaaaagtttcttagggttgcctatggaactagagctgtaattgctctgctgtgtgcattcaatgctgtcagattctaaatgtgtcatagctttgtccagtactgctgaccctgccgtgttcattcagtagatggagaaaaatcttgctttatctatccatacttcttargtcctgagaacagaactgatacctcattcattcatctmttcatccaagtattcaacaattattcattgcttaccaattgccaaaccccaaagtagttactattagaaatgtaaaattgcatttctaaaatttaatagtaaaagaataaaacactgaataacaatcatcctagctttatacaaaactgacattttcaagtctctttatatttattgctaaaaatcaacccatagtgaggctttgtttggcaggaaaggatcacagagcaacctctcttatacttycaaacccacaatgtagttattttgaacaaattaaatctgcgttaccacyacattccacctgcttcttatttttaataaatgtgtctttgtctaatgaactaatatagctaatgaggcagctcttagccaccattaagtgaggattataaaatttttggcctacatttagaaacaattcacatgggccatctgaaatgtaaaagaggggctgggtgtggtggctcacacctgtaatcccaaaactttgagaggctaaagtgggtgaatcccttgagtttaggagtttgagaccagcctgggcaacagagcaagacccccatctctataaaaaataaaataattagccaggcatggtggcacacacctggcagtcccagctacttgagaggctgaggtgggaggattgcttgagcccaggaggtggaggttgcagtgagccaaaattgagccactgcactccagcctgggtaatagagcaagacattgtcgcaaagaaaaaaaaaaaaaagtaaaagaaaagaaagctcaaatcaaaaagtcaatgtaccagtatacaatgtattctttattatggaagcttatgcttaaagtttataaatcaaattcactgctaaatgtgatgaaagtataaataaatagatattttgatagtttcactttttaaaataaattttaggaagaatttgaagatgactggaaagactttgcttattttaatgtaagttgttgaaattttgactgagttggtatctcacgttaattaatttgttaattaactacatatgtttagtttgtggcttataagatagcagttttttccttctgggacaagagttatcaactcaatgaacttgaactacagaggaaaaattgcttgctcatttttttttaagagattgaatgtttttagccttagacttgattgagctgtgggtagattcagatgatactaatcacctgtggttgaaatgccttcaactcaataaaatcatgatttcaagggaaaaaaaagaaatgtaaamtaagacaatatccataaattcaggtacccctcaatctagaggggagacagacaaatagacaatgaaaatacaatgtgataaatactgtaagtgtggagagcactttcctcccatctacattgttttctgaaatctgcatttcccattgatgaagtgaggtacaataaaacctcagtaactctaatcctttcaaatgaagtgagtcaggcttgataggttggtttttcaaatagcatttgatgagcacttattgtgtgccaaaccctgaacttctcactttacatggattgaatctgtacagtaatcctgaggttggcattgttgtttctagtggggcaagaaaaagtcagatctttgggaaagagtttacaaattggatttgtatgcaaaaatgccacactcatacataactaactgaaaactaaaaataaaataagatatgttttaaactaacagattagcaaacattacccagtgttaagaatgtggagaaataagagctctcatttactattggggggattgtgattttgaagggccatttagctatatcagaaataattttaaatatgcttaccctttgactcagcagttctattactaggaatttatcctggagatagtctcacagaagttcaacaaaggtatgtgaattgtcttagtcaattagtttgtgctcctataacaaaataccttagacagggtagtttctaagcagtataaatttattgctcacagctctggagactgggaaattcaagatcaagatactggtagatttgacatctggtgagggttcactctctccttcagaggtggcgacttcttgctgcatcctcacacagtggaagggggaaacaagttccctcaagcctcttttgtaaggtcactrgtcccattcaagaagtcgtagccctcatgaccaaatcacctcctaacggccccasctctaaatacgaacacattggaaattagatttcacatacgaattttggggagacacaaaccttcagaccataacagaataaatgtgtttgttgcagcattgtttctaacagcaacaaactggaaaaaaaatgaaattcccagctctgaaagactagtaaaccatggcaattcatgttattaaattaggtaggtccccatgaactgctagaaatctrtccaagatatgttgctttaacaaaagcaagatataaatgatagctatggtaagattgtgtttccgttattaaacgggaagtaaatatgcgggctcatttgtagaaaatttcaggaagggtattaagaaaccactgacagtagttaccctggagaatggggctgccagttctgataccaaagcagtacttttattttttcactttatacactttcatcatgtttgaataactttttaaaaagttttgtaattcagataaaagtagwtttaaaacaccaaaaataatttaataatatctttccattaaagatttacactgtacataaccatatcagggaccgagaagttccacttaattttatttaagccaggcatttcaaaaatatattcgtccaaagaattttgttgttgttttgcctaataactattaatatgtcatggttcctgtgggaggcactgacttaagaaattacaaaacaacaagcagcctaaagtcatacaggcagggagtagggagacagaatttcagactcaagatctgaagctcaattgatattcctcaaaagtgtacaatcaggatggagaaagagacctgagttgcttatgctaaatgaatcatatcttgtttcttaggggtaaaaacattactccagaattttctataaatcttaaatggtacatcatagtttcctaggaagaggtaggtataaccctcagcaggaagaggagaaaaaaaccacacacttttttacttgaattatatttcctgacatttagaagggtgtcatttcacctctatcatttcccccttttaaaatagatagttaacctgtaaaaagggaagtaagggtttgtcaggcaattttggtgtctgctgacaagaatacaatttccacattcatttatctttctgaatcttttccaggccaattaccttctcctatcacttctttagatcttataatccttaagtctcccaaatgaggctgttaattcaaacctcttcaacggttttaactagatatgtaaacaactgcttttatcaattaatatagccccctacctccagggacataatatggaagaaagtaaaacaagtacttttcctcaaagatgacagtataagagtgaaatatgtaaagggaaggactgtgagtaaaaccatcttttctccgcatggcccatgccatcatttcagaagtatttacttccagaactttactcttcaattaaaactgtaaaattgtgttgaatgattataaatactacaaaagtccctgccgtagataaagttggaggtaacaaagttgcccaggacatatttggtgaggagtgttatcatagctgaattttggctgctgtaacctatatataagaactagatctgagatttttaaaaagcaagtaaaatctgcaggtggtccctctgaatagtgaggcctagttcttgacctgggaccagcagtagacacgcagccaaggaggtagaatgccaaaaggcagagagtactttgtgctcctttggcttggttctgctagcaaggcaagaaagaggagagagagacatcaggagcatgtttacttctctctcagcctccctttcccatctttctcccctctctctccctggctatcttttatcatccagggaaagttagattttttttgttggacttactgatatgattggcttgctcttcattacaggtgctgctgagcctgggagccatataaaagagctaaattgtagtaactctcrtggctagagggcagttgagccagccagttccaaatggactggagaagggcaaacgtatcatcaacctccaccgccatgagaaaggagagcagaccaccacccctaaaacagtgtggcccccagctccttgtccaacttctctcctcatgtgaatctgttttctgaactaagtcctcccctttacttagaacgttcatttgcacacacatcaatagtataccgtttagtggataatgattctgttattactttgcatgtgtttcatttcccccagtaagatgtaaactcttgaaagaccttaatactgtgtctcatggcaacaaatgccagacaccaggatgctcatttgactgaatcaataattgaagaaatatttcacccatttctttttggtcttggtctctaacattaaagtcttccactccttaaatttctttagtcctctatttccctgtcagagatataatttagagctggcctttgggaacgcaacctctgacccttgatacacactgccaaaaatttaatttttcagatggaaaaagtctctgatgtgtttgcatgtgaataagggtgtcccagggagtttgaacttttaatataaagttgtgagagcaaacctaggagcagagatgctgtatacctaagaaggtacattcttcatatggctacagaagtagaaaattagaaatgggtgagaaatgtgtctcagaagtggaaaaagaatacctaagttaattttttccttatatccaattttctagccaatattaaaatgcatttgttccccagtgctttgttaagtttctgttataatacttaatatggtttaggatttttttcagagataactattctggttcatcattattattaaatagtaccagcctattttaattactgtagctttataatgtatttaaatatatgacaaagcaagtctctactcattgaatttctttacaaaaaattttaaatattattattgtattttacctttagcgtcattttgtcaaattgtaaaggatgttgcataattaattaaaaatcatttttcttactagttatcactgatatataaggaaatcaattttatgtaaaaatatttcaacttgatcaagtttattggattcactactgttttcaaccatgttttccttctttctaataattatacatcttttttccattttttatcttattgtaccaaccagagcaatgttaaatactattggtgttactaagaattttagtttctgattttatttaaaaagcctatattatttaattataagatatgctataaaccatcagcttaagagagatattctatctcattttgaggaagttacttaacaaaatgtcttactgagatgccaaaccacaaacccacccttaagcagatttggtgccagaattcattctgccagcatattgtataaatctagttaaagtggtcatgggcaatattgccctaaggcctctggcagaaaccaaagcacgtttccaaaggaacattatttaaatgcaggcacaaagaatctttcagataaagttcctaggagcatgagctcacaatagaaatatatatgtattataaataaacatatataaagaaatatatatmgagagagataatataaaattgtgtgtgtgtgtatatatatagtgtgtgtatatatatttatatktatatatatatatatatatatctcaaaacagacagaaaaccatgcaattatgagcaatagtcgtccaacaagaacaacaacaaaaaaagccagagccaaccttataaagcctgaaaattttggaataaccagacacacaatatagaataactatgttgaatatgttggaagaaataagagtactgacagtatgactagggagaaagagactatcaaaattgatcatgcagatttgaaaaagagccaaatagaacgtttacaaatgaaaaataaaataatttaaatttgaaactcaaaggacaaattgaacatcaaaaaaaccacagatgtaaggagaatggtgaactaaaagataaatcacaaaaaattacacagaatttagcatggagagatagagatagaaaatactgaaaatagatcaaaatatgtgaagatagaatgagaatatctagtatatccctaattagaatttcatgaaaagaggttagagagaatgggaataaggaaatattgggagaactaatagctgaacaatttccaaaattaattacaaaattaagtcttcagattcagaaatcccaatgaagtcaacaaaggtaaaccaaaaaaaacctcaaatcttaaaataactgaataaaactgcacaacatcaaagacaaagaaaaaaccataaaagcagctagatataaaagaaaaattaactgcaaaggacctacagccaaattaagaaagacctctcaggctggacatggtggctcacacttacatcccagcactttgggaagctaaggcaggaggatcgtttgaggccaggagttcaagaccacctgggcaacatagcaagaccctgtctctataaaaaataaaaaactagctgggtgtggtggtcttagctacctgggaagctgaggcaggaggattgcttgagtctgagagttcaaggctgtagtgagctatgattgcaccactgtacttcaaacctgggtgagagagcaaaaaaaaaaaaagaaaaacaaaaaacacttgacttcctaacagtctcaaaagaagctaaactacattggtatcatatctttaaagtcttgagaaaaatattttcaatttattattatataccaagaaaaattatatttcacaaatgcagataaaataaagacattttaaggaaagcaaaatctgagagagttctatctccattagaagttcattttaagaacttcacagaatacttttggaagaggaaaatgagcctagagggagaatctgagatccaagaaagacgcttttcatgaataaaaacaaacattaactgtataagatagaaccaaagaaataaaataatcctgaacaataaaagcatataaacttagagttagtaatctaaggctctagtattatttaggagaaggataaaggtatttgttcactttcaattttaatttaatatgtatgcttaaatatatcagtattcrctaaaaatataactatataatttccaagatagtagaaggggaaaatggaataaaatgtaaacatggtttaatcaaaaagaagacttttttgaatttaaaaaagaaacgtgcaaacatgcatgctgaataagtgggacaaatacaaagaaaaaataccccttaaaaagcacatctagttgtaaagaggttcacaatgtattgttaaaatattcaaacatcaggaaactattaacctaacttagatataaagcaaaaattgtcaagactgaaagcagaaattggcaaatttaccatcatcaggagagatacttctttcaataactgaagtggacaaaaaaaatcataatgcaattcatgagaactatacaatcaatgagattgttctaattaacttttgtaaaatgttaattcaggccaggcacggtggcttctgcctataatcccagcactttgggaggctgaactgggcagatcacatgaggccaggaatttgagaccagcctggccaacatggcgaaaccctgtctctactaaaaatacaaaaattagctgggtatggtggtgcacgcctgtagtctcagccactcaggatgcgaggcacaagaatcacttgaacctgggaggcagaggttgcagtgagccaagattgtgccactgcactctagcctgggtgacagagcaagactctatctcaaattaaaaataaataaataaattggctgggcgcagtggctcacgcctataatcctagcactttgggaggccgaggcgggcagattgcctgagctcaggagtttgagaccagcctgggcaacatggtgaaactccgtctctactaaaatacaaaaatacatacatacgtacatacatacatacatacaaaatgtcaattcaatacctagaaaattctattcaagtacacataaaacacttataagaactgactatatatgaggccaatcaacaaatcttaaagtagcattgccttagtctattttcactctgctataatgaacttccctgagactagataatttataaagaacagaggtttaattgactcacagttctgcatggctggggaggcctcaggaaacttataatcatggcagaaggcaaaggggaagcaaccttagacctttctcatgtggcagcaggagagagaagagtgaggagtgaagggggaagagccccttataaaaccatcagatctcatgagaactcactcactttcacaaaaacagtgtaggggaaaccacccccatgatccaatcacctcacatcagtctctcctagacacatgggtattatagggattacaattcaagatgagatttgggtggagacacagccaaattatatcattccatccctggcccctcccaaatctcatgtcctcacatttcaaaacacaatcatgcctttccaacagtctgccaaagtcctaactaactcattccagcataaacccaaatgtccaagtccaaagtttcatctgagaaaaggcaagtcccttccacctacgagcctgtaaaatyaaaagcaggttagttacttcctagatacaatgggggtataggcattggataaatgctcccattccaaatgggagaaattggccaaaataaaggggttacagtccccatgcaagtctaaaacmcagcagggcagctattcaatcttaaagctctgaaatgatctcctttgactccatgtctcacatccaggtcacactgatgcaagaggtggactcacacagtcttgggcagctctacccttgtggttttgcaagatacagccctcctcccagctgctttcacaggctggcattgagtgtctgcagcttttccagctgcatggtgcaagctgccattggatctaccattctgggatctagaagatggtggccctcttctcacagctccagctagcttgagtttctccccagaaaatgggttgttttctatcgcatcatcaggctgcaaattttccacttttatgctctgtatcccttttaaacctaagttccaatttcaaatcatctatttgtgaatgcataaaactgaatgcttttaagagcacacagaccacatcttgaacactttgctgcttacaaatttcttccaccagatgccttaagtcatctctctcaagttcaaagttccacacatctctagggcagggacaaaatgccactagtctctttgctaaagcatggcaagagtgaccttcgctctagttcccaataagttcctcatctccatctgagatcacctcatcctggactttattgtctgtatcactatcagaattttggtcaaaaccattcaacaagtctctaggaagttccaaacttccccacatcttcctgtcttcttctgagccctctaaactgttccaacctctgcctgttacccaactgcaaattctcttccacattttcaggtatttttgtatcaataccccactctctgaggtaccaatttactgtattagtctgttttcacacagctatgaagacatacccaagactgggtaacttataaagaaaagaggtttaattgacttacagttttgcatggctggggaggcctcaaggaatttacaatcatggcggaaggcaaagaggaagcaagcttgggccttctcacatggcggcaggacagagaaaagagtgasgagcgaagtggggagaacctcttacaaaaccatcagatctcatgagaagtcactcactattacaagaacagcatgaagggaaaccaaccctatgatccaatcacctcacaccagttctctccctagacacatgaggattatagggattacaattcamgatgagatttgggtgaggacacagccaaaccatgtcaatcatagagagaccaacacaattgagatagaatttatttttaaaaatgcgtgttatgataagcagcatgtagttggatgtgacccattatgacaatctttttctttaaataagtacatttaacctattaatggttacaactgtcatgaccatgaatctgaggcagctacagtgcttacttcaaaacaaatgttaatttctgtttggagagtcggcaacttctgtagcttttgattgtaagtatttaatgcttgagccttctaaatcttagtgctctattagcagctgatgattataatgctgctgctactgctggggttgctgctgtttttatcaacattcggtgtcctgaccttcactcaaaattgtagactaaaaactgctgtggctatttcacactcattaggatggctattattaaaaacaaaaacagaacaaacagcaaataagtattggtgaggatgtggaraaattggaacccttgtgcatttctggtgggaatgcaaatggtacagcctatggaaaatgatgtggttatcaaaaaattaaagatagatttcccatatgatccagcaattccacttctgagtatctacccaaaagaagtgaaagcagggacttgaactgaatttgtacagcaatgttcatagcagcatcatttacaatagctaaaaggtagaagcaactcaagcgtccattgaagggtgaatggataagcaaattgtgacatatacatatggtggaatatcatttggccttaagaaggaaggaaaccctgacctactacaaaatatatgaactttgaggacatcatgctaastgaaataaaccagttacaaaaggacaaatactgtatgactccatttatacgaggtgcctagagtagtcaaattaatacagacagaaatagaatggtagttgccagggctggggaagggagaatagttacttattgtttaagggatatggagtttcagtttaggaagatgaaaaagtttaggagatggatagtggtcattgttggcttttaaaaaataaattcaggtggcacctgtgcagatttgttacatgcgtatattgtgtaatgctggcgtttgggcttctagtaaacccattacccaaatattgaacatagtacccaatagggaatttttcaactctctccccactcccatccttaccctttctggagtgcccagtgtctagaatgcatatcccattctttccatctttatatcatgtgtacccattgattagctcttacttataagtgaaaatatggggtatttgatcttctgttttagttttttttttttttttgcaaaggacacaatttcgttttttatggctgcatagtattctgtggtgtatgtataccacattttctttatccagttcacaattgatggacacttagcttgattccctgactttgctattatgaatagtgctgcagtgaacgtacgtgtgcaggtgtcttcttgataaaatgatttttttttcctttgggtagatacccagtagtgggattgctgagtagaatggtagttctatttttagttccttgtgaaatctccataccgttttccgtaggggttaaactaatttacgttcccaccaacagtgtataagcgttccttttctctgcagccttgccagcatctattgttttttgactttttaataatagccatgctgactggtgtgagatggtaactcattgcgattttgatttgcatttctctgatgattagtgatgttgaacatttatccatatgtttgttggttgcttgtatgtcttcttttgagaagtatctgttcatgaccttgccccactttttaatggggttgttttgttttgtttttcttgttgatttgtataagctccttatagattctggatattagacctttgtcagatgcacagtttgtggatattgtctcccattctgtaaattgtctatttactctgttaattagtttaattaaatcccatttgtctgtttttgtttttgttacatttgctcttgaggtcttagtcatatattctttgaatatgccaacgtccaaagtagtttttcctaggttttcttctagtatttttatagttgcaggtcttacatttaagtatttaatctatcttgacttaatttttgtctgtggtgaaaggtggtgttccagtttcattctactgcgtatccctagccagttttcccccacataatttactgaatagggtgtactttcttcattgtttgtttttattgactttgtcaatatcagttagttgtaggtatatggatttatttctgtgttccgtattctgttccattgatctttgtctgtttttgtaccaataccatgctgttttggatactgtagccttgtagtatactttgagtttgggtaatgtgatgcctccagccttgttctctttgcttaggattgctttggctaattagaattgtttttttctaattctgtgaaaaatgatgtaggtaatttggtaggaacttcactgaatctgtagattgctttgggcagtataatcattttaacaatcttgattcttcctctgtatgagcatgggatgttttccaatttgtttgtgtcatctatgtgttctttcatcagtattctgttgttctccttgtatagatcttttaccttattagttaaatgcatttttagatatagtattttttgtggcaaatgtaagtgggattgagtgtttgatttggttctcagcttgagtgttkctggtgtataggaatgcaactgatttttttgtgcattatttttgtatcctgaaactgtactgaagtcatttatcargtctaggagtcctttggagcagtcattargctttctaggtataggatcatgtcatcagctagcagagataattctacttcttcttttcctatttgtattacttttatatcttcttcacacctaattgctctgactaggacttccagtaatatgttgaataggagaaatgagagtagacatccttgtcttgctcccattcctagggagtgtattagtccatttttacactgctataaagaactgccagagataatttataaagtaaagaartttaattgactaacagttctgcatggctgggaaggccccaggaaacttataatcatggcagaaggggaagcaggcacttcttacatggcagcacatgagagagcacctgtgaaggaggaaccgtcaaacactttaaataccatcagatcttgtgagaactcactgtcatgagaacagcatggggaaaactgcccccatgacctaatcacccccaacccccgacacatggggattacaatttgagattagatttggttggggacacagagcccaaaccatatcggggaaatgctttcaatttttcaccattcagtatgatgttggctgtgggtttgccatgtatggctcttattatttttagttaagttcctttgatgcctagttcgttggagggtttttattgtgaaaggatgttggattttattgaatgcattttttgcatttattgagataataatatggtttttgtttatgtggtgaatcaccttgatttgtgtatgctgaaccatcctggcataccagaaataaaacccacttgatcacgatgaaatatctttttgatgtgcagctagattcaatttgctagcatttcattaagaatgtttgtgtctgtgtacatcagggatattggcctatagttttcttccttgattgtgtccttgccagattttggatgatactggtttcatagaatgagttggggaagaatgcctccgcctcagtgttttggaatcgtttcattgagattggtaccagcttctttgtaagtctggtagaatttggccatgagtctgtctagtcctgaatttttgtttttcttttttggtttgtagattttttgttactaattcaattttctagctcattattggtctgttcagcattttaatttcatcttgattcaatcttgtgaagttgtgtgtttccaggaatttatccatctcctctaggttttctaggtggtgtgcatagagatattcataatagcttctgagaatcttttgtatttatgcagtatcagttgtaatgtcacccttgtcattttttgattatgcttatttgaatattctttttcttggttaatgtagctactggtctatcaatgttgttcatcctttcagagaaccaacttttcatttcgttgatctttagtatattttgttggtcacaattttatgtcattctgctctgatctttgttaattcttttgttcttctatctttgggtttggtttgttctcatttttctagttcttttagatgtgacattgggttgttaatctgagatctttctatctttttgatgtaaacatttagcagaataaactttcctcttagccctgcttttgctgtatcccagggatttggatattttgtttctattttcacttgtttcaaaacatattttgatttgtgctttaattcttttgtttacccaaaagtcattcagcagcaagttgtttgtttggtttccatgttcttatgtggtttttgatagttcctcttggtatgattcctgattttattccactgtggtctgagaagatgcttgatatgattttgatgtttttaaatgtattaagatttgctatatggccaatcatatagtcaattttagagactgttctgtgcacagatgagaaaaacatacattctgtggttgttggatgcagtgttctgtggtgtttactgggtccatttggtcaagagtccaatttaagtccagattttctttgttgttttctgcctcagtgttctatctagtgccgtcagcatggtgttgaaaccccctactattattgtaaggctgtctatctcttctctttaggtctagtagtatttgttttctaaatcttggtgctccgatgttgagtaaacatacatttaaaatagtagaattttctgattgaattgaaccctttatcattatataatacccttctttgtcttttttttttaatgtgtttgttttaaagtctcttctatctcacacaggaatagcaacccttactcttttttgttttccatttgtgtgatagatctttctccattctgttgttttgagactgtggctgtcataatgtgtgacattggtctcttgaaaacagtagatggttgggtcttgttttttttaatctagtttgccaatctgtgtttctcaggtggggcttttatgctgttatgttcaaggttaatattgatatgtgaggttttgttcctgccatagtgttgttagctagttactttgtattctcaattgtgtaattgctttataggatccgtgtactttggccttatgtgtacttttatggtagcaagcattgttcttttgttttcatgtttagaacttctttgagcttttcttgtaggactggtctggtaaagaagagttcccttagcatttgctcatctgggaaaactttatttgtccttcatttatgaggtgtagtttggcagggtataaaattcttggctgactttttttttttttcctttagagagttaaaaatatacccccaatctcttcttgcttgtaaggcttctacagagaagtccactgttagtctaatggtatttcctttatgggtaatttatccctttttttcaggtgcctccctttgagaatttttttttcatgttgaccttggatagtctgataattataggccttggtgactatcatcttmtgtagtatcttgcgagagttttctaaatttcttatatctggatgttgatgattctagcaaggttagtaagattttcctgaattactgtctccaatatgttttccaggttgctttctttttcttcttctctctcaggaataccaaccagttgtatgtttgttcactttacataatcccatatttttcaaaggctttcttcatttttctaaattcttttttatttttgtctgactggattaatttgaaagaccacatttcaagctctgaaattctttcttctgcttgtctaggttattgttaaagcttccaactgtattttgaaattctttccatgaattttttcattccagaagttctaattgtttgggttttttttctttttttgacatagctgtctcatcttttatagcctgaattgtttttctggtttctttgtattggatttcaactttctcttggatctcattgagtttccttaaaatccatattttgaattatttgtctgccatttcagacttttcatttttgttaggacctattgctacagagcaaatgaaatactttggaggtgtcaatccactctaggtttttttttgctactagagttcttgcactgattccttctcatatgagggatctgtcacgtttattttttaattttctgtccttttgataggacttttacattttgtaattcttttttatcttgagggtatgttgtatgttgtgtatgatcatttggcctcctttccaggtgctttcagaggaccaaggtgctgtatgggtccttcattgtgggtagcttttgtgtggtggctttctcggatgctgcttgttgtagcaatatatttgacatatgagctaacactctatctactgcttggctgagggtatggaagtctcatcacatacactagcactcagcccttctggcagcaggtgttttatttggtggtggagttcaagctctagtccagtaggtggcacttaagagtaagagctggcccacccacaggtagattgatgatgagcggaagcacctgccctgatatagaggggaggagattttgttggagcatgctgaggtctttggggaaggagcagttggggaagtgcaccagctcctcatcctgaccaggcaggaatgccagctgcttcccctatcacaccatgtcacagggctcccagccttcagttcataaagactttttcctttggttcccagctgcaatgtggctatgggctactgatataccattttggcagctaccaccaagatggtcttggggcagagccccttcccccagtccagagcagacaactctgtggcttgtctgtgtcctccattgccaggatgctgctgttttgtgtagggtcagggagttgggccctgccctttgtgcaagcccaagcagcatgggctcactttcagcgagtgtggattcactacaaaaagtgtgataagtgctttctccaggtgcacatataccagcccccagccagaagaaccactactgcatcctcaacagtggctaaaggtggcaaggggtggatgactccctctccacaacccttcctagccatcagtgctacccccttcaccgattggtgccacttccttcatttcctttgtcccaagggagactttagtgggctgtgctccccattgccttcagggcagcccaccaagggtgagatctccagggctcccacagctccacagggacccaacagccccatgtttgccagagacagaatgggttgtggggtatgtttgtggggaatctcgtggtgtggtgactcaagggcagagattccctgggcagggcagtgtcccaccacaggtgcacaaccagcatggctcagttcagccatgtcagttcaggtctgaggggagtgtaggcatgcttaacatgagctggccacctggttctttgcccctggaaaattcccccaagtcaccactgacagcattgcccgtgatccagagggcagaggggctccccaacagtttgacagtcagtgaattgttgcaggggtgaagggagcagagaagcacacccactaccccttagcacagggttctgagttcctcaggggtcaatctctgccagacccttgctgctttttttttctgcatctcagctttttcccctgggcactctgtcaggtcctggatctcttctgtaagttttgcatttggaacttgtccattcacagataactttgatctttctgaaaagagctggcatctgatgtcactagacaggcatcttgaaaaccagcagcttgatggtgactgttatagaacaaagtgaacatactcaatgctactgaactgtatatgtaaaataggttaaaacagtaaattttatgtatattttacgaaacacacacaaaaaaatcaaatcctgctctgcctatacccaggaatagtcttccattgtcgctggggtgttgatgtaatgatcagtcttaatgctttgagagaagtcaattctgttatccctttctaaagctgctctttcaacagtggagaggtggaaacaagaatattacctaggaatgccttctgtttgtgtagcactttatgtttgaaggaaggcttttatgtgagtaattcatttaatcctcatggcagccttgtaaggtcagtagtgttgctcccttttaattgatggaaaaaagtgaagcctgagagattaagttgtccaagattacagggctattaaaggatgcagaggttcaaatacttatcttctgactctatagccattgatttcccaaagtagagaaataattgtcaacttactgtgagctttacatttaaaatgccaaaagctaggtgatattcttgttaaactgaataaagaaaagaaaaagaaaaatagcatcattaacttccccgtgaccaaggaataatgattatgctgaatttatgctctagatcctattaacatatttgtggctttttatactgctctattttcaaactttgrtcacgtttaaattctgcttgactctttgtatttttagactttagcttctgaaaacacactctgatttagggttgggggagcttttccccaaaacttactgttttcagtcatagctattcaaattttcatctaaattttcaaaataaatgtacaattcaaataaaaataagtaggcaggttgttctctcattgttatgcgagaactatttcactttaggtcttaaatttcatgttttattgctctccgtggagtggatggttaatgtaaatgggagaaacctggcatcacaccatcactggtcttagtgactttacgagtttcccctggaacaaatagctgggtcagtgcaacctcccaattctcagcatgcagctagcattcattttcctttgaagcctgacatagataagtcaactcagagccccaacttccctgcttcagaatgctgacctagtagttttctctgttgctgggaagatgtggtactgtatggaagaggggtggcattgataccccgtcactgtgaacaagcctccctgartttattaactgataacataaataaaacttcctaaggcaatatgcaatagatttctcactgtggtggtattctgtgaaagaaattgagattttccactcctgagtccttccctctgtacagaacctgtaaagtcttcactgacaggttacacattgaacattcaaagagatggcccctctatttcctctttcaagttgttccagctactgtgaggtgaaaatactgtacagcccagcttaccattgcatttactgcacaaattctgaattcaggtccctcacctcgtatatgtgaaactccttggaagcattcacttcactttaaaaagtytgcagcatgttgggactctcttctcttgtgttttgccataaaattcataaaccagggttccttgtgctgagtgcaaaggaaaaatgaagtactttcacaaaacatgactcacacctataatttaggcaacactgaggaagctttacgcgtgtctctggcttattgcttccattcccatagcttagatttattaagcacctattctgtgtcagaaactgtgctgagtatttcatgtgtactatgttatttaatgcacatcatagacctatgtggtggctactaacttattctcattaaaaaaaaaaagtggtggctactaacttattctcattaaaaaaaaaaaaaaacctgaaatgtaaagaggttaagcgggcacatagtgagtaagtggcttatgtcaactctttctttcctgtgtcagttgtactgctgtaactcaaatagatcattgtattaccatttacaatcccaagttaaagaatttccagaatcaggtttgacatctcctatcagtgccttatacactttaatattctcttctctcaggagggggaggttccaattttcatattatattcatatgtttcacatctatcattgttttcccctcagctttctcttctgcatgattcaaacaaataatagcagacaaattcttgttaacattcttccaagatggtgctttctaaagagtcagttacttaggtttctttcaactcagactttgattgctctttattctactaaggagtgaatgatacaaagcagatattcattatttgtgattacgaacagacagcaaaaaaatcaatggcaaacaaaaatggaaagttgtttcatgttttgaatgagacagacttttatttttaatgctgattaaaacataaagaaatggtaattaaaacatagagaagaatattatgaggacaagcctgttttcagagaggagcttggtttctttttgttctgacatttgtgtaatttcaacaaaatatatttcaacccattaagcattaattgaatgagacaggtatttattgaatatatactttgttctcagaatttatgaagaatatagactctgtataaaaaaaatggaccctgccctgaagagctagcaattttgtgaatgagagaagacaaacctaaatataattatatccaaggcagttcatattaaatgcacttctaccctttcttccagttctttagcaatatctgacaatttttcactaaaacttctctttaatctgtcttcctcttcagagaagtttgattttgaatttcagaaatgcctaatttatgctttagagattagaataagtttttcctccatttattgcttgattattgtgatcagttcttaagtctgaattgaaatcctgagagatgcttgcctgctacccactttaagatgcatctttatgatcctcttatgccacagagtcatcagaaattgggccttccctcgtgattcacaccactgtcccatttggagttacatacttggaacacagcattgaggatgtgcaagagttagtcttccagcagctggaaaacattttgccgggtttgcctcagccaattgctaccaaatgccaaaaatggagacattcacaggtaatcaaagaatccagtggtctaagcacaacaattttcttaacaggctcacagaactgatgttacttctttatcctytgcaytctctagtgaaataaattaactatgtgatccttggagcaaatatgtgtttgcccaacacataaatataacttctatgggttttatggtcctgctgtttctcaacaagaagtgcatagaatttccaccaatgttgtcttcaaattcaagcatctyaagacttacaaaccttgatattccgaggtcttctcttcagataaggcaggttatatctccaaatgcagctgtttctttggggtttttctagatcagtactgtggatatttagaaaccactataacttcccaagattttgcaatatgtcaaattaaccttgtaagtgtattttgctaccacaattttcatttttattaagtttccactttggttttgactgctgccagctgagctctctgggggagagagataagtacctgcataggacagctagttgagctgtttttcagggttaaattaaacctgctgatcactctactagttcaaacttaaagctccttatactaagtaaatgttgactttttctgaaaatttctgcatatttcaatggaagtgagtattcatagaaaaagtcttttgatccgtaaactcagtagtgaagtcatttaggggacaacgaagcaaagggcagatacaggagaaaaagcagtgagttgtccatttttttcctgggatttmtgagcttgttgacgaactgatttatcagccctattggttatccaagctgtgaagcctgtagaaaaagtggtgttgtgggaaattgcagttgattttgtatattttaaagggctttccaaaatcagaggaaatagtaaattatttcctaaaatattgtagcaggtctatgttttactcatatcttctcaagtcaaattacacagtgaatctttggggaaaaatatttacttaagcatgtcatggtcactttagaagactttactttttccttttaaaagcattgaaaaatctaaatagctattatctttaagtgatattgaactcaattttaagttggcttgaaaaagaaaacagggaaataatcttgttgatatactttgaagctagatatattacacatcaagtcactttgtgatttataaatacttctttaaaagaaacattcgtttatgaggtttcctcttgtgcctttctcgtaatttattaataaactgaaaaagtggatttaaaatctacttatttcttaaaatttgatgtgttaataaaaatagatttgtcctaaccacaaaatggtctaatcaaagttgtgcaatatcacaaaatttaataaaaatctttgaacacaatgtacctccaaaccctagcaatgattttgttacaatttggatgttgaaattatctcactatatttacgactctgaagtcatgaagtctacattggctgcaaaacctgaaagggagtaagttatcatccagacttagaagtttgcatattccactattcatatacttctcacagtaacttgaggaccattttacagaacataacattgtcatttatggtagaaatgtgggagggtagggggcatattggaaatctctataacttcctctcagttttgctatgaacctaaaactgttctgaaaaaaaaaagtgaagtcaatttaaaaatagaaaaaattcaaattaaaaatgtatctagtggtaaagataagccctaaatagattattttaaatatatatgttttaaaagcagtcttatgagtttgttagttttaactctctatagtgatgagcacacgaagcctcacagagatgaaataacttccttcaatccccacagctaataatgacaaaaccagtctacctgcctctcaagtccttccatcctcttcacccaccttatatttcctattgttgttgtaacaaattctcaaaaacttggtagtgggaaacaacacaaatttattatcttacagtcctggaggtcagagtcgaaaatgggtctcactggaataaaatccaggtgtggtcaggctgcatttctttctagaggccctaggagagaatccattttcttgcctttgtcatcttctagaagctgcccacattcctcagcttgagacccctcccatcttcaaagccagcaacagcaggtcaaatccttcttccactctgaccttttcttctgcctcacccttgtgatgacattgggcccacctgtgtggtccaagatacttatcccatctcagcttcagctcactcataattttaatccatctgcaacctaaaatcttcctttccattgacgtaacatatttgtaggttccagggattaagacatggatgtctgtggtaggggcattacttctgcctgccacaccctcctttctcccaaatcccttgatggatccccttgatgaggcattgtttccttcttcctcataaaacctctggagagagcatcagccatgtaaggctcaagcctccctaagggaacacctgctatctgcaagagataagaggagtattttgtgtggggacagtttctgatttccctggtgttgctctcccaagcctagtgctgttcctaatgtcgcatatccatatccacaattgcaacagtggggtaaaaaatgttttttcattttttcatttggtaactcatttattcaataagcgtttaatgaatgcctacaatatggctagtactctgctcaggaaaccctagagactaatatttgctgacggccttctcctaagactctaaattgaagtttgtctagggcaagctaatggtgcattcttgtgggtgctactcttaaatgaggaaagaggcaggtgaagaaagaaggcgttttttgaaagacttgggagctgtttctgtgcatcccatttttaatttgaataaagcacttgagtaggtggttcaaacaaacagaaaagcaatggcagactttttgtggttctcagttcctcccttttgcagctatttgccttccataatttaaatgtttagccagttaatataacttgatgcttagtctgttatgcattgaattaaggtttctgtaacaagtatgatatattaactctttctttcactagaagcagaattactgaaaatgtctttccatgtaccttgacaggggacatttaatcagtttgataaccgtaatactctgaccattattttatgctgtgctttcctttgtttcagtgtctatcatgatgcccttctcaaactatagtaaatttctgatttgcattcaggtttagctctaattttccccctctttcttcaattccagaaaatgtgagtggcccttttccttaccttatgtagcactctcatgattactttattttttaatctccaaatgtacattcagataccaaggaaatcaggagaggaacttaggggcaggaaatgaatgaatacattgatattcaatatctttggaaaaataaatggatgtggactagcatagtaagcttgtacagtacaattagaaatcagttatcttctgtagttatatatcttcacttaataactcaatattttgccctgagcttgtaccttttctcttccttttctttcttttttttttttttttttttttttttggcagaggtaggctctaaatctgtcacccaggctggagtgcagtgcatgatcagagctgactacagcagcctgcctcaaacttctgagctcaagtgatcctctcacctcagcctcctgagtagctgggattacaggtgcacactactgttcccggttaattttttaaaatgtttgtagtcacggggtcttgctatgttgcccaggctggtctcaaactcctggcctgaagtgatcctcctgctttggcctcccaaaatgctaggattacagtcataagcctctttcagttgtttaaagagaaggatcatgaatttttaaaggatctaatgaaagctataaacataaacattctctttattaaaaaaaatacatgtacacataaacacaaaaagtacacacaattatcaggatttattggcaacctaaattccttccatgaatccagtgttaggaacacctgctgtaaatgttataccgctattacctgaataaatcaagagtctctcgtggcccagtcttggcatattgttgcagtcaaaaagatataatccagcaatcaaaaagtatttatttacgcatacattttttgagacagggtctcgctttatcacccaggctggagtgcagtggttatgacctcagttcactgcagcctcgacttccccggctcaagcaatcctcctcagcccccaagtagctggggctacaggcacactccaccccatctgcggctaattttttgtatttttttgtagaggtgaggtttcatcatgttgctgaggctggtcttgaactccaggactcaagcgatctgcctgccttggcctcccaaaatgctaggattataagtatgagcaccacacctggccgcaaacagtatttaaaataactccaatctttactggtatctcttatagaactttaaagaatttccaaaatgtatcattcacaacaactcttttggaaagctctcttctcattccttgcatggccctcttaacgaaaactccctcgaatcctctctttgctctcttaataacccacagaaactttctctgacaattagccatgtcggcttgtcattttttctttcctttcttcaaccttccattcacattctttacttttgactctatccttttattcccctcccacctcttaaacaaggaagtctttgcccttttcaatacaaagtttccatttgrctccttcaggccttttccagctgattacctcagttacccatagtactgctaggagttaaaaggagtaagagagaaaaggggaaatgtgcaatggctgaagggcagaatttttcttacagattttgtttggtgggggaagtggatgtgcacacagaagagcttgagaccacccgtacgtttacattatcccctcatgagattaatttctggtgagtaatagtgtctaatttcagcattgaaaagtcaggtggtgattgatattttaattttttcttgctttttcccatgcattttctttttcttttccttattttttaacttttaagttcaggggtacgcgtgcaggtttgttgtatgggtaaatttgtatcataggggtttgttgtacagattattttatcacccgggtattaagcctagtacccattatttctcctgatcctctcccttctcccaccctataccctccaccctctgataggcccttgggtgtattgttcccctctatgtgtccatgtgttctcatcatttagctcccacttttaagtgagaacatgtgatatgtggttttctgttcccgcattagtttgctaaggagaatggcccccagcttcgtccatgttttcctgcaaaggacatgatcccattcttttttataactgcatagtgttccatggtgtagatgtatcacattttctttatccagtctatcattgatgggaatttaggttcattctatgtatttgctattgtgaatagcactgcaatgaacatatgtgtacatgtatcttataatagaacaacttatattcctttgggtatgcatctagtaataagattactgggttgaatgacatttgtgattttaggtctttaaggaatcgccacactgtcttccacaatggttgaactaatttacaatcccaccaacaatgtgtaagcactcctttttctcctcaacctcaccagcatctgttattttttaatagtagccattctgactggtgtgagatttcactgtggttttgatttgcatttctctaatgatcagcgatgttcagcttttttttcatctgaattttggccatatgtatgtctgcttttgaagtgtctgtgcttgtcctttgcccacttgttaatggggttttttttttattttttgtaaatttgttaagttccttatagttgctggatattagacctttgtcagatgcatagtttgcaaaaattttctcttattctataggctgtctgttcactctgttgttagtttcctttgctacacagctcttcaaatagatctcatttgtcaatttttgcttttgttgcaattgcttttggcgcaattgcttttggcatctttgccatgaaatctttgcctcttcctatgtccagaatggattgcctaggttgtcttccagggtgtttatagcgttgggtttttcacttaagtccttaattcattttgagttaatttttgcatatggtgtaaggaaggggtccagtttcaatcttctgcatatggctagccagttatcccagcatcatttattgaatagggaatcctttccccattgcttgtttttgtcaaagatcagatagttgtaggtgtgtggccttatttctgagttctctattctgttccattgggctatgtgtctgtttttgtaccaatatcatgctgtttcagtgcctccagctttgttccttttgcttaggattgccgtggctattcaggctcttttttggttccatataaattttaaaatagttttttctagttttttgaagaatgttaatggtggtttaatagcaatagcattgaatctataaattgctgtgggcagcatcgccattttaacaatattgattcttcctatccatgagcatgaaatgcttttccatttgtttgtgtcatctctgtcttcttggagcagtgttttgtagttctccttgaagagatcttccacctccctggttagctgtgttcctaggtgtttcattctttttgtggcaattgtgaatgggattgcattcctgatttggcycttggcttgactattgttggtacataggaatgttagtgatttagtgatttttgcacgttgattttgtatcctgagactttgctgaagttgtttattagcttaagaagcatttgggctgacagtgaggttttctagatataggatcatgccatctacaaacagggtagttcaacttcctcttcctatttggatgtcccttatttctttctcttgcctgattgcccaggtgggccaggacttccaatattatgttgaataggagtggtgagagagagcattcttgtcttttgctggttttcaaagggaatactcctagcttttgcccatycagtatgatgttggctgtggattgtcatggatggctcttattattttgaggtatgttccttcaatacctagtttatcgagagtttttcacatgaaagggtattgaattttatcaaaaaccttttctgcatctattgaggtaatcatgtggtttttgtatttagttctgttcacatgatgaatcatatttattgatttgcatatgttgaactaaccttgtatcccagggataaagcctacttgatcatggtggataagattttgatgtgctgctggatttgtttaccagtattttattgaagatttttgcatcaatgttcaaggatattggcctgaagttttctttttttgtcgtgtctgtgctacgttttggtatcaggatgatgttgacctcatagaatgagttagggaggggtcccttctcctcaaatttttggaatagtttcagcaggaatggtaccagctctttgtacatctgatagaattcaatggtgaatctgtttggtcctgagatttttttggttcgtaggctayttgttactgactcaacttcagagcttattattggtctgttcaggaaatccgtttcttcctggtttagtcttgggagggtgtatgtatccaggaatatattcatttattgtatattttctagttaataatcatagaggtgttcataatattctctgatggttgtttgtatttctgtagggtcagtggtaatatcctgcttgttttttcgtattgtgtttatttggatcttctctcttttcttctttattagtctagctagcagtctgtgtattttattaatttttttccagaaaacagctcctgaattcatcgatattttgaatggtttttttgtgtctcaatctctttcagttcagcactgattttgggtatttcttgtctctgctagctttggtatgtatttgctcttggttctgtaattattttagttttggtgttaattgttagcttgagatctttccaactttttcaggtggacatttagtactataaatttccctcttaacactgccttygctgtgttccagagatttggatatgttgtatcgttgttctcattaatttcaaataaattcctgatttctgtctttatttcattatttacccagatgttattcaggagcaggttattcagttttcatgtaactatatggttttgagtgaatgtcttagtcttgatttctaatttgattgtgctgtggtctgagagattgtttgttatgatttcagttcttttgcatttgctgaggagttttttacttcctataatgtgatcaattttagaatgtgtgccagatgacaatgagaagaatgtatagtctgttgtttttggtggacagttctgtagatatctatcagctccatttgatccagtgctgagtttaagttctgaatatctttgttaattttctgtctgtatcatctgcctaatgttatcagtggggtgttaaagatccccactattattgtgtcagagtctaagtctatttgaaagtatctaagaacttgatttatgcatctaggtgctcctgtattgggtgcatatatatttaggatagttagatcttcttgttgaattgaaccccttaccattatgtaatgcccttctttttttatctttgttggtttaaaatctgttttgtctgaaactaggattgcaacccctgctttcttctcttttccatttccttggtagatccctttattttgagcctatatgcatcattgcatgtgagatgggtctcttgaagacagcataatgggttttggttttttatccagcttgccactctttgtcttttagttgggatatttagcccatttatattcaagttttgtactgatatgtgtatacttgatcctgttatcatgatgttagcttgttattttgcagacttgtttatgtggttgctttatggtgtcactggtcttcagtgtgtttttgtaatggctggtaaccgtctttcctttccatatttagtgcttcctacaggagctcttgtaagacaggtctggtggtaacgagttccctcagtatttgcttgtctgtaaagattcttatttcttcttcttcttctttaagcttatgaagcttggttttgccagatatgaaattctgggttggaatttccttcctttaagaatattgaatactggccaccaatcttttctggcttgtagagtttctgctgagaggtccgctgttagtctgatagatttccctttgtagatgacctgaccttcctctcttgctgcctttaacattatttttttcattttgaccttggagaatctcacaattatgtatcttggggatgatcttcttgtgaagtatcttactagggttctctgtatttcctgattttgaatgttggtttctctagctaggatggggaggctctcatggacaatgtcctgaaatatgttttccaagttggttctattcttttcatctctttcagggacaccaatgatttatagatttggtctctttacataatcccatatttcttggaggtttagttcactccttttcattcttttttctctattcttgcctgaccatcttatttcagaaagccagtctttaagcgccgagattctttcctccacttggtctattctgctgctaatactagtgattgcattatgaaattcttgtaatgtgtttttcagctctttcaggtcagttatgttattttctataccaattattttgtctgtcagctcttgccttgttttatcattatttttggcttccttggattgggtttcaacatgaagctcagtgttcttcattcctatccatattctgaattctatttccgtcattttggccatctcagccagttcagaactcttgctagagaggtaatgtggtcatttggagraaagaaggcactctggctttttgagttttcagggttcttgcactgattccttctcatctttgtgagcttatctatcttcaatctttgaggttgctgacctttggattttttgccccttttatcctatttgatgaccttgagagtttgattgtggcataaggttgattaaaccaactggcttcatttctgaaagactgtagggggccaacacttagctcccaactcctggtctgcatgctgtaactctgcaagacttgtagtgggccccaactttgttctctggctcctcaaggttagcagcccactgtgatggtgggaccaaggtatggctgctgcagcagagtattagcagatgccagggtgcttgcctccctgtgagtgttcaccacattggtggaggtaatgcagctggtgactgtgtacacagtcgcactggaagtggtcttggcctgggggcagggtgctggctggcacaggtctgggtgccttctctttgcactggaagtgggagtgaaggggaaggggaagatctgctgttctctgtgcagtattaatacaagggtggggcactgatggaggtaaggctggctggttttgtgcccatcaaggctgtctgcaatggtgattggtagggggagggtgggcggactgcaaaacccaccccatacagacatgcaccggcaaagcaaagcaaagcaaagcaatgtggacagttgccatgggcctgagggaagctgtagtacagggaaggagtgggcaggctggtgcatggttgtagaggctgccctactgcagctctgcactcgtcaggcacagtccaccagtacagaagctatagtgtagggccgcaggatacctgggactgccctgcaagcaggcatggcctgagctggtgctcaggtcagcatagccccatctaatgggcaagattgtctttcggagatcaggtccaacagttcctctagagctaaagtctcctaggagcaagtcaagcctaggggcatggccatccctggctgtacttcactactgatcctcctgcaccaaaccatctgggctccacatcagctggcttgctgcccctacctcttctctaagcagctctccctgccaacttgatttccatggtgattaaggaatcttctcctgccagagttccacaggcctatggtgagagcaggttgctccttgccagtttaacttacccattcccctggagccactgtggccaggaatgagtccaggtgtgcagtagccccatgcagtgttcccagctttctccttctttagtacagcttctgtgtcttccctcagtccactttgggtgccttccttctgaagatctattaggagcatgtcagttgtcttggtccctcagtgggagccattccacctggctgcatctagtcagccatcttgcctcccccctctccctgcatttttctattaccctcattttctccttttagatgagttggaactggaaggtagtggctgatatcatgtatataccaaacttgtaaatccaaaagattgttgtcctcttcaaagtagtcagccacctcgacaaactacacccttatttcaataaaattgggcatctctttcatagtctgacacatattcttcaacatatcatcagttggatcaggtctttgaaacttgaggttcaatttattgtttttaaaaccacagtcatttgtacttaactcatttaaatcaaatggatggtcagtcttaacaattaaaaaaaatttagaggtaactaaagaaatacaactggcttatatttgtttatctgttttaatgtagccagtaagctgattttaatagcaattttgaatctggcaaccttcaaagacattggccagttcatcgtcatggatataaatacatagccttctaagataagtactttgaaagacaacaatcaattgtgtttatcagttagagtacattaggtgttttgtttcgtagttcttttccataataaaatcaagctcttttggttattctgtcactattcctatgacttttctcccatatttgtgctttataattcctggatttttaataatgtgatataattatgatcttggactttggcataatgcagagtcatttcaaacctttgggcaggctggaccataactctatgtctcaaggtcctcatctgtaaatggtaacaactgaacatgcctcttagacttgtggttaaggtgaaatgagagaacacagtagaaaacatttactacagacattagtacaaagcaagttatcaattaatattaccagtagtagtaataagaggaggaggagatgaggtgacagtgctttgatggtcatttctttgttggtagcttagctctgtgttcgttgctctcttttcttgattacctctcttcatgcccacatgtcccactttttctcttttgtttctcactcttttatcttttcaaagtttatctcttttctcttctctctgttttacataagtaaatagtctggataggaccaattcaatgccagggactatgacacttagtcattaccataagggactgttgaataacatcagaacaaggtgcgatgaaagtgatagatccctgtggacacaaggaactcttgccagttggtttgttgttgttggtttttaagcttaaagattttccagcttcttaccaatcattcctaaactaacttgcacattttccagtgtttgataatttaacacagttgggccatgagtcaacatttcccaacaagaaattatggccacaagagtatcttgcctatgtatcataagttatagtgaccttcggataaccaaaatgggccctttgggacaggtggactgtagtatgacccaatttatcaacatcaggaaacctaacaggtgtcaatcataagcattgcgttgagtaattgcccacctccttgtcatcagcacataactaaccacttgtttcagtttattatgaggtagtacatatgtgtgagatcatcacctgagaaattctgatcattgaattaggatgtacactcacagtttaattgaagtttatataggcaggtatttccccttttcgcaaaattccatattacataaactattaaatgttttaacacataagaatttaatgaagtcatttttttctcatatactcttgggacttactctgccatgtagtcagtatcacacttattcagaataactaattattttgaccagcaaatactttataaaaaactttaaaaaggagtctgtgtcattggcactgggcaaatactaaatatattcacttgcccccagcattaatacttaaaattggacggtggatgttattacataggcatagatgctctgcaagaaataggccctatttcagcactttcccataaagagtaaatctacttggtctatttaagtaaacatcagtattatgctataaaactaacaaacaaaaaaagtttagtagtcatatccagattataaattaatactatatactcatcttttcattaaacacatatttgttgagcttccactatgtgtcaaacattgaactgggttctaaagactcaaagacagctcccttcctttaaagagttttccatataatcaatcagcaagggtaaccaataagcacataatcctgatatagtacagtttgccatacaaaaactatgtacaatatactatgtgagcacagagcagactttgggaggaagtggtaagaagtagctcctaaaagaagatgtcacttgagctaaatccttcaaaatgagggagacaggtaaagttagtgatgttggagcagtgttccaagaacacatgtactttttcagaagcaaaagaggcaaagaatacttgaggaatgaccagtagctcagtttggctgaaattgaacttggtctttgccatcgtgtattgtagcacttttgtataccatgataattcacatcagcattttattagacagtctctctttctctctctctttcaagaatgcaacttattaattccttactcactgtagctcactgggctctttatgttaactcactttatactccaaccaccttgtggagtttgtatcccttcctcatcacatagatgagaaaactgaggattagagggctcagatatcttatgtgtgtttcagctgctaggaagtggcaaagctggcattcaaatgcagtcctatttaaaagctagtgcttttaaacacctcacttcactgcagtaattttttgagttctggctttctcccaattatgacaccttcttatatcattctttttttgctgctgtcagctagaaataatcatagttaacatttatactctgattttagaaaacacttgtatacttgttttcatttgatcctcacaactgttctgacagatcaggaagtaaatattatctttactttaaatgaggaaatcaatgttcctattgaacatttttcttaaagaactagtgaacaacaaaatagaatttggaagacacaactttatattcaaaagttgatgtttcacagaatatacaaaaattaactaaaaatggatcatagacctgaacataacaccttaaattctaaaactgctagatgaaaacataagagaaaatctttaagaccttggatttagtaaacatttctctttttttgaaatggagtcttgctctattgcgcaggctggagtacagtggcacaatcttggctcactgcaacctccacctcacggggtcaagcaattctcctgcctcaggctcctgagtagctgggattacaggcgcacgccacggtgcctggctaatttttttgtatttttagtagagatggggtttcaccatcttggccaggctggtcttaaactcctgacctcaagtgatccgcctgtctcagcctcccaaagtgctgggattacaggcgtgaaccacccatgcctggcaacatttcttagatagaacacagaaaagcgcaaaccatacagaaagaaactgataaattgagcttaattaaaatcaaaaacagtgtctttgaaagacactattaggaaaatgaaaagacagccacagacttggagaaaatgttgcaaaggacatatctgtaaaagcatttatcagtaaaaggctagtattcagaatatgcaaagaactctcacaaatcaataatttaaaaaacaaacagcacaattatctaraaaatgggcaaaagacttaaaagagtacttcactaaagaagagatgtgaatttactatggagttataagaattctacactgaaaactacaaaacattgctgaaagacatttaaaaagacctaaataaataaaaacacatcatatattgaaagaggtaatatttttaagatggcagtattaaccagagtgatctacagactcgtttcagtctctatcaaaattgcaatggcctttgcagaaatgaaagagccaaaatttatacggaaccacaaggaccccctgatagccaaaacaatcttgaaaaaaagaacaaagttagaggactcacacgttctcttttcaaatcttactgcaaaactacagtaatcaagacagtgtggtactgacataaggacaggcatagatcaatggaatgtaattgaaagttcagaaataaacctatacctatagtcaattgatttatgacaatattcttaagaacattcaatggagaaagaataatcttttccttatatagtgcaggaacaacttgatatccacatacaaaagagtgagctggacccttacatcacactgcacacgaaaattcacccaaaatggatcaaaaacctaaatatgcaaggtaaaataataaaacttctagaagaaaacatactggtaaatcttcataacctcggatttggcaatggtttcttagatacaacaccaaaaatataaccaacaaaagaaaagataatttggactggactgcatcaaaattcaatacttttgttcatcaaagtattatcaaaacagtgaaaagataacccaaaggatgggagaaaatatttatgagtcacatatctgataagaatctactatctagaatgtataaagaactcttacaacagcaaaaaataaaaaataaaaataaaaaaaccaacccaattaaaaaatgagcaaaggagttgaatagacattttcccaaagaagaaatacaaatggccaataagcacatgaaaaggtaaaaatcattattcctttgggaaatgcaaatcaaaatcacaataagatactatttcactaccattaggatggctacaagatacagaataataagtgttagagaggatgtgaagaaatggaacacttgtactttgctagtgggaatgtaaaatggtgcagccactgtggaaaacagcttggtggttcctcaagttaagcatagaattacaatatgacccagcaattccactcctagatgtataatcaaaagaaatgaaagcatgtgttcaaacaaaactgcatacacaaatgttcacaacaacacactttagccacaagtggaaacatcccaaatgtctatcaactaatgaatggataaacaatatatattatatccatacaggggaatatcattcagccataaaaagggatgaagtactgatacatgctataacatgaatgaaccttgaaaacatgttatatgaaagaagccagtcataaagataacatctcttgaatgattccattcatatgaaacatgcagtataggcaaatccatagagacagaaagcagattagtgtttaccggtcactaattgcaaattttatgtgtatttcaccaaacacacaaaaaagaggagatgtgaatggcaactgagcacacagaaagacaatgaccatcaatggtcattaagggagttcaaattacaaccatgatgaaatactacgacatgcctacaagaaaacatgctatgtgaaagaaaccagtcacggctcagatcagaaactctgaagatgacaaatgctggcaaggatgtgaaacaactgtaactctcacatatcactggtaggaatgcaaaatggcacagccactttgagaaatactttggcagtttcttacaaagttaaacatgcacttaccacgtgacccagcaaccccactcttagagatttacccaagaacaatgaagacatgcatcctcacaaaaacctataaccaaataatattagcagctttattaataattgctgaatagtggaaataacccaaatattcatcacctgctaagtgggtaaatattacacatccataaatgaaaaactactcagtaataaaaaggaacaaactagaaatatttataataatgtaaatgaatctcagaagcattatctcagtgaaagaagtcagactcagtctgtgtttatgactttctggaaaaggtaaaactgtagagacaaaaaacagattagtgttagcaggggctgtgattgagaggaagggattaactgcagtggggcataagggaaatttagggggtggtggaaatgttctctgttatttctagtggctgttacacaactgtatatgttgtcaaaatatagaacaatacacacaaaaaataaattttactgtatataggttcaattaagctgacttttaaaaccacctgttttttattctccattattgtctttctgaggaacacaacattaaattttttaatactttcaatttaattttcacactattaaaagtagaaggaagttcgtttctagacctgaagatcaaaatgcctgcattcttttttgccataatcctatggcccagatataaagtcattgagtccatttaacatgaatgagaaccagaaagaaatgtcaatgccatgcttctgggtcatcaagaagaataaatagggaatgggagatgaaatgcagaaaaatcgagtctgcaggaaattaaccagctgtcaacctacagagcaggaagaggtagtagtgaggcccagttcaggaggaaaagtgattttcagcttatctctggactcaccatggaaagcactttcagtcctttgcatcctagactcccaagcaattggatcctttgagaaattgtgacagaacgtttatatttagatgaaaacaaaataattccaaatctgttaaatcagtttacagaaaggagctggttttttaccctcacacttttcatagtgctcagcaactactgggaacaaaacaaatatttgaagaattaatgaatgaatatactacaacttgctgaagggcagaacaattttctattaaattaaaaactctaaaggataatgtaatatgactattgttctgtccattattacttcaatagttctagagaaaaccgtatttcattctttattgtgtgcttcttctgaacaagtcctcgtcaaaagagtttgctccagtgttttcagggttttaaaagatagaatagatctaaatagagtcaatgtagacctcagcaattgaatatacaatttcagcaaagtatgtcctttgcagtttgagcccactraagctgctacatggatcatataattgatttgtggcacattctgcctgcatctacccaatggtttattaaaatagaatagacaaatgccaataaaatgaaaagctccactgagaattgaccaaaccacattgctttcttcacacctaaggtattccaaccaatagtaatttcacagcagctctctgtagtaccagatacagagctctgtaatcaggagtccacaatacaagtaagtctttccctaaagcacaacaaagaaatgggtttatgaaatcaccgttaaatataatagaacactggagagatgagaacagaggaaagatgaaatgatgaacacaacacataagaaccaattaaaaatgtaccatctctgcaggaaagcacccgtgtgttgataaagctctttatgaatattaggtactgtagcataagatgattagaactgagagcctcaaaaatctgtggccaaaagagattcaattatcaaagaaggatacctaaaaatagattaaatggtataatcagcaccccaatttatcattattatcccagtttggagtatcagttatctgtaataagattcagtgtatggttaagaaataatctttatcctcacttttcttaataatataacaaatatatttcatatgtatatgatttctacttcactacaaaaatctgagcatggagaatcaactgttttaagaaagaattttttaaattaaatcagaataggtgttgtcctgggcaattcagttgctcaggaactgggatagagtggtgaggggttaagtgtgacaaaagagaaggtggttaatagcatggttatttggagggtgggggcggaaaagcaaaatttagagactcagaaactaaagaaaattatttccatagagaaaaaaattccaccacccttagagaacatttgaacactgaaaatataaaaatttcaagactttgaattagcttttttgttggcttgtgttcattcattctttgagcaaatatttattcaatgccagtcatatacagtggagtaatagataccagaaatacaaagatgagtaagacacagcccccatagcttgctactttaaggactcaaaaggcttttaaacatcaaatatctcttaccaaattgcattttggttagttgtgtgtagaggaattagcaacattttgttggattttcgtcaaaccccaaaaggattttttaaaaataggagaacgttaagggtaaatacacccctagtagaagcaggaacattacattttgaatttggccaatagaaaatattttgtgtataaatttaaaaaaaaaacctgttttcaactttcatgtcccagcccttcctttcttatattatggaactttattcagtggctaatagtattgttccactgtagccacaacactgaagttatatctttttcagagtgcctggactagtttcctatatgcaaataggtaaacaggcatttccattgacatcagaataagttctggtctctccttcatttattgacacttctccctgtgtgtgtaaacaggcatgtgattaatgctataatcaatgccttgggaatatggtaagattagggagatatatacagagaatcaatatgaaccgcattcactctctaggccacatgtaatttgaatttattccacatttgattaagtcattttcccccaatccctattttcctccaacccttagatggttactacctaaatatttaaccatgggtgaacaaacgaaccatgtgttactgtagattctagttytatctagagtaatatttgtataaaaaagagattgtgcagatttctgggaaacatgttttatacaagatttcattccatttttagaaattactcatccactcaccacacccacactcaggttatccagtgataatggaaattactgatgggttttcaaagctcacattagctcctccctagccgccatctctccctttcatggaaaacattcttcagactgacagagactctgctttgagctgtgtcaagccttaccccagarcagtggttccaagcattttttttttcatggaccagtaaaatctctctagatgttttgggaactaaggtaatattgttatcttttaattcttcaattaaaaatttaaaaggcaaaaacacagctacaagaatttaaacaaaagaataaacccaaaaataaagttacaacctcataacagatttatacatattatatatataaaatgcacttagctccatgaaaaagctcagaattcttacttttttttcatcttgccacagattgccttttgggaaaaactacctttgtgctttgcatagataggggctataaaagaacaagttaaccaaatattcaatttctgctgtttatgtaccatggcatgggcttatgtttacaatggcagcagagtagagaaatgcaaggaagtgagaaaatgtatgaatcagctccataccatcttagccttcagagctatttattattgccagtatggtcaatacctcacatacgcaatgagcaggggaaatgccaaggcaagaagattattactcaaagttttccccagtcaagttagtgtgcaaccagtaaacaatagcatttctctgaattcaggaacaatttaagtaaaaagtcactgtcagacattggagtggatgaaaattttttttttgtttcttgttatttgttttgagacagagtctcactctgtcaccaggctggagtgcaatggcatgatctcagcccactgcaacctccaactctggttcaagccattctcctgcctcagcctcccaagtagctgggattacaggcacgtgccaccacgcccagctaatttttgtatttttttttttctaagtagagacagggtttcaccatgttggccaggatggtctcaatctcctgacctcatgatccacccgtctcagcctcccaaagtgctgggattacaggtgtgagccaccrcgcttggccgaaaattgttattaaaagatgcagtgtgagtatcaaaatacaagggatggcttagacatctccatctgctgtcaaggctcatgcataccaaaagcttattaaaatgacctgcaggaaggtaatataacataagaaagtggtaaaattatctacagtcttttgcaactaggktttttttttttttttaatgtgagttaccttgtatgcagttgagaaataagagatcagtatcaggagactcatattggtttcaaactcatttatattttgaagtaattggagtaagttttcttacaggcaaagataaagccttgctaaatgtgaaggtcttaggaataaaaactaaaaatctacaaacatgctttcctttagtgcaaatagtggctgttccaatggcttaaagaattgctggttttctaccatgttaagctctttagcaaaagtggaagtccagatggtgaaaccacaaagatatttcccctatattaacatgacagactgatgaaaaaggcagcatcctagatcatattttcaatttagctcaaaatgttctattttagaagcaactgtcctccaagacccatatctcaaaggagaaacacaagccccaggatctaggctgcaaagagtgtaccactgtagctagatgcagaagctggaakaatgttaactgtactagccactttactatgatgtttattggttttgttagtgcttggttcaaagttccataggctttgagtcatctgcccccaaatctgttttttccacaagccctgatatttttagcatacaattttgtagaactatggttgtagctaraacgcctgtattttattttcacacagcagccaaagcacctgtgtgacccagagaagggtagtgtcctggagaggggtcttagaaggttgttagaaggaattgtaattgggtttgcagcggcatctagaggaaatggctcctgatgtgatctgtttcttggcattaaagggtctctggcttggagaaaggcaatgcatcaagctatagtaatttaatgggaaaggagagaaaaaaaacagtaaagaatatttagttccctcatttctaattatgtgttccttctgtaatcttctaatccagggttggtatatagaattcctctcaaatgccaactccaattgactggtggtggctgcctgaggcacggaagagagaaggatgctgaggccctgttgggcttcctggaaagaatgccacaattgattagtgatgtctgtcaggagttgctgcacctgtgtcacccccataatctgtgatacagttggggaaatttgcccagcaagatgaatgatctgggaagacaaccagacttggttctggaattggtacatttaccttcctttgaaaatgaacaaatggattcttagataaccagtatatctctgtcagtttcacctgacgctgctcatttgggtgagctgagaaagtggagtgtttaaaccagcaatgctaaagacattagaagtcctaacagcaacaatgctacttaactgaaaaagcaccgcttaaaggatcctaccattcattatcttttgacttgtcatgcattgagaaactgtagagtatttactgtccctctcccctcaccttacttagtacttgccatatttcttcaactataagatgccactccatcagtatacaccaggagatagtcaagatgtagttttcacatgtgtgaacttggttatttctggtgctcttggagtgggcagctgtaacttcttgatatttaaactaacaaattacttaagaacaatttgaggaaagaatatgaggtctagttgctgtctgaaaacctttctttcccagtgaagagaaaaaagcataatccatacttggagaacagtgtcagcagctcagaagaaaacccaagaaaaaataattcagtggaacatccttgtaagaaatgccacattgccagtgttttagacagcacagakgacagactgcataggaagtgcatggatatcagacatcagcatgtctgagttaaagagtggttcggagaagtccatctctaaatgcgagcctttagaatggcttcaccaatgtatttctcttttatttcctttttatgtttgcaaaagatacatgtagataaatctgaaagaacttttctattaagtataaaataaagttttgtgtcatgttgacaccattttttctttctcattggtacataaaatattgttgtgttttatggtgccttagattcaatgaaatgtggcataatttgcattcatggtgtaagtgaggaaatgtagcaggaaaaacttgattattcattgtccagtctccctgatcacattagtttcatatctagaattagaatttataaaaccttaattcttgcctacccacttgaatgtcacctgttgccatgtttcagaaaggtttgtttaagtaaccaaattatgggctggatggctgaataggtcagcctaaaataaagccactctataggccagacaaatgactgttctctatggggaaatgtctcctagtccagggacgcactgtagctttagcatagatatgaaaggaagaatggacattatttgaattattttgcaaataatcaactatcattttgtgaaaatactcagcctacttgtctgcctacctctttcctttcatctttaatttcattttcacaccaaaagcacttttttktgtgaacttttacaattagtaatcatgatgcaaagaaactattaggctgaaccatatacaaattgacaatattttcccatttttgaccgacggaatcagcaagtttatgtggttcaacttaatacatgacaggagacagtcattaaagcagtgcacagtctgaggccagaggacaccccttcattcatcattattaagagtcttctaaatacaatagttcctccatttgagcttctcctcagctatatggggagcctctgaataatactttttgtgtaggttttctgtcaagaacttcatttgatcaactgtgtacaatatctttttttaacacaataaacatttattgcacactttcatatggtccaggcactgttctcagccttggatacaaagatcagtgagtcagagtccctattcttagaagcttgcagtctaggaggagaggagacaggcatggacatcattacagtgcaaaatagcaagtaatataatagatagaaataacatgctgaaaaggcattgaccttgcctggctgagcaacaatgcctcagagcaggtgatgtttatactgagtcttgaaggatgagcaatttacttgtcagcaaagaggaggaataatgcaacatcacccagcaaaatggtttgttccaagccacagaagtacaagaaaaagaacctgagtttgaatatagataggacaaaggcgagagaagtggcaaggacaagggtgacaaaggtgagagaagtggcacgaggtgagattttaatggaagtaagatcctggttatgaagagctctccatgaggggctttggcgtttgcattttatataacaaaacacatygacatgggtttaaattgcttagaaataaaaccacttcttcagctttatttatatacccagtccagttatcgcctaagtttatagaaacattgcatttgctactctagagcaggcaagagttctttctgaccagccctggcacacatgtgagccaaagcaacctggatttgcaaggggttgtttcagccctgacatctctcttaaacacagtcattgagctgtggttcctcactgtggctgaaagcatagccaaaggctgcattattgtgagattgtggctttgacaattacgtgctcctccactgcagggctcttactttacatgggtgaaggagcttgccaatacatgctccatgttttcatattttcctcattgggtaattgcaaaatgggtgattccacctaaatgcagtgagattgatttcatccaaactgccgactggctaatcagtggcccagttttccagccatgtgatctggcatctggcatttaccactcatcaaattaaattacacagcaccaataaattaccacctcatgactgggcaaaacctttttccttaaactccttcctggttaatacttgtgcaatgtttaatagtgccacagtttatctatacagggatgtcaacaggaatgtatcaaaattttaccacaaatggagatttatgtatatgcaaattatacatagacacacacatatatgtatagatatgaatatgtgtgaatgctttattctattgatgtgaattttccagatgcctaaagctaagtgactaatcaaaaatttttgttttgttttayttcatcgagtctttatggaaatatttctgaaagtgctggaaatgtaagttctggagtcagcctgctatgttcgaatccctgtttctttatctactgactttccgtctttgggcaagtagtaatctttctgagcctcaactttcttatgtataaaataagaacaatagtaaccacctcatagggttgctatgtgaattaaatggggtgtgcatatacagcatttgataggcagtggacattcaagaaatgctagcaatgaatattttatgcatattagaattgcttcttgaaagctggggccatcatggtgaacattaatgattgtaggacaactaataactgatgccctcagctcctattaagagccagaaagttatttgcctctccatttaattgccccagtctgccaggattcttcccagtcttgtctgggttttgartttttatatagcatcccaatatggtttggctctgtgtccccatccaagtctcatcttgaactgtaatccccataattcccatgtgttgagggaggtacctggtgggaggtgattggatcatgttggcagtttccgctattctgtgctcatgatagtgagtgagttttcatgagatctgatggttttgtaagtgtttgacagttcctccttcacatgctctctctctcttgcctgctgccatgtaagacgtgcctgctttccttctgccatgattataagtttctcgaggcctcctcagccatttggaactgtgagtcaattaaacctcttttctttataaattacccagtctcagggamgttcttaatagcagtgtgagaatgaactaatacatatcccttgctattagactattggttatcacattctgaaatcactaatatctagaatcctagccgttttcttcttcctgtagtgttttactgacaaattaaataatccaacttgataacattctatctaaagcaggttaaaagctctaattgatcacccaagtctgtgcttcagtgactgcactatgtgctgcctcttttagccactcaaagatcttgtctgctgatttcaagattatcagctatgtttgtgatagatgatgttgctgtaagagacctccagaaacatgagaggatactcttaatatttcacttttgtatctcagtgacacaggtctacagaggcccatgtctttagaggttcaacagggaaataatagtaccatctcttttaaaaaagcaaatataacatataaataaaaaatatctatggcaaastttttctgctttaagaaaactgcaggctctgtaagccaggcatggtggcttatgcctgtaatcccaacactttgggaagccaagacaggagaatagcttgaggccaggagttcaagaccagcctgggcaacatagtgagaccccatctctaaatttttttttaattagtcaggcatggtggtgtgcacttacagtcctagctaccaggaagctaaggcaggagaatctcttggcctaggagttcaagagtgcagtgagctatgatcatgccatggcacttcagcctgggcaacagagcaagaccctatctctagaagaaaaaaaaaaaactgtaagggaatatactgactcagcctatctagaacaaagatctcagaaccataatttaaatagaatttattacatttcttgatttttttttcctgatttttaaatgagtaaatcctcatgggccttactctattactatccatgaaaacactgtataagagagactagaactgtcatattgtcatccaggtgaatggagccccctgaagttgtacagtgaagcagtcccaagtgagatggccattacaacaagttttcatattctggttttttagagggtttttggtgtttcagtggccaaatcatctcagtgtccaacataactacattcacctcccactcattctccttactgcaaatgcttattagccatcatccatccaaattttgagaatattttctccagaaaaacaatctctgtgtcttttttcatacttwcagatatgaaaataaaaagctgtttaaaaagactgctttggggtcagtctactctcaggactgaaatttccttaaggacaaggttgtgaaattttaaaattctcctgctccaatgttcagcatggagcctgggccagaacagcgctcaggaaatatgtgaggaagaaggaaccatgggatgaggagtagtggagagaaactgaagaaggatgtattggtcaatttgggctgctatagcaaaataccatagagtgggtggctgataaacagaaatttctttctggcagttctggggtctgggaagagcaagatcaaggcactggcagatccagtgtctggtgagagccctcattctcatagatggcacctctggctgtgtcctcacatggtggaaaggaccaacaagcttccttgggcctgttttataaggagctgattccattcatgaggagtttgcccatgatctaatcacctcccaaaatgccccaccttctaatatcatcacctcgggggttaggacttcaacatatgaatttcagggggataaaccttcagactatagcccctactaattttgaagttcagcccacttctgattaccttatctaataactgaaaatttaaacatttaagaatataaatataaacacttgaactggggttgaggggcgtttagtgagtcttggtttgttttttgtttcttgtgtgtgcattttttttgtttgtttggtgcttcttgtgagaaatcttgatttctccaggtagactaaccttttccaggtgggtgttgccatgacagcacaatagagcacagaatgtcaattgcaatcctctttttactttttcaggttacaaatgctgctgccaactgtcctggccaaatgactctgcatcacaaacctttccttgcatgtggaggggatggatttactcagtccaactttgatggctgcatcacttctgccctatgtgttctggaagctttaaagaattatatttagtgcctatatccttattctctacatgtgtattgggtttttattttcacaattttctgttattgattattttgttttctattttgctaagaaaaattactggaaaattgttcttcacttattatcatttttcatgtggagtataaaatcaattttgtaattttgatagttacaacccatgctagaatggaaattcctcacaccttgcacyttccctacttttctgaattgctatgactactccttgttggaggaaaagtggtacttaaaaaataacaaacgactctctcaaaaaaattacattaaatcacaataacagtttgtrtgccaaaaacttgattatccttatgaaaatttcaattctgaataaagaataatcacattatcaaagccccatcttaagtcttcggatgtgtccttgaatcaatatttttgcaaattatacaaaacaagatttttccaaaatgtaggtaacagagtgtaattcttatttctcatttatcccccaagttattaagtgatcctgaattgtaggtcatatatgtcatcatcttagtgtggagggcaacttgactgataaagagaccttccttcagattttcagaaagtataagattccacatgattttcccagccacacagkactttttaactttcaaacaaattccagtcctaatatgaaagataaaaattaaatagaaacagagagaaagtatatcgatccttaccttttgctatattttatagctgttgctgttactttatgggctctccagtatgtgctgtggcatttagactgtgtcgagtttaatgaatttaacacaacaaaaaatttactgaaccagaaaatagatgcacttaaaatagttcaatatttgccaagttggtggttcagcatatcacccacatgcttcagtgacctgaccccacgacttgctagctggagagaaatcaatctccagccttccaaaccagctacctgttgctaatttgaaaagcaaaatgatgagttctatttcagcattttgaaaggagaaaaatcattgcagcctctcaaactaacaaaagttcaacaaaagacttcttactgtaatagtgtttaaagtttcacacttacatgtccactgtcatacatacacatacacaggcacaggcagaacttgcttctatagctgcaaagtgggttttatgaccctatagcatattattatatgtttcctcttagcaataaattggtgaaaaacttaaatgccaacatgtggttaatgtcacttattttgaaagcagagggaggaagaaggaaatttgtagtctctataaaatgatgaaaaatagtgattttttgttattttcgcccatatttgactaacatttgtctttatttatattttttaaattttaaatgtagggatacatatacaggtttgttatataggtaaacttgtgtgacagagatttgttgtacggattattttgtcacccaggagttaagcctagtacccattagttatttttcctgatcctctcctccctcccaccctctactctcaggtaggccccactttctgttgtcccctgtatgtgtccatatgttcttatcatttagctccctcttgttagtgagaacctgtggtatttggttttctgttccctcattagtttgttaaagataatggcctccagctccatccatgttcctgccaaggacatgatctcattcttttttatgggtgcatcatattccatgctatgtatgtaccacattttctttatccatattctaccatatttacccttaaaatatggtagaaaggtcattcaaattaactattttgtttttaacaaatataattcaggagccatttgactgaaagcaccctgaacctttaaaaacaatgctatatttgttttatgaatttatgtcctccaaaggagggggagggaatttgtaaagctgggatgggttgcttggagaccgtactcctctaagccattactaatgacttttaatatctattctttctaactctgcatctgtttttataagactatggcaatatgaggaaaaaccctacttgatatgtagatcattgttactttgctattttaattattttgaaaacttattttacatttagattttctttcaattcttccccattagaaatgaaatggtagaaatatctcctcctggaagccatcccagayggccataaaattcagctggccaggatgctctgagagacacaaggctaagatatcaaactcccctgggagatgggagtcagcaccaggtagaacagtggccaaggtgtatgtatgttagccccacggggccamacatcatcacagtatttccaaacaagaacttttattaatcaagccagccaaggaaagctgttctgttttgaaaggagcgtattcaagtgagaaacggcttgagcagtggggtgatttaatacttgttagctgataaatatagcctttgccagaataaaactttatgatgcagtgttgaaaagcttaattactaaactgtctatgcacgtcttgctcaggcagcaagggtgacaaattatagcagtgaaatagtatttttcacctttggcatttctgaaggagaagagtatgtctaaaaacatcaagaaagcagcagtaatcccagaccagatattactggggggagggcggggaggaagacacttcgttgagtcatcaagccttctgtgcaaaatgccatggtccccaccccccgcctacccactaccttgttaactgaagagaacagggtcaattttacatttttctggcattttatactcatccaagcgtgtgtgtgtgtgtgtgtgtgtgtgtgtgtgtgtgtgtgtgtgtgtgtattttcacttttcatcctcctaacacctctgtgaaataagcagagcagagaattcttatttacatttaacaagtgaggaaamcaaggcacagatcttggccaaccagggtcacgtaatgttattccaggacaagagcccaagcccctcatgacccgtttctatttacaggcaccatgctgctgccagatgaacatgctaattaaaactgaactgaaatattagttgggggtacagtccgcatcatgtggtcttcttattgatgtttcatttcagagagttaacactaatcctgatgtgatatatacaggagtctaatatgggataaagtctctgtaagtactggctaagtgattcatactcctgttactttcatttgctggtttatttccttctttggggggtacttgctgtgagaaatagctgcatgctaatgacactgaatttcaacccagctgtagctggttacagtacagactcaccgtgcgttcatcctttccatctgattcctctttgtttctttgttccccttgttttgctctcttcttttcttccagtttctgccatttcttcctccccttctattttttttcctgcctcttctcctatgcctaattctacattctcagaaaaaccgggaatatgaatgcaatcaccttatgattcatagtatttgtacttccaggttttaatatatcagggttttgttgtggctgttcttaaaatgtaaagctggaagccatcccagagggatgatcctgtttgttattcaagttgattggacaacccttatgttgattttcgaaagtgatgcaagaatttaaaactggccatagctttcagggatctcagtgctaataaactaaaacatgacttgtatggtttctttacaccaattctttactcttcctgtcacacgtgtgcaaagcctgggaccaggctgygtagtgtacacaatggaatataatcagcaatccccacccagagattctacttaggagaagacaagacccctggagtgggagacagagtagaggtacatgttgacaaggtcacaggcagtgaataagatgctctaattcgtgaagctagggagtcctaagagaaatgtttcctttggggagaaaggatccctgaacaaatacagagacgcctcagtcaaatacatccagcaatatccctcccctccacaccatacctgggttgacctggctgacttcagaatccaaactgcatattagtgtgctcagcacaaataagttcttactgtgcagaaagctcagcagaacagagaaagaggtctgtggcaggagaaaaaagtctcagcaaacatcagatgatctggtgcaggaccaaactgctgtatttcagtctggaatatatttgtgttttagccagtatcatctgaccaggtaaaccaaggaaggtagaatggtagtatgactcacgtttccttctcaatagacagtaattattgtccactcaacagttcacagcagaatcccacaaaagagcctgctaaggagaaggaatctctaaggggttgttaatgtaaaaggctggttgaattatggaaccctgtggaatatctaagcttagagaggtttggaaaccatttagaccagttcttaaccatcttggattttgaacctgtttaagaagctatagaaagctatggatctcctaataacaacaacaaagacaactatgcatatgagcacatagaatttgcataccatttaatgcctgctgaccagctgcttgtttttgtaaataaagttttattggaacacagcctcacccattcatttgtgtattacctgtgactgttttgcactacagcagtagagataagtgtttttgacagagaccatatggcctgcaaaatctaaaatagttactatgtagtcctttaagaaaatgtttactgacccctgttttaggttcaacccctccccccacacatctgtctgtagacactcaggggtccaaggagaacctctaaatcttaaacctatcactttacgtaaatatgatcttatctttgatccacacgtctggtccattgttccttgatcctatgccacgttgtaaatcccttaaggcaagcctataactttgcagttaagaacacatcatctgcagttagatctgcgctttaatctaaagtttgcccctcattgtgtgaccttgatgcagttaaacaatctcacttagcttcctttgtcatcggcaaaatgagttattgatagctacctcataagattgttgtgaggcttacgttcatataaaaccttaagagagtgctgaacacatagtaagtacttagtaaataataacaatgatgatgttgatcataaaggggggaggaggagaggagaggggaggaagagtttaacccggtgcctctgaggcctctgtgaaggccaatttcctctgtagtcacataggacacaggagaattgatgataaggagagttagtggatagacagcaaaacatggtgaaacccagaagcttaaaagctctaggttgcttcaaaaccatgagacagaatagcagtcagtgtctcctggtgaccagctctgggccactttctgttttccaactacagtgagtaagtagacagcttacctggggaaaaggtggtttgctctaatgtagtccttggaaagacactaggaaaggtcattaccaggagtagtgatggtataaaatagaagcattctctgcaagaacgttgtcttttttcttagcaaccatatgtgctgaatgcaaagaattgcacgcttggattggattctgctgaagattagtgaatctccgaaacactgtgaaaactaggagtgagttatttcacactcctaagtgtttggctaagtatgcagattcatttcctgtccctggccttcattttaaacagctcaattcctggtggggtcggtgacatcctgaatatgccacttactagatgtatgatcttggtccaattcctttgtctctgtctcgagccgcagggccctcgtctatgaaatgtggatacaattttacctactgtaggattattctgagggttatagtatgtacatgcaaagtgtaagcattgtgtcctgcgtagagaaaacactccataaatgctggccattattattactattataatagtaaaatatgatttaggaaaataatcccctttgatagccgtcactacatctataggtagctttagatctagctaggaagccacttcagtatttgtagaactcactggtgactgtatttaagtgccaccttaaggtaggcctcttcaaaaattcttactgactcttgaatgaataaatgctgtctgtggtttgtggctgtgctctttcagagaccttgcatggcactgtgttctcccccagccgatctagcctccccactcttgtgatacttaccccatgtgtacttacttgttcaatatctgctttctgccaaaattgcaatagccacaaaagtgggacctggcacataggagttactcagtaaatatctgttgatccaaagaatgaatgaatgaacttaactaattaactttttttattctaatattagtaagtaccaaaggaaaatcttgctgacacagaattatctcacagaacaaaaatgtactaacctcatccttaacagaggcaataattacaatagtatctatatttgctttatgtggtttctattcaaagtcattaggtgatttcagaaagtctttactttatactacatcccattatattttggaagaggttgggggaaggcgggagagttgctctaccattagaaatatggtacttaaaatgggccatctctatgtagttggtatgttgtgtatgcacatgtgtgtgctagcgtgggagaggggaggggaatggtgctgtccttgtgcaaacaatcaacatagcttctgkagcagkgtattctgttattgtgattttatcacctaccaatgacatgtaagcagggtttattgactgacattcttattttttcgatactttttaaattgaattgctctaaaggtggcaagagttaggcmtagagttagttgcacccacttctgcaagacagttgccaacctcaaacttgcaccatatattttaaccattacaataagccatgtttatttatccttcggaaaataatcaaaactattttctgtgaaccaaaagactgtcagaaaactgaatgttagtgatacagagaccgttgtggagaaaaaaaaaattggcaagcatcacctaattgagaaattgagatgttgaccattatggctgaacagcactctaaccaattagctctatattataggaaagagctacaagaatgtgcctagaagcaggaaacccattcattatgtgcctaaaatcaggaaacccactcactaaataaaccattttaactattcatactaagaaatgttaatagttgaaacaataaaaactttataattatttcaacagatgctgaaaatttttgacaaatctgctaaaatttgtgaaaagttaaatttggcaaactttaatatacattgctgctaaaacatgataaatttagaaacgggatactaccttaaaggaataaggacttctattttaaaactataaaaaacattaaattaagaataaatcactagaaccatctatattaaattagggagaagtcaaagattcttacatcaatgttctaaaatttctagggtatgcattaaggcatggaaaatatttaaggggtgtgaatgttgggaaacagaaggcaaagtggttacaaattgtgttaatatgattatactcctagaaaactcaggtgcaccaacttttagattgatgagaaataagtagagtggctgaattacaaacattcaaaggtcaataactcttctgtatgccaaaataatcaaagcaaatgtatcttatatataatgttgttaacaaaaaatggaatgcaaaggactatctttttttttcttttattatactttaagttctagggtacctgtgcacaacgtgcagatttgttacataggtatacatgtgccatgttggtttgctgcacccatcaactcgtcatccacattaggcatttctcccaatgctatccctcccccaaccccccacctccccggcaggcaccctggtttgcaatgctccccgccctgtgtccaagtgttcttattgttcaattcccacctatgagtgagaacatgcagtgtttggttttctgtccttgtgatagtttctgagaatgatggtttccagcttcatccatgtccctgcaaaggacatgaacttacccttttttatggctgcataatattccatagtgtatatgtgccacattttcttaatccagtctatcattgatggacatttgggttggttccaagtctttgctattgtgaatagtgccacagtaaacatacgtgtgcatgtgtctttatagtagcatggtttataatcaacaaaggactatcgttaggatccagaatttatgcaaggaaatatttccaaaattttatggagtgayattttgaaacatttgaacaagggaggatataccatgtccctagagggaaattgcaaatattatgaattttttccattatcccctgattaatttataggttgcacaaaatcacagtgggatttcgttaacctgaaaaaataattttaagtccatctggaaacaaattaacaggtaaaaataactaacaagtttgagcaagaaggtagtaagtaccttcctgcaaaatggcactttcatctgctattatgacatacgataaaattagataaataagcagtttactgttgattcaggaattgatacaaatcagtgsaaataataactataaaatagccctttaatgtgataactgaatcaatacaaaaccaatgagaaagcaataattatttaacaaataatttgaggaaaattagcaaggtatttagttttagaaaaaaatcaaatgtgattctaccgtatattactataatttccagayggattaaagggataaatataaacaaatatataatacatgcctcccccaaaaccatatagaggagaatatagataaatgtttaacctatttctaggttgcaaaagaagttctagaaattaacaaaagaaatcataaaaatacaaattggtctacttgattatattttaaaactcttagaaaacaaaactaaaagattacagaccagttaagaaaaatacatatacaacaatttataataaaagtatgtccttaatgtagagaaaacaacaaaagttaaaattttagctcaattttttaagagttaaaaatgatacagataggactaaagtccatctgttttattttttgttttttattattcgcatgtttttgttttgttttgttatttttagagacagtgtcttgctctgtcacctaagctggagtatagtggcctgatcatggctcacagcagcctcaaattcctgggctcaagggatcctcctgcctcagcctcccgaatagctgggactacaggcacacacccctacattaggctaatttttttkttgttgttctaatgaggtattactatgttgcccaagtaagactcaaactcctgccgtcaagtgatcttcttgcctcagcctcccaaagtgctaggattacagatgtgagccattgtgcccaacttacatgtctttttaattgtagtaacaccaccatattttcctactttgataccatatgtatgtatccataaattatggtaatgttctgtgcgtttttaattttacagcatattgtatgtatttagaactttattcccccagggttgtatttttagtatttttccatgtcgatatacatagatatatttcrttgatttttactactgtacactcttccattttatgaatatatcacaatttatttgtccatttccctactgatagacatcaggttgctctaaatttttactgttgcaacattgttgcaataaatatgtttgcacatttctctttttacccttgtgcaagagtttttataaggcaaaatgttaaaatgtattaaaactgagacctgcattcaaaggaatatgttaattttttatatattctatatgttttaaataataatttgaagattaatagaagataacaattatgaagagtattttaaagccaactgatagaattttttataactgaaataagtgggacaaggttaggataaagaatgtaaaatggggggtcctgcttggtggcagctcctcaaaaagttagcaagaccacctatagagccagaaccctccccattccaggtctatatatgttccgtgaaagcaaagaaccactattagtgtagacaaggtgtcagaggccattgtgttgggtggcactggggttgaaggatattcctttgattttcaggtaccaagtgctggtgtgattctaggatgtgcgaagagcccctggatgatggcgattggatttcccatctgacttcctggaaattggagcacacagtcaggttttatttgatttttttttttaaggataccacttcacagcctttaggatagctattatttagaagcaaaacagaagataaatgttggcaaggatgtggagatattggattcccttgtgcagtgccggtgggaatgtaaaatgatgtagctactatggaaaatgatacggcaatttctttagaaatgaaatatagaattgctgtatgatctgcagttccacatctggatatctatccaaaagaagtgaaagtagggacttgaacgaacatttgtacaccaatgttcacagcggctttattcacaacagccaaaaggtggaagcaacccagtgtccatggatagatgaatagataaataaaatgtggtataaacatacaatgggctattgtttagccttaaaagggaaggaaattctgacatgctgcaatatggatgaagcttaaagtcattatgcaaagtggaataagcctatcacaaaaaataatattacataattctacttatatgaggaatctagagcagtcagtttcacagagacagaaaatagaatggtggttgccaagggctgggagaagagggcaatggagagtgagtgtttagtgggtcagagttttagtttgggaaggtaaaaagttctggagatggatgayggttatgggtgctcaacagtgtgaatgtacttaatgccacagaactgcacatttaaatgtggttaaaatcatcacttttatgttatgtatatttaccacaataaataaagaagttgatatttcttatacttacaaagaggagaagggcatttgcaaatcaacaagaagtgtgaggcccctctctctagcagaaaaatagactaaatctatttctttatcttttaacatcctgtttaagggaaatgccaaaacaaatgggaaaaaatacacacacacaaatatatatgaacatgttttgcctcatgagtaatcaaaatgtgtacatatgtatgtttatgtatgtgtgtttatatttaaaatcgtgttctgccttatgagtaaacaaaaagtatacaaattaaaaactataatgaaacgtaattttttaacctatcaatttggcattcttttttgaatgactaaattctaatcagggattaaaatgactggtacaagtgaaaactttcacatcctgttcgcatagtaagtggcaatatgtatcaagtgttttttaaagcatgttttctaactcaataaatttcatctaggagtctggcttaaagaaataatccaggatgcagacgatggtttatttgcaatatgtttatttaagcattagttatgatagtggaaaactggaaataacctaaatcaacactaacaggaaatggctgaataaattctaatagatcaaaacagtggaatttaatgcagtcattttaaaatgtgggtttaaagcaaatttttctatctgggatattttttgtgatataatgttaagagaaaacccacaatatgtaatgctaagtcaagaatacaggatgcttgtcatttctaaaaaacatcaagtgagtataacatgcatttatgtgtgtacatatattaagaccaaaagaaatattcaatgtcttcaaggtggtgggattttaaaaaattttcatttctttctttatattttttctgtattttcacaatgagcagtcaggcagccaattggccttgtgttgaggtgctccagagggcagaaccaagactagcagcagtaggaaagtgattgaagctaatatcagtaagaaatttccaataagcagagcttttcaatgtggagcagacctctgggagtttctttctgccagcccaaaatgtttccagcagaggctgggtgaccaccatccacagtgatccacagtggggagaggtcacaagaacagtgcatcccaaccctggctgggccacagcatcacccgagggaggatagaatgcagattcctgggccatgaaccctatctacctggattgaaactccagggctggggtctagggatatgtatttgccttaaacttccccaaggaattctaaagcagcgagacaaagtttctacacctgagaatccctagattagagactttcaaggcagcttccaacttggagattcaaagcaattttgcaattcaaaggtctagagactatttgagtatctatcttaaaaaaacgaagacaacagtatagatgcaaagggaggcacggctggggttgaaggatggaatcatttgaagatcaatactttttcattcatttatttattcaaccaccaatgaccaagagcctgtgctgtaccaagttcttcatgtaaagcacttgggatatgttagggatcaaaaccgtttcctgccctcataatggtcacatttaggtcaggttaacataaaacgtagattcttgggcccaggaatgactgaattagaatccctggagagggacccaagaatccatattctataaatgttcccaaggtgctgcctgtatacactaatgcaatgttgtttttcaaaatatgggctttgactcataagtggtttgttatagtaatttagtgagtcaagaagcttttttaaaaaattaaaataacagaaaaaagaacaggaaaaggaaaggaaaattagaatgctgacacatggaaacagtaacttgtttcataaagcttctgtttctgtgccctgggccacaatgtaaactgggtttcagatggaaaaccattgctagaaaatatgatatataaaatacatcactgctctagtcctctctaacccctgcacgcaacagttctgttttagtccaaatctggaggtgagatgctggggcacactgaccaccttgaggagggacaggctgttctgggaatttgactcactgggaatatccctgctataatgccacttcctttttcttttggattgagcctagggctgcactcttgcacagatggtaaagtctccagcacatgttgcatcattttctctggtagacatgacagagcactgcacactatctgtcctggccttcgtggcagagttagagccgcatacagaaacgaactcctgggacccattgcttccatttgctaggctgctttttaggggaagaagagagcaggtcttatacaaccaattttccaggccaagtcctgggtatttgatttgggcccttcatatcaggtcaaaaccatatgcaacccatacttggcaaccaagatgaaagataccaattgttttaaataaaaatgaaaccggacggggtgaacaaacccacataagacaagctgaaaagtcctcccaggctctctgagaacccaagagcctgctgtgctgagcagaccagggatgttcctgtggtttacttgtttgctgtcacggaagttttgctgtcactaagaagaaaaatccaaaggctaattcagcataaatggtccccttggctgcactgagggcagtcacaggtgagtcataaacagtgttgaaaagtagagatccaccctagaggcctgagacatgctgcttttatctccagctcagagcaagaaaaatgtctcagaaggaactgaaaatggaattactcaaactgaaaactgctgtcctcaccaggaggattcctttcctgacccaagtctgggaagtgccactggtaaacccccagaaatgaatttgctcatcagtgaaggacagagctagatattctcagatgtacccagtgacattttcgcagcattagaagccaagcctccttcacctcaaaccaaatcactgaaatgcttgattctgtgcagctgtggtagaaatgccctgtatcaaaggcaggctccagtaccacaagccaaagataaataacagaggaaatgatcaagaccatgacctcttgatgaccccctggagctaaatctttgctagacctcagaatatcaaacaggccaccagcccgccaagagcagttcatgaacagtgtggaagccacctcagcctgcgagagcctggctctctagaaacttgagacatcccaaaggaatttcttgttttatcctcccaaacaggggtttgttaattctttcttcaagtgaagaaaccctttccaaataaacgtacccagaaaaggtattttccatttacttggaagttggggttgtatgtatctcttgtccggtggtgaactattagtattttgaaaagtgtgttctcccaccaactagcaaaaaaaatgaaacagaaatacaagggccttctcctactggagattttgattatagattcaaacaggcaaacattatggagtgtttactattggacaagtattgagctaagttctcagaggatcctgagtggaaccagactcaagttgctcacagagggaaacagtgggcagctgaaacttaggtttctttctcaaatcagtgtcatagcacctgaaggaaactctgggccaccacttcgagtttaggaacccctgaggcacaagacagcaactgaggctgaagggacccagtatctaacaagcaagacttgtcccctaaattgcctttggagtgcctggcctgaagactgaggcaagtcagctaaatcctcagaataaaagatgtggagagcagccaggagacaccacctgatgctcaaggagaaggagatcttgactgcacttgaccgcactaggagtgcaaataggtctaatttgcgtctcttagctgcaagactcaccgtggagtacaaaggtcgatcaacggagattataggtagaaataagtgtcattgtttcgtttactcctctctcctcttgtcaaagagggcctcaaagtttagaagactcatgttcccggctggcttaaagaaatgactcttcttctcagggctttgtcagaaatatgaagggtttggttagacaagtggatttcaaactgcactataagctgggcgtggtcacgcacgcctggagtcccagctactcgggaggctgagagaggagaaccacttgaacccaggaggcggaggttataatgagacaagatcttgccactgcactccagcctgggcaacagagcgagactctgtctcaaaaaataataataatgataaaacaaaataacaaactgtgctatagtcatagaagttatattcaaataaaaccttctattgttgtgtacataaatcaagtccaaagaagagcagcactacaagttaaagaaggaacacattgtattcctctaaggccccctcaaagcagtgtaagccatggataaaggagacttctcaggcccctgttgcccaattctgaaacccttttttaaaatgcccctcagacatccatgacttctgtctttggcctgttgtggggcagtcacccaaataatggatcaagaccttgtaaacccagagcctcctgtttcagcaggagtcagttaggccaggccctagtttgatgatgggtaagaatgacggctcagacctgcctaatatagctgtcactttggtttttctgccaaagcatcaagcaagcagtgaaaaaacatgaaattagggagggaggactaataaaatagtttcatgcataggacctcagcttagtatactagccctatttacatatagacaacctattctcaggaatctcattgtaaatactccttgattcagagaagtatcagttcatatccactccctgtgaatgccaaaccagggccctgtgtatgaaaatattttattcaatctcatggttgtcaaatatgtttaaaagtggccaaagaagtctgaaagatttgatgcacctgcattttgcattatattgctttctccccaaagaggatatgtctctttgagtttcactgatctttattatagattccagcaattttctgactctagtgaacatttgttgattgtccccctaacatcagggcttaacagcctttctttccagaggttttatttgagtaggcttcctttcactaccctcagtccgtgtggcctggggtggggcaagccaccatgtgctggagtggtcagaacccctaagcctgagttagtcagtgcttcatgttgtattggccacaccaactggttcagaggtaaaataaacttgaaataaattcattctgtcagactgggactcagaacattgcaagagtttcccactggacttgaagcaaaagatctgagccaaagctgctggtagccatgccactctgtggggcaagtctagagctgccagggtccccataggaaggtcaagaataaagttaacacagaggatgggagagccaagagatggagataaactgagacctgatggcatcatttgagctctgaattcagccctggcctgtctgcctgtaggaatcaataagttcttctttcgcttaagccatcctgattcatttttgaaactgtcattctagtgagagagatatacagcatgcaggggccatggaatcaacccccccacagccacctcccacatggtcctattgcatggtttggccatgtctaatcattgggaattgtctgttcatttgtttttcaccaatctggcatggtagcacatctttgaaggtgaggagggcatcgggaaatatatggagagctttcaagttttttcaatgactgggaagtggggaacacaagtgacatttaatggacacaggccagggatgctaaatggtcttgagaggtatgggactatcctgcctaacacaagatagtccacccaaaatgccaatagcgccaccattgagaagccttcagagggtgagcttgcatattgaaataacgcaaccctgaactatggtaggtctgaaaagagatccaattagtgattatttaatagaagaatccatatgcagttcaaaatctttgaaaagcgtaaaataaaaccaagtgttgtctcgaataccttctttgagcactgccaaaattcacagaacctttctgtttatgaaaaaatcttacaccaacgtttctcccctataaggctgtagaatttaattttcttaccaagatatttaaaatcaaaatttctctgggaacagcacagccatggcaggctctcttcccttctgtgg

SEQ ID NO: 96688 - DNA, 15873 bp, Homo sapiens
ttgggggactgaggtgggaggattgcttgagccggaggtggaagttgcagtgagctgatatcacgccaccgcactccatcctaggtaacagagcaagacccagtctcaaaataaataaataaaataaacacaggtactgaatgactaggaaacaggaaagtgtaagtaaaaaggagggctaagtaactccaggtagaatgagtgtgtgctttgccagttctaaaacagtataatttctgctatttttctttctattggacaaataggaaattcccaaaacaccagaccatgccccatccaggaccttctatttatatactgtgaacatcctgtcagctgcccgaatgttgttgcacaggtgctacaaggtaactcaatctggaccttctccccatttcctccatacggtcaagtacccctcatgtgcccacttcgccctgagctgctgaaatagaactatgtgcattccttgtctgtcttctctttcctcagagcatagccaacttgatagaaaggaggcaatttgaaaccaaagagaataagtaagtaacattttcagttgagttatttacatctttcaagatcaagggcctcaggggaaatttcctctagaaataggaatcaatagacgctgggcctggcagggtggctcatgcctgtaatcccagcacttcgggaggctgaggcaggtggatcacttgaggtcaggagtttgagaccaacctggccaacatggtgaaaccctgtcttcactaaaaatacaaaaattagctgggcatggtggcgggcacctatagtcccagctactcgggaggctaaggcaggagaatcacttaaacccagtgagtggaggttgcagtgaaccaagatcacgccactgcactccagcctgggcgacaaagtgagactccatctcaaaaaaaaaaattttttttttgagaagtaggaaccagtagagatagcaaccagtctacttgcattgaatcattggcttagattagtgtaaatcatgcattagtctacacttttctaacatgctcccagtgaaataatttttcagattaaatttgtgagaaacgtacaaaagcaccaaacttttaagtgcaaatgagaggcaataagaatttcaggagtgaagttatatttccaaataagtttgtagaaaatgtccttagaaggtgacattatctactttgatcaggaaaatggtaaagggtggtgggtagtgcctcagacacacgtggtaagagaatctcccaggttagggaagatgtctcagagttgtgtttgtttgacaggcgtctactagaaaaatctcagagggtagaagccatcattgcatctatgcaggctactggtgcagaggaagcacagttacaagaaatagaggagatgatcacagctcctgaacgtcagcagctagagaccctgaaacgtaatgtcaacaagtaagcatcataaacttcagacctgcatttcagaataccatccagaaaatccattttgacctcctgtaaccctccagcttagcatgagcaaacctaaactcactgtctcctccagctcacttaacagaatttaatccacctatttttgtaaactagcaattctgaagatgttctgagcttcttctccatcaccatatacactctcttgttcatcaagtactgataaattttttttaagagacggggttttggctgtgttgcccagactggccttgaactcgtaggttcaaacagtcttcctgcctcagcctcccaagtagctgggactacaggcaagtgccactgcgctggcttaattttacttgagtcatgtgtctcaaatctggcctttcatcttggtccacacgcaggccttcatcacctctttcctagaccttcacatttcagtgcacaatttgtgcacctctttcattaaatttatttcttaagtatttttttggatactagtttagtggtcgcttatttcagttttagattgttcattgctagtgttatacaaaaacaaccaacttttgtgttgtgattttgtatcccacaactttactaaattcatttattaattctagtagtttttttgcagattctttgagattttttataataggattatgtcatccatgaatagagagagttttacttctgtcttttcaatctagatgcctttactttttttttttcctgccccattaccctggctagaacctccagtaaaaggttgaatagaagtacaaaagcagacatctttgttttgtttctgatcttaggagaaaagcttttagtctttcaccattaagtatgatgttagctgtgggtttttcctagatggcttttgtcaggctgaagaagcttccatttcttcctaatcaccactcactttaagcttcagacactcttagtttcttgctattttaaaacacactaggtccttttatacctgtgcctttacgttcgttttcctgattgcaaatgaagactaccttcccccaggacagaggctctgtattttgtattcttagcagtttgcatggtgtctggcacataaagatgctcggtaaatagcaaaatgatctactggttctcctgctttctttccatccactctcaagggtaaccaagcagttatccatggccacacccaccctaacctctaatcttaaatatgctaatgaacattcagtctaggcaaatgcctttacttttcactcaggttggatgccagtgagatccaggtggacgaaaccatcttcctgctggagtcttacattgagtgcaccatgaagagacagtgatccagaagaagcatcttcctcagaagatctggggggatggaaagcaaaataaaggaggtgcctggatgcattatttgcagtgggataagtcgcagagtcttcaactaaacccccctctctatcccctgcagcccaggatacacctgaaagaatttggcatatttagatccattgctgtagtctcccctcatcaaatcttggcagtgggaagaaccttaaatcaacaaggttaatcatctatcagatgcatctgttcccataaagaagttacccacacctatggttacctatatccctggcaataggaaacttcctaagaagttaattttattttcagatgtctatgcctgttctttattttgttgagataggtgatagatagatagatagatagatagatagatagatagatgatttgttgttgttgagacaggatctcactctgtcactcaggctggggtgtaatagcgcaatcacagctccctacagccttgacctcctgagctcaagcagtccttccacctcagcctctggagtagctgggactacaggcatgcaccacacatacccagctattttttatttatttatttatttttttgtagagacagggcctccctgtgttgcccaggctgatgaactgtaatttttaacacacacagtgtagggaatgtgaaagactatcacagagtagaagaaaaaattattttcagggttagcaggtggattgtcccaagcagtcacactagaatctgtggactgaagccacatttgccagctccaggcttctaacacatctgaaactgtgtatgtagaacagctagctcaatgcctggcatatggtaagcacacagtaaattagcgccttcctcttctccatggttccttaaaactggcaacgctaaattctctctctcagtatcacggatataatttgtcccagcagctttaattcatttaaagcagttagatgttttataatatcttcagttttctctcaccaatgtgttttctaattgtttaaacacttgagtgtcaaacaattgccagccaccatactaaacacaacatacaaggatagataaataagacaccatctctgccctcaagccagtcaccatcatttactaagcacctgttttgtgctaagtactggggtaagccttggggatataaagattaataaattttgagcatacagtctagtaggaggagacaaataagtacataagtaccaggaagtattaggggtgctacagtagaagagtaaacactatgtacagagaggccagaaagggaaaagggtcaggcagggaagggaacacagagagtgacaatgtatagtttgaaagatgaggatgctttatttgcaaactatcttaacaagggattcgtaaccagaatatataaggagctcaaacaatagcaaaaagaacaatccaacttaaaaatggccaaaagatcttaataggtagttttcgaaagaagatacacaaatggccgacagatacatcaaaaaatgttcaacatcactaatcagagaaatggaaatcaaaatcaatgagataacatctcaccccaattcattacttttatcaagaagaaagaatgaatgctagtgaggatgtggaaaaaggagagccctgcctggtacactgttgggaatgtaaattggtacagccactgtggaagactacagaggttcctcaaaaaactaaaaacagaactatgctccagcagttccactactgggtatatatatatctccaaaaggaaagaaatcaatgtatcaaaaagatacctgcactcccatgtttattgcagcagtattcacgatagccaaaacatggaatcaacctaagtgcccatcaatagatgaaaggctaaagaaaatgtattattcagccataagaatgaatgaaatcctgtcattggcagcaacatggatggaattggaggtcattatgttaagtaaaataaaccaagcacagaaacaaatattgcatgttctgtctcacataggagctaaaaaagtggatctcaagaaaataaagaatagattggtagttaccagaggctaggaaggatggggaggatgaagagaggttgattagtgggcacagataatacagtttgaagaagtaagactggtgttggatagatcagggtggcatagttattaatttactgtacatttcaaaacagctagaagataattttgatggtgcctaaatcctgtaatcccaacacactgggaggatcagttgaagccaggagttcaagaacagcctgggcaacagtgagatttcatcgttacaaaaaaatttaaaaattagccaggtgtgggtagtgcacatctgtaatcacagctactcaggaggctgagacgggagaagcgcttgaaccagggaggtggaggttgcagtgagctgagatggcgccactgcactccagcctgggtgacagagcgagactccgtctcaaaaaaaaaaaaaggccgcgcgtggtggtgggcgccctgtaatcccagctactacttcggaagctaaagcacgagaatcgcttcaacctgggagatggaggttgcagtgagctgggatcacaccagtgcactcctgtctgggctgtagagtgagactctcaaaacaaaacatcactctggcagcactgtagagaatgaactggtaggggcaagactatttggagacttgcaataatatttcaggcaaaatacgaggaaggcttaaactagggcaatgaatgaaggctggagagaacatgggtttgaggaagtttaaggagatagcatctgcatacttggttgccatttgagtgaagtgaaaggagaagtggtatcgaaaatgttatttggtgtgtttcgcttggagataattaattcgaagtgatgcctgctgtaacaggtgtgcatagtgctgtagaggatgcttacagttcagcttagggctggttggaagtaacatgtgggtcctgaagtcattcggtctgggggtcattgtcctaaacagagaagataggaaggaataggagctgagcatttagaggtattcttctttgtggtttaatattatacccatgggtcatcctcaaaagatgtgcccttatttccccggggactttcggaaaccccgctacgaccccgcggaacgttccgaggggaagcttctctaggccaccagagggcgccaggcgggccgcagcgactccagagtcgcgttatggccgaggtgcgggtgcagctgctcctgtcccggcgtccggagtcggtgagcttcgcacggagtgtgtgtggcctcctgggagccggaccagggctcgggacgtggcccattcactgcagcttgaagcgaggacggcttgtcctctcgagcaggcccttcccaggcgcctccgctaggcttccgctccaggtcggcagaagggggccccagagcgggggcagtgaagggccaaagatggggactgaaatcgggtgggaactggcggcgaggaccccgcccccaacgcgcggtgtagccccatttttggaagtcacgcccacccagtgccgcccttctgaagccttaacccagctggcttccttctgccagcgaccccctttctgcccttttgcggccctggaggagcggcccagggtccctggggctgagctgcccacagatcgaggtgtggacctgggtgtggccgtcattctgcagtccagcgacaagactgtcttgctaacccgaagggcacgcaccctgagcgtttcccccaacctctgggtacccccgggtgagtattctggggacaaggccccaagtacagagaagaaatttgccctttccccgcaacaatgtttttcccagtctcagaaggataaagtgggccccaaaatgtggcatgttcatagtcacaagggactgcaactccctctgtgtccactggaggggagaggagtgtcaacagtgagtgggggctccctggccaagaccaccaccattcacctactggccccactgttgttgcaggtgggcacgtggaacttgaggaggaggtaaccagtcagctgatccaacctgagccaagagacccatgcctgggaccatcttkggtgtgggctgagggagrggcaagcaaaaggacttggaagagtcaggcactggcccctctgatgtgtcttctctgactcccagctgctggacggagggcttcgagaactttgggaggagagtggactacacctgccccagggccagttctcttgggtccctctgggtttatgggaggtgagacaagtagctgggagaagctcctccatagatcagcccctacctgccttggctacaagggaaacaatagcacataagtgggctggaatccccaaatccataaccctcacccatgtccctgctgtgtcatctgtaccatccacgccctcagcttttggccaccattttgtttcaccctaaagctgtattarcaaagtctcaaaaagtgacacaaagggccgggtgcggtggctcacgcctgtaatcccaacactttgggaggctgaggtgggcggatcacctgaggtcagaagtttgagaccagcctggacaacatggcgaaaccccgtctctactaaaaatacaaaaattttagctgggcgtggcggcaggcgcctgtaatcccagctactctggaggctgaggctggagaattgcttgaacccaggaggcagaggttgcagtgagccaagatcacgccattgcatgccagcctgggcgacaagagcgaaactccatcttaaaaaaaaaaaaaaagtgacggaaagttctcacttttgctgttttcttttcctagtctgcctaccctcctaggctgagctggggtttacccaaataccatcacattgttctgtatctactcgtgatctcccaggaatcacagcagcagttgcaggtagggctggcagtgagggaaggaaacagggctcaggggagcccaagcaacctggttctgactgtgattaggagctgggcgggggtggcgggggtagtcagagataacgaagaatatgcaatgccctttccccttgctcctgcctttctccatgaaacctgcgggtaggttttgatcacgaacaggcagcccagggagaggcaatgactgaggggtcaccatgtctgaccccaggcccggatccaaccaaacccaaatgaggtgagcgcccttatgtggctgacaccagatgtagctgctgcagkggctgccgcagaggatgggacagagacacccggacttctcccccaggacctaccaccctctgtcctgtaagtaagagcttctccctcagcctctaatacaccaacatattcatgttgagaagttcagcgtctatcctgtcctcaggatggaattttgtgttgtgggggagatttaaggagagtgggtcagctgataattaagaaggtacatgaaatctaagacactgaccatcaaaccccaaagattcttgctctaactggctagcattgaaggtctaagtgtcagttctaacacaggggcaagtcatttaaccctccttgaacctgtttcctttctgcaaatgaggtcaacacccacccacctcctgtggtagttgggaggattcggggacctaacatatatgtaagttctttgtaagctacaaggcacagccccaacaggagttgtcaccatgcagtgcagtggaactagaggaggatggaagagcccgacctctggtcctgcacatgtccaccctcctgcggatgatcccaaccatggcagaggacaaagagagagtcagcactggaaccaagtttgccctcaagctctggctgcaacatctgggcaggtaaaagtgaaaaaggactggagrgctccacagtactgggctggaatggtctagtttttacaggcacgggggaaagcaggaaaggacaacctctcttggaattcctccacagaacacccccaccgtgtaaaagtgcagcttacctggacccagggccagcaaaggaagaatggaacatggaccctcttcccccaaaccaggggtctggaaagtgaagtgtaaaatcccctccctagcccatctccatgacactcacagaacattcacaacctttattatgggtgagagcttcactacaactttagaaataaaaagtaaaattacaacataggtcctaggccttggcgagcctgaaaaaraagattgggaaggagggcacagggtccttccacctccctggmaaggtgcagaatgagccaggcctaactacagggccatgagcctctaraagcttaggggggaataagaaacactgtgaacttagatatataaatrgagagagacccaagcaataggccgggcctgactcccagacccctgcagatcatggctaaggccttacatcctcctctgtcatactggagtaggaggcaggggaagtcatctttggagtattttggtttttcttatttatgtacaaaaaagtccacatccacaatccaaaataaagttctctgtccatctctgaaactgcctgtctcagtttttccacctgtctgtttggccgaagggaatggaatagacatgaagagacaatggatgtgaagaagaaatagagccatgggtttgggtaataagaagagagagcatttggggttcaagagaggtgccccttccccaagaggctctagacatagtcaaggctgagggttcagcccttctcctagctcacataccatcccatttgcctcccactgcctaggttaacatacccaaaggaatgtgccaccatctaaagaacatttccagaaacagaccccagtgtccttaaaaagaggttaaatattaaccctttgggtgctggccttgtcaggcagagatgaggccaaaagtaggcatctgtgaaggtctgtctggcccttggccagagcccccagagggatcagagtagctggggttgggactccacagcatacttgctcagtgttgggggacagcgaagtttccataatccagggaactcagtccagggaaatgatgtctgaccgacagccagtcaaagagggacctgagggcaggggtcctccatgcccctccctcaaggcccccccaggggccacaatgctgctgacacggccaggagggggcgccggagtggcgctgcagtgggagctccccagcgtgggggccagtgggcccagaaagtgagaaggggtccctcggtactggaagaagtggccaagggcatcctgttcatctagtgaggtgatgacagaggggccatagtgctaggaagaatcaagggcatagtttaagatctcaatcccgacttccccacctcccagtcactcatctcagaaatgccgtatgagagcaatcaacccctgtggatccgaaggtattctcttgagaagcaggagagcctctccctctttcccctacttccctacacccttcccctttccctgccttgagagagctcctccaacttgttaggttcttggctttgtgggcgtctgaaatgtgtggaatgtccggttagagcaggcatggtgctctaagtgcacacgggggtaggggtgagtaggccagggcagaaaagtaacaggggatctaggaaggaggcctaagtaggaatctcaggaactaccagtggggctgaggagataataagatacctacaccccactgccctcacgggaaagcagatttacatccccagagatcataagagagggaggggccccatcagtgtctagaaaggaagcttcagagatctgagaccttctgaagaaagaaccacttacctgactctctgtctgaagaaatgaaaataaatctaaacctggcaggaaaagaaaaatcaaaattaacctcctatctgacccctttaccaccaaaagacaaagcactgtggactgtggccccttgcaggagaagcaggaggctttgagaaggaacaggggttctgatgtagctctggggagggtgtggcagtgcagggtccatcttatgacccatgtcataccttggatgtcggctcccagtgggaaggcaggtgggtactcatgtagtgggagactggacaggaaatccccacccaacgtgcccatagcagggctccttagcaccgaggatggctggtggccagatgtcaggactctgtgggtagagaggagctgaggcagccagcaaaccacagatgccctcacccagctcaggtccccaggttccctctctgtcccctccacatttctcttgccccaggctttgtccaatgatcagaaagcaatcctgacttcttcccctgtccgttttgctgtagactcagcctattttctcataccctttgcttccaggtagggccgggatggcagctgaggtgacagaacagtgcttcttggtagggggcagatcctcctcatctgatgagctttctattgtcaagtcaataacttcgaccttcttcttattctctgatggatctcccccctggactgggctgtactggaggcctgtgggtattaagaagactacgtctcagagaagaggccatccaagatttagcttagctggggaacagggggtcactcaccatccagcccataccctggcggggggcaaacctcagatgcctccttcttgggtttcattgggcaccaggatccatcttccatgaattggatctcatcacaatctgaacaggaactaagaatctccataaataaactgggggaagagagagatgaaaattcacggggctgggagatgagcagaacagtagccagagttctgtaactcaccttcctgtatctcagtttcctcatctgtaaaataagaacattatccatcctactggaccgctctgagttgttggaatcaaataacacaaggtatgtaaaagagctttgcaaagtaagtaataggttttaaaataaatacaatctgaggctgggtgcagtggctcacgcctttaatcccagcactttgggaggtacaggcaggtgaatcacttgaggctgggagttcaagaccagcctggccaacatggtgaaacctcatctctactaaaaatacaaaaattagccaggtgtggtggcacatgcctataatcccagctacttaggaggctgaggcacgagaatcgcttgaacccaggaggcagaggttgcagtgagcctagaccacaccactgttctccaccctgggaaacagagcaaggctctgcctcaaaaaaaaaaaaaaaaaaaaagccggcgtggtggctcacgcctataatcacactttcagagactgaggtgggtggatcacctgaggtcaggagttcgagaccagcctggccaacatggtgaaaccccatctctaccaaaaatacaaaattagccggatgtggcggcacatgcctgtaatcccagctactcaggaggctgaggcaggagaattgcttgaacccaggaggcagaggttgcatgagctgagatcacgagactgtgccataccactccagcctgggtgacagagtgaaacaccgtctcaaaaaaaaaaaaaaaaaaaatctgagcacttacgtgtagtataaggaacaaaaggagcagagacacagaagtccataaaccatctccaaaaggcactgggtctttggctttctaaacacttgtgtaaaaataaataaataaaggcactaggggccaggcatggtagctcatgcctgcaatcctagcactttgggaggccaaggtgggaggatcacttgaggccaggaggtcgaggctgcagtgagctatgattgtgctactatactccagtctgggcaacagaacgagaccctgtctcaaaaacaaacaaacaaacaaaaagtgggggagcactgggaacaggaaccataatgtagattccaaaaagaggttaagactagcaagatcaaaagattagaacatccaggccctgaaaagaaccttattgcaatgctcagtgggaagtcaggtagttgttataggtgatatattatgacagttcagtacactggctctgccacttaacaatataaccttgagcaaggctcaatctctctcggcctcagtttcctcatgtgtaatgatactacctatctcatagggtttttttttttctttttttttttctgggtgagtgtcactagccaatcataggattatttctttttttgagacagggtctcaatctgttgcccaggctggggtgcagtaatgcaatcatagctcactgcagcctcaaactcctgggttcaagccatcctcctgcctcagcctcctgagcagctaagactacagtcatgagctattataacatgcctggctaatttttttaattttttatagagagagggtctactatgttgcccaggctggtctcaaactcctagcctcaaatgatcttcccatctcagccttccagtgttggaattacaggtaggagccgagtccatagggttattgtgaggattcaatgagataactcatgcaaagtgctcagcaagatgccttgtatatactaagtccttaatgttgccctccccctccacacacatgcacatacacacacacacacacagactggtaaaagggatagataaggtgagaattgcagttcatgtgaggggaagtaagccatatgaattaaaaaccctgaaggaggtggtggctaaaagaaaaaagaaatattataggctgggcatgttgtctcatgcctgtaatcccagcactttaggaggctgaagtgggcagatcacctgaggtcaggagttcaagaccagcctggccaacatggtgaaacccagtctttactaaaaatacaaaaattagccaggcatggtggtgggtgcctgtaatcccagctactcaggaggctgaggcaggagtatcgcctgaacccgggaggtggaggttgcagtgagccaagattgtgccactgcactccagcctggggaacagagtaagattccatctcaaaaaaaaaaaaaagaaaagaaaaagaaaaagaaataaccaagaaaagaggttctagtggatgtcctaggtaagaggaagcaaaatggccctacccatcaatgataagagattcatagggagccttcttgtcacacacaggacatgtccatgtaggcttcttctcattcatctgtagataaagggcagcatcgaagctctgcaggtgggcgcaggtgagggcacgacaagggacagtcaggcgcatcttccctagctgaggagaagcaagttctcttgtcagaggccctactctgatttcatcccagaaaacttcacgccagtatccctaggaaccctcatcaaagtccacaggctaaacccaactcccttcccaccctgttcccttctccccttttacccaccgggcacatgagtgacacccggagacttgtagtggccacctcactgtcagggtcagcagtcaatttctccttgactgaaacaaaagtgaggccagagccatggggtcagcaaggctggaggaagcccaggagttggtaaggccaggaacagatggctctggctgagaggctgctgggtggagcgtctttgggggccagtgggacgtcacatggaagtggtctgggatatggatgatgaaggctgggtgtgggggattttcccatccctgaagatgcttaaacatagcgtgacactctggctatgttagagatgatctggaggagttgaagcatcatgtgagggttagattagaggacccctaagattctttccagtccggagagcccatattctagcagggctggagttagggactgtgaggtgcaaagcagatacatgattggaaattcaagggtgcctgggagtggtccaacttcaactataaagactggaagactggtcaggggtagagggggagggttggggttcatgtgagaaggggagtaagttgtcaaaaaagaggtatgggtttaattatgaaggctggagggccaggaagacttgaatccagatcaggtggggaagagaggaaagatgttactcactcagtgcccgcgagtggtctgggttccggataccctttgctctgagtttttgtagaagggttcctgcagtcaactgcctcaccaggtacacagacaaggagtaattctacttggaggcagggggtagacaattagcctctgcttctcataccaccactgcccacttttgttccatgaggaccagagacagactcataaagaggaaaatgcttccccaacccaggacactggatggttccccttcaccctcagcaggcttttccaggcacctgctttagctgtgctcacccgtccgaactcagatgaccaattgaccacaatggtgttgggaacagtggctgagagtcgagccaggggtgtgatgttgatggggcggctgggcctcttgggctcggccccattcttggttgggggaaggtaaccctggagaagggagggattggtcagtggagaagtggctctgggaaggggctctgctctttgaacaaaagatatcttgtctcgggttattcaatccctggagggaaggccaactcgctcactcactgaccaaggggatggaggcccattcagtggctcacaaaactggagcactgtctagggttatgtgtggggttcactcctggggagaaaggagagcttatttattgactgagaaaaaaggaactcactgagtccctgaggaggaggaataaggatgcctcaccttttctaactctcagctctggggtcaagtctttctggccgggtgtactggctcatgcctgtaatcccagcactttaggaagccgaggtgggtggatcacctgaggtcaggagttcgagaccagcctagctaacatggtaaaactccgtctctactaaaaatacaaaaattagccgggcagggtggtgggcacctgtaatcccagctacttgggaggctgaggcaagagaattgcttgaactagggaggcagaggttgcagtgagcagagattgcaccattgcactccagcctgagtgacagagcgagtgactctgt

SEQ ID NO: 96689 - DNA, 23204 bp, Homo sapiens
  misc_feature (1)...(23204): n = A,T,C or G
cgagtaagttctgctcatcacctctccgagttccaggctgcctgggttagttctgagtcttcacgtgtggtcaagcaccccggttcccgcccctgccctagccactccttccttagcccttgccccctgcccggacccgtgtgccgctgctcacatctgctgtcggctggttttgttgaggtcctgaccacagaggcgcgcagcaatgaagtggccccggaaggccgggatgagggtgactgtggccacaaatcccagcagcgagacgatcaaattgatcagcagcggcatgggcaattccgagaaggcccacatggtgaccggtcaggggcccggctccgccgcctcttcaggtaacgggcaagctgagcagcagtcctgaggcctcagcagtatggagtggccgctccccacaggcaggctcttcccacaccaatctgagcaaaacccagcaactctgacttgagccgccgtcgggacaccggggaacctctctaaggcaacctatgttctgccccgctgcacccgcctatctactgtttccgcccggatcttgttcgctgaacaaccattactgcggaaggcggcggccgccatttttaatatgggcattagagggtggggatggaagtggaagagaagtgtgattccaaatttcatcctatgttcaagagtagaatcaccgagagagtactggaaacgcaattaaagaaaggcagccaagaacggatacttccctaacattatgttaaagatgtactacccagagcggaaatgccaattgcccggttccaagatgaatgcctccttgtaccacgtgtctgacaccgctcacattccggttccacgtcagttttagctccgtccgcctccataggtcaagcttaaagggcccgtacctctcccttaatctgggatgcctccggctccaggaagatggctattgaaaggcagggggtggggaggagggacgagggtgtggagacgcgcctgtttcttgcaggaaacctgttgccaacatagtcggaagccaaggtaaacacaactcagttcccggaaacgcagctacgatttggaaggatggtgtaaattctaaagcgtagatccttgaaaagcccctcccactctgtttttcttgtcctcgattctggtatttttttctcagcatcccacccaccttctgccccagctgtagcagttagttgcccggcaacccagcgcagcacttcactgagggattgggagtaccctcaggtcttggatttaactcgagacttcagcttggccgtggatcactgcattgtacctagctcccacaaggaggagatggagatttccaggctgaggctctggaaagagctgaggagggagaggaatcagacccacaactgatttcctgtgagtctgaggaactcccagtcaggtttcttcctgtaggtcactgtgcattttgcttggcctcctgcaggttgctgtgcattttgcttggcctgttcccctgcaaacaacaattcaccagcttttttttttttttttttttttttttttgagacagagtttcgctcttgttgcccaggctggagtgcaatggcgcgatctcggctcaccgaaacctccacctcccaggttcaagagattctcctgcctcagcctcccgagtagctgggattacaggcagtagctggaattacaggcatgcgccaccacgcccggctaattttgtatttttagtagagacgggatttccctatgttggtcaggctggtttgggactcccgacctcaggtgatctgcccgccttggcctcccaaaatgctgggagtacaggcgtgagccaccacgcccagccagttcaccagcatctttattacctttcattccccgacaggctcttaggcggcaaatgatttccatttgtcagagaggaagtcaccaccagtgagttagggaaaggactccaatagcctagcgctttgtccactcttccctctatggcatgttccaggagtcagggtcatgttgaccgtttttaagccgaagatagtttcttctttccctcaaaatcagatgtgaggccgggcgcagtggctaacgtctgtaatcccagcactttggtaggcgaaggtgggtggctcacttgaggtcaggagttcgagaccagcctggccaacacggtgaaaccccgtctctactgaaaatacaaaaattagccgggtgtggtggcacatgcctgtaatctcagctactcaggaggctgaggcaggaggatcgcttgaacctgggatgaggaggttgcagtgagccgcgatcatgccactgcatcccagcctgggcaacagaggggaaactctgtctcaaaacaaacaaacaaacaaactaaatcagatgtgaaatggcttttctacttgaaaatggctctaattaacaacaacaaaaacccagatatgtataaaatacataaattttcgtaatttacttgctagtattccaccagattttcagtacttatcccactgctattatttttctgtgtgtgttgtgtgtatgcacgtgtgccccttttaaactagaaactcccgggaggcaagtgttttctcttccacagggtgtccccatggggctaggaacacagacatctgtgtacaaggaaggcatcatcacacataatgaggctgaggctgaaaggaggactgagggcaataggtgcatatggagggagcaattagttgtgaccagagtaagtggtcttgaggaagagaagtatcatttcagtagattataagagtagaaggacctttcacaggcagcgacagtgagacgccagaagcaggtggaaaggaggagcttgtgggatcccagaggaggcagcattcagttatcttgttgatgacgagtatactgagactccctggaggtctgagagccagtctgtatctatttccttttttattaggaggccaatcctaataaatcttccttcccagcctggtattgggaagctttatctctttcttctccagagatcattagccctccctaccaccaccctcctggggagggtgggaggatgtaatcaaagacaagagagactaaggattcatcatccacatatacatgttactatcagaaaatggttactaagatacttgtcagataatctgagtatttttgttcccatgatgataaagtcccagttgatgatcagactaatcagaaggagaaacaaacacatgacttttggcttcacttgaaattgtgtgccttccctggtaaaagttcaaagcgttttcctgaatgctgaagccggccctaggattcacagaccagttgacttgtcagtggccctggactgagcagacagtgtttgagatgcacatctcttctaagtagccttgagtggctcccaatgagcaaggccaatccactgaatgtgattgctagacaaagcctgtcccaaaaatgtttcatagtgccacaaagacaatgagacccctctggatagtctggggctgtgatacttgcaggactctatctgtggctctgtccagtcagctgaatcactctttttccttttcctcccacctctcccctcttagtctagaaaaaagttgttaattaaaagcaagccccaggatttcccattccactggtatggcatgaatgatatttcaaaagacagaaatggcatagaaattctcaaagcatacttgagtattttctgttagacttcttaaaattacaaagtttgttaatccctactatgtgcataggaagctcttcagtactgtggaggatacaaactaatataattgcagttgcttgcccccagggagtctacttcagcatatttggagcatcttggttgaatttgagggaagagagatgactaagacatggttcccacccctaggcagcttcctgatgcatggaaaaagcagacatataaacaatcagctagactctaaggcagaatgtaagtgctagaggtctaagtaatggaagaaagaaggaggactaggctgggcacagtggctctcacctgtaatcccagcactttgggaggccgaggcgggaggatcacctgaggtcaggagttcgagatcagcctggccaacatggtgaaaccctgtctctactaaaaataacaaaaattagccaggcatgatggcgcatgcctatagtcccaactacttggtaggctgaggcaggagaatcactcaaacctgggaggtggaggttgcagtgagccaagatctcgctactgcaccccagcctgggcaacagtgactttctgtctcaagaaaagagaaaaaaaaaaaaaaaagagggaggactaactagggagactcatgtaactaggtagactcacagttcagatactgaattgtgaagcagtatctggcagcataggaccaagcactcagtggagaagttgagggaataaatcaaagaagtcagagaatggagatcactagggggtctgagggttcctgaaggattcttgggggaagagggtcttcatagggaaagcttctacctggacaacttcctgcataacctgctcccctaaaccctagctgctcttcccactgacagcttcctcctgcatccctggttctggccctgagttctctcctcccttgatttcatgtcttctcctccctttgagattagaaacccagactctaggaatctccactgatttggcagtccagtgacaatgcatgggcagggccacaggaggttacctcattcacccccacctctccccatcattccttacagggaaatctagggaggcccaggctaccccaccacctcctctggctcagacaaacctgttgctgacctgtcagtttctgtctagccctgccatcccacacttcagaaggcattgtttattctcttattctcatgtgctcattcctcagacaactacttgggtttgggagaaagatacttaacacctttccatcctacctctttaagaaagggactgtgtgccaaagaccttcccacatgtatgaagaaggggctcttgggagaatgtgaattcccccaggattcctttgaatccttttgcaggtatttccttcccctgtcctcagcaagcattgatgagccccagtcctgtagaggttgaatcaactccttgagtctaggaaaagatggcttctgaggccagaggttgggcagtgtacctacagcaccatttcttgggagcttgttgggatatcacatacttagagtggcaaggtcttgtggctgaatctattgatagtccagtgctacattgccagctcccttgtcattaccaccccctctacacgtgctccataggcaggagctgttactatggaaatacattatttttaaaaacagacacacagcctgggcttgggaatctccagaacaaacctacacgagcaaggaggttaatggggctgtttctgggtccaagctccaagaggaaggagggtgatgatggtggggggaattcaaattcggtgttctactctcaacctctcccagcttcaggttctgctttctctctgttgacatcagctggacctctgccagacacttctatctgggagggacgctctgcgtctccttaccctgggcctagcttcccccaggaaatgggaagctagaagtcgctgagtctgggggtgttgggagaagggggcggtgatttccacaggggtcacctccttcttaacctcacaggcgtccgacctgtggaaatctaacaagcataggggaaagcaaaggcagcatcttaggtaagtgaagttactcttgccttgagctgagtgtgggagcaccgcgattgcaagatggggcgaggtgatcaaagatcccgcctattttccaccccggaacctcctccgctcgctgctagccctcccgccctcctccagcgagggagcgccaggctgtcctggccccgcccggcgcgggtgcggctcctttaagggcgggtgggggcggggcgccggcggtgttgtcagtgtcagctctgcgcacgcagccctcccggagccggtgccggcccgcgagccccagcgtctctgcagascagtcccctccagggtccggcggggcccgcgcggtgggaggagtcgggcactggccggcgactaacgggtccgactgctgaccaagctaggagagacccggaccacggagacagagaccccggcatcgcgacccccgaggacctcctctcctcgccctgtggcacccactagtcctggrcactcagtcgcggagagcccccgaccccgcgcgcccagccccgggggagcccacctcctccccgcggcccgcccgggccatgctcccccggggcagcggmtgagccccagccgggaccgggatcggagcccgcgcggagcatggatccgggctgggggcagcgggacgtgggctgggcggccttgctgatcctcttcgccgcctcgctgctcacggtgttcgcctggctgctgcaatatgcccggggcttgtggctggcgcgggcccgcggggaccggggcccgggacccgccttagccggggaacccgcgggttccctgcgggagctgggcgtgtggcgctcgctgctgcggctgcgggcgactcgggctggcgccgccgaggagccaggagtccggggcctcctggcgtcactcttcgccttcaagtctttccgggagaactggcagcgggcttgggtgcgagcgctgaacgagcaggcctgcagaaacggggtgagttggaccaagcgcttgggtggtcccttcagcctttccttccaggggagggactgactgctcgtgctaggaggccagacgagggtgggcataaactggggaaccctatggcttctcttcccctcccggatcagagaaaagggtgccgctaaggctggaggttgtagaaatccaactgggtccccagacttccatttctgtgggcaaggtactctggctccaaacccatgcacaagttgctgttctcatagcaacgctaatccctgtgcctgagggcacttccgccttgcctgggtgctggttgtgttggggcatgggagacaggtgcacctgcagaaggaatttgcctgcttctcatgccaccacacccatttaacatttcatgccccaaatccctggtgtggtcaggcagatccccaaggagcctgaatcacccccctacccgacagtaatttcactgctacagtcaaacacatccttctcctccatgctggcctgtggttcactgggggttggggagtgttcaggtggagagcagattgacagtgcccctaccagtagatgagcttggaactgccccttgagggtcagtcacaaaccagtccagcctacttcctcccattgcaccatgggcatctggcctcccaggaagtggggcaggaagcgtggtcatgagatggagataaggtgggaggtagaagtctctcttttctggagctccctcccatcctgacccagcaatctctccttgctctcacagtccatcagctccttgctcagagggttctctatttccagccactatgagtttggaggctttaccttactagttccccagatgccggaaacagaaatgtccacaagaaattgctctatttactctgtccagctggctggctaaaagccagatggcatctgtcagtttacaccttgaacccacctcttcatccaactctccctgtaccttgtccctcggtcagaagcaactccccaggatagctgactcaactggacattggcctcccttgcagagggtggggagattgaggtttcaagcatccatctccccatcttccttggcctagcctttgaatgagacagctaccagagcaaaggagttggcttcccctggtttgccaagcaaatgaaccctatggatttgtttcctccatctcaagacccaaggaagagttgccagccaattctgtgccccttcctcaattctgtgtcygcactgctctccaggtggggctgcggtaggttgcttccattactgtggacgaattagggagcagctcttttgagatctaagcagctttctgctctctaataccgtcctgctatctgccttgaggaattagccaggcccctggactcttgggtcctctgagcttgtatctcttcccagtccccctggtacggatccccaaggccatgctcatcttcatctccaagaatatgaagcatcatactcttgaagcctccacatcttatttatttggaagaaggcttagcttcatttctgcagctcttatcttgaacaaggtggctctaccacctttaccggggcttagccctttccctctgcccagctattatatataggtggcaaccagcaccttaacttttttctatgtaggattttttgtttgtttgttatttgtttttttagggggtagggtaggggatgaaagggattgcagggagaagaagaaggaagctcttggtattccaggaggaagccagggtcttcagcttaaggtgatctagtctctgaggtggactacctccccattgctcagtggctcctagcagctacaggcccctggagaggcaggccttgaggggactacctcctgtcttaaagccctgagccaaggaggggccagaagccagcctgcagctgaggcctccgcagtggcagagtccagccagcaactgagcaggccaaccctgtggggggcagctccagagacctgatccaatgcccacattactccctcagagctccatccaaatcgcctttgaggaggtgccccaactcccacccagagccagcatcagtcatgtgacctgcgtagaccaatctgagcataccatggtaagggtctgatgggcactgccctctttggggtccaagaaggactgaccccaagggctccctttagtccagaggttcttaacctggagtctgtgaatgccttatggatctaaggrttggtttcaggaagtctgagaatcccattgaagttatgtgcaaaatgttggatgtgtgtttatatgcatttttctggggagaggagtctttggcatttatctgattcttttagggatttatgatcctgaaaacatgaagtccttaggaaaacggaagtggggaggggtctgctgaactattacaggscagttcaaagcagggtgagcacccttcccccacatctgacccacctcgccrgtctcaggtgctgcgttgccagctctctgctgaggaggtgcggttcccagtctctgtgacccagcagtcccccgctgccgtctccatggagacctaccacgtcactctgacactgccaccaacacaggtagaaggggatgtgggaaactgagttgggcaggggcggttccattggctcagcttcttccatttgtttcctctctgggatggaattcaggaagggagagtcctcgaattaggagtccttgggtaaatggggcaagtcagcccagtcactttgttcctgtctgtagttggaagtcaacctggaggaaatccctggtgaggggctgctcatatcctgggccttcactgatcgcccagatctcagcctaacggtgcttcccaagcttcaggccagggaggtaaggaggcagagctggcagagaagaggcagaacggggagggaggcagaggtgggggatccacctccttgttgttcccttcttctctctgcagagaggtgaagaacaagtggagctctccacaattgaggaactgatcaaggatgccatagtcagcacccagccagccatgatggtcaacctcagggcttgctctgccccaggaggcctggtgagttggcacccaaagcaaaagatttgcatgcaccttgttcctagggtgctatgtcaggattcttgctctttggaccttcttctgctcttaggtacccagtgagaagccacccatgatgccccaggctcagccagccatccccagacctaaccggttattcctacggcagcttcgggcatctcacttgggaaatgagctggaaggtgagagctggaagtggctgcgggactgccaaggctatggttggttgcagatgctctctgcccctctgccaagggtacagcctctttattctgcagtgacttcccatctctgatctgagcatcttctaacttctggttcatcacaggcaccgaggaactgtgctgtgtagctgaactcgacaaccccatgcagcagaagtggaccaagcccrcgagggctggatccgaggtggagtggacagaagacctggcactgtaaggagtaaccctgccccgaccccatgctccagagcagagaggatcaaacctttccagcacagtccttgcaggaatcagctctgttttcagtagcctttggcgtgagctcctattgtatgccaggccctggcgtgggtcttagggayacagacttgaccaagatacagcccccacccctgggtcaatgacaagcttgaggcagagacaggtgtacataaagaagatggtaaaaccgctccagttgaggtttatgtaatgtgccgtcagagtgcctaggtgggggggagattaattcccatgagggaataaggatcagagtaggcttcayrgaggagatgacatttaaaccacactttagagcaagagtaggatttcwtcagagtgtgaaagtattctcggcagagggaagagctggagcaaatgaaagagggtggcttgcaactgagagactggcaagacaggaagagcaggaccagggaggatttgaatgcatagctgagaagcatggtttccactcaggccctgtccctttctcttgggacgagagagaatttggaggccaggagaatctgattggagcatttatgccgttttatttatgtacacagctctctgcctctggcctgtgatccactcaagtgtgggttcagcttgctaattttctccttcctgccccatctcctcttgtcccacagggatctgggcccccagagccgggagctgaccctcaaagtgctgaggagcagcagctgtggagacagtaagtgaggggtgggaggggcacccctgggtgggtacagagtggggtctggccatgggcccagctcacagtgccatccctttccccagccgaactcctaggccaggccacactgcctgtgggctccccctccagaccactgtctcgaagacagttgtgcccactcaccccagggccagggaaagccctgggaccagcagccaccatggcagtggaggtgagaagctgacccctggggtaggtgggaggacacaggggatgggcagtctccgaggctctgtctcttctctctcccacccctgggcagcttcactatgaggagggctctcccyggaacctgggtactcccacctcctccactccacgccccagcatcacacctaccaagaagattgagcttgaccggaccatcatgcccgatggcaccattgtcaccacagtcaccactgtccagtcccggccccgtatagacggcaaattaggtaaagagaaggagcctgggagcccagctctagccaggggcccgggactgcagacccaaggcaggacagtgaaagaggagagagccttaattccaaytccccctgttttcagacattccattccagtcctaccacatcttcctcccaatctttgtctcttccaaactttcccttacctcctgccatttccccagcaattcctctcactctgccacccttctggatcctcctgcccctcctcatacaggactgttgcactcctaccttccagcttcccctctggcttttcacaggtgtccttagccccagctgactataattgtccatcctgctaccctcagccctccagcaccccctggggtcctccaacaaacccagaggcctctgtggcatttctaccccactcagtgggcccccatggcacttctgccattataggggccccactgaattgccccaacttcagggagccccagtaccccctctgtccccgctccatattttcatagcatctccccacaccttcagcaggccccatggcactttcctacactcccattagctcctggggtgtcttttagtccccacggcatcttcctaatcacccttgtgattaatcaccctttaatcattcttgccctctgagtcacccaaagtctgcatctcaacaaagacagtaggggtgggggccactctgaagcamctsccagctcactgaccctcccccacccaccagactccccctcccgctccccgtccaaggtggaggtgaccgagaagacgacaactgtgctgagtgagagcagtggccccagcaatacctcccatagcagcagccgtgagtggggaatggggtgcatgagtgtgggttggccctggtgccccagcatcaaaaagtactctgggtgggataggaggagttccaatccaagaaagagccagggagaagtcaggttattcattctctgcacccctagcaggggacagccacctttccaacggcttggaccctgtagcagagacagcgattcgccagctgacagagcccagtgggcgggtggccaagaagacacccaccaagcgcagcactctcatcatctctggtgtttccaaggtaacagggctctggggagaggagctgggatggggagaaagccctaatgggtcggtcactcctgcccattaaaacccgtccctcctgccaggtgcccattgctcaggacgagttggcgctatccctgggctatgcggcatccctggaagcctcagtgcaggatgatgcagggaccagcggaggcccctcttcacctccctcagacccaccagccatgtctccaggaccgctagatgccctctctagtcccacaagtgtccaggaagcagacgagacaacccgttcggatatttctgagaggccatctgtggatgatattgagtcggaaacggggtccactggtgccctggagacccgcagcctcaaggatcacaaaggtagggggacgttggcagggtgcccctcatctcttcttttatacacatatcatgacctgggggacctcgagccagygtgccttctccttcctcccctaagagatagccggattcccagcctagttcagccaagctagcctagagggggatcttggtgccttggttcctggcctagatctgacatgcttgtgataggaagggatgccaaattatttccctttacctccattgttctttcttcctgagtctaagtgccatttttcctgccctttaaaaaaaattataaaaatttattcctaggcagggtgtggtggctcacaccggcactttgggaggccaaggcgggtggcttacctgagtccaggagttcaagactagcctgggcaacatggcgagaccccatctytactaaaaatacaataaattggctgggcgtagtggcacacacctktaatctcagctactcagggggctgaggagggaggattccttgagcctgggaggttsaggttcaaggaggttgaagcagtgagccgtgattgtgccactgcactccrgcctsggtgacagagtgagaccctgtctcaaaaaaawttttttttttccatggctgggcacggtggttaatgcctgtaatcctagcactttgggaggccaaagcgggtggatcacaaggtcaggagttcaagaccagcctggccaacatgggtaaaccccatctctactaaaaatacaaacattagccagacgtggtggcaggcgcctataatcccagctacttgggaggctgaggcaggagaatcgcttgaactggggggttggaggttgcagtgagcccagatcatgacactgcactccagcctgggtgacagagtgagactctgtctcaaaaaaaaaaaaaaaaaattcttccctttcaatctgcaccctctccccaatgagtataagaaatcctacccttggattatccatctggcagcaagacaggcagtgaccagtggtggtagttcttctaactttaaaagatgagaggctcaccctaaaacatcttcattcctctaccagtgagactatcaaccatggatctatctatctattttttaagcctgcatcacttcttgagataatgaggtttctacctccaaagcctgctgggtgagcaccttgctcattatactggttctgaatttacctctttgaagtttctagatgcaccacttcctgctcacagcctggaattcggttaacaagtcagtgtcaacctacctttcccttcatgatttatagacttttgggagtaccttctggtagcttttgtcttcccataggaaagaggcccaatcccagtttgtcctcacaaagcggccagctccgtgatatctcttttgcgggcagagttaagattgtacacagatccccacaagtaccacgatttttgcctcaggaaggataaagcacatgtttgtttctgctttcgttttcttttttctttttttcacgaagccttatggagaagtatgtttctgctttctttcctgaggaagcctrgcttctgggccacgggactgatcctgtcyacatcctctttccctccattctccatcgtgtctctgcccccgtctcaccccaccccgtgcccctctctgcctcagcttcccctcttcccctgcagtgagtttcctgcgcagcggcactaagctcatcttccgccggaggcctaggcagaaggaagctggcctgagccaatcacacgatgacctctccaacgcaacggccacgcccagtgtccgaaagaaggccggcagcttttctcgccgccttatcaagcgcttttccttcaaatccaaacccaaggccaatggtaaccccagcccccagctctgaggaccyagctctgaaagggcacgagttctctcagcccattccccacctccccttccataccccttcctggatctccagtgcctgggccaggaaagccctctgggttccgggaagccccgtccaccctgggccatggggccggttggaaggatacttggaacgggaagcacatgagaggtgggcacccggtgccgaggacatggacgagggactggtggctgggagggagaggagggccctgtccggcatgtgtgggtattccccagaagcatttgcctcctgctgagcctggtccctgagcggagtcccagggtgctcagctcttcagctgacccttcttcccttatttattctcttttctatttatatgtgtggcttaggaccctccgtgaacagatgatagagggcatctctcccaggtgacccttcttttctgtcccaggagggtgggtaattccctttgggatggggctcccacacctccctcaggtccccactcagaccagcaccagtgtctgcctctgagaatgttggcagctcacagagagcagggccggcccgggatggggggcaggtactccccaccttcctgcctcccctcctgctcctcatccctccctccccctttattaccgttttttgtacttgatgccttctctgtgagcagtggctctgtgggaaggagggagccggsagcctggtgggaagccttccccagagagatggctttaggggctttatttaaagactgtgatgatggagccacgcaaggctgcacctctgtgtgttgggagacgatgatgatgtccattgctgtgtgatggcttggaatttaatttattaaagtcaaattggagtttataaactggacaactggttatcctttgaaaggcagtaggcagccaggctgtgacatggatggtgtgggaggatgagacaggggcccggataatgaggttgggtagatgacacacattgtggatctgctaagaagttcctgcaggraagaaggggtgtgcagagaaaggatggaagagacaggaggctctggagtatgaaattgtagcaaaaaactcaatcaactagtacaggttagtcttcattcccctttctggaacaggctgctccttctaggatgtaatggagatcaaagcttggaccctgtaactagactgcctgcctgggtttgagtcccagctcttctaattacttgtgtgaccttgggcaagttatgtaacctctaagtgcctcagttttctcatctgtaaaatgggaacttcaatcatcatggctatcatttggttgtggatgagaagtaaatgaagtgctgagtgttaactgttgcctcagaagaaactgggagggggaagtcttagaagtgtttcaacataataaaagctctctcattctgaaatgtggscaaatttcagggattgatagatcctagcaaactgtgtccctggttcccgtgcttgagatcttatacaggacttgaaccaggtaagctgctacaggatattgggcagaatgcaggaccaggaagcaagaaaactgagtctgccacagacaaaccaagtgatcttgagcaggcaacttctcctttggggacctcagtttcctcatatctaaaataagggtgacctggataaacattcaggtcacttccagccttgacattctatgactacctatatctcagggtgtttagggcacatgcctttgggtagatagcatgtggaaattgttactattccccatgctcctgtccacactactcaccaaatatgagatatccgggaagaatggagggtatagattttttttttcaattagataatttagttttatatatttggggggacaagtgcaggtttcttacatgcatatattgcatgcatagaggtgaagtctgggctttttttagtgtgcgcatcgcccaaatagtgaacatcatacccaataggtagtttttcaaccctcaccctcctcccaccttctcacctttcatagtctccgatgtcttttattccactytatatktccatgtatacccattatttagctcccacttataaatragaatatgccatatttgactttgtttytgagttatttcaccgaggataatggcstccagttccacccatgttgctggaaaacacatgatttcattcttttttatggstgagtagtattccmctgtgtgtgtgtgtgttgggcgatgataatgatgtccattgctgtgtgacagcttggaatttaatttattaaagtcaagttggagtttataaactgcattttctttatcactcactacattaactacgttttctttatccaatcctccattgatggacacatcgatttggttgatttttatgtagtgaaatgttcaattctaagtcatgaaaattcaaagagatttttcaagctgtttccccagtctaagaaatgtaactcttagtggttcacagaggaacagtttttctaccagtatgacacgacaaccaaacacagtgaacttgtgattgcacaagaaacttttgttgatgggagaacaggtattcagagttctacaggacctggggaatgagtagatggtaactggaatctgtattgagcttccagtactgagctgcccagagttccatggaatcacatattttagtgaagaagagcctgatcacgtttcaaaaatagggaatttttaaatgaatgaaaaaaatacgaaacatattttcatcaacttaatccatttcacactttcagaagagatccacagcttttaatgagtatgaattatgctttcagtttttgtggcagcttttaaagaacaaatctcaggatatgtctgaattacccagccaaaattgtggcttgttttcaagagaagcagattgagatagaagtaaactatgctagacagaatgacactgctttaaattttggaaacatatatatggatcccagagcaatcctgaaatttttgctctgtaacctatgtttgagtttacacagctctgtgaatgaactttttcttcataaaattgctaaataaagctaaaagctattttcagtggtgtaaatctgaattaaaatgaggatggcatttcatgaagtactactatatgcatttttgaatgaataaagttggtaagatatattttgttacttttgaattacattttttaaaacgctttttttttttttttttgagacagagtctctctctgttgcccgggctggagtgcagtggagtgatcttggctcactgcaacctctgcctcttaggttcaagcgattttcctgcctcagcctcctgagtagctggcactacaggcacccaccaccacacctggctaatttttgtattttttgtagagatggggtttcgccatgttggccaggctggtttcgaattcctgacctcatgatccgcccgcctcggcctcccaaagtgctgggattacaggcatgagccaccgcgccctgcaaaaccctattttaaaatagggaccaagttataactcactgttgttaaaaccaaaatttatgcacaagtatgactttactatcttaatggcattttaaattttattttatatatattgaacatttaatgtgttttctgattgtacaaattatataggtttatttttagattagaagatacagaaaactacaatgcaataaaatatcagtcttaaccaactttattaaggtatattatttaacaagtatgtcttgaacccttactgagtttcagccactgggctaagtgagtgatgggttttttgttttattttgttttttgttttgttttgagacagagtcttgctctgttgcccaggctggtgtgcagtggtgccatctcagctcactgcaacctgtgcctcctgggttcaagcgattctcctgcctcagcctcccgagtagctgagattataggcgcccgccacgatgcccagctagtttttgtatttttagtagagacggggtttccccatgttggccaggctggtcttgagctcctgacctcatgtgatccactcgcatcggcctcccaaagtgctgggatcacaggcgtgagccacgacacccggcccactgatggagttataaaggtgaagaactagtctagtgaagaatgcagactgagagtaaacagacaaatacaatgtgactgagctgtattgttaaatacaagaaaggactatcaggaagactttttggaaaaagaagcatctacactgagaccataaaaattagtaggagtcagtcaaataaatgtgggaggaggagaaagggattattccaggtaaagaaaacaagttcaaggcttgagaggtaaaaggtggcttggtgtggtggaaaaggtgaaagaaatttgcgactggagagcaagaaatatggtcgagaaggactaaaaaaaagtagacagggagagcccagatgctgaagggtctagaaaacctcagtatggttttggagctttgccctgaaagcaatagaatgcctttgaattgtctgaagcagatggtaacttgatcaggtctgctttttgcaaagtggagaatgctttggaaggaagcaagtgtgcacgcagcgggacccattagactaatgtataaatcctgcctggaggtcatcactggacaggggaggtgggggaggcggtgaagataaacaaaaggggataaatttgaaatatcctgttttaaaaggaggtagaatccacagaacttggcaatggattggatgtgagaagtgagaggaatcagtgatgactgccagctttctgacctgaacgagtggatgaagggaagccgagttttggggggaaagagaaacatataataccaacatttaaaacataataagactaagaggctgaaggaaagggtagaaccttcaatctgagccgagcggggccgacagcgctgggcagcatcccacgcctttttctccgcgaggcccacgcaaccagccaactaaagcgaagaaccacgtgagggagaccccactgcgcaccaggcgcgagccctgcgcatgcccgttgggtcccggaggccgagcctgcgcagttaggggaactcaggcccataggctccccgcctttgcgttgccctgagcagcgaggcgcggtcacgtgctaccttttgcacgtatcctgtcgcccctctgtccgcccgggacgcctagccccacccaccgttcccgccccttccgtgttttggtgcgcacgggttccgccagacacagctaccattggctgtcagtcggatccgagaacgacgattggctttccttgaccgtccctcaagcgcctctccggagatggtctgaggtgggagaagagctgaagagacctggagccgacagacggtaagctggggtatgtgctctgcaggggctgcaggaggccaagctcttcccgagccacctcggcgagtattcttgccgcttggccacgctggtctgccctggtccggtcccctcaccccgactggaacctccctgctttctagtctaggggcgtcgctgcggctgagactcggtcgccgccacgccttagcgtgaaggattccgggaagcctgcgggactgcgagtggagaggttttgcccaacgggacggtctccttccttctgtccaaattctacctgtccttcgaggcgtggtgcgggccccactgcttaggggagacttccttttcgcctgaccgcggaggtgtctctctgtcctggtctccctcatcgggtactttgtttcggtcgttgtcttcacgtatcagtcttatctttttggccaaattatgagttcttaggcgtttaggaccctttttttcttgaataccacagttcattcattgtcttgcgttacagtatatgccctcttaagtgttaagagggtagagtgaagatcatgcccctatctcctcagagtagaaacaagagacacagaaagagaaattaaagaagacaggaggacagtcagagagcgtcagggagttttgcctaggtttcagatcattctgtatcgccagctagcttgcctccttggacttacccaccagtctaacagcaggtgtatgtttagaatatttgtgctcggcacagtgtagggacacgggcaggtgtgatatggtttctgctcagaagcttcttatagtccaattgggtaaacgagactagaacacataaaacgaccatggcaacatgaaaatagggttgaagttttatggtgtcagctgtgccagccatagaactaaggagcaagagtagattcagggatggggtagtttaggaaggcttcccggaatgtgattatctcctgatatttattgagtacctggggtgtgcaaagctctgtgctgaatctgagaatgagaagtgaataagtgatggccactgtcctgagaaactcctagtctaggggaaacaagtttcattgcattgatagcaaagatgtgtgtggatgccgtgggcaagagatgggatatgccagctgtacctggatgaattgggaagggggtcatcaaagagaagactttggggtttgaaaggcgaatagaagttgcataggcaggcctgtcgcggtggctcacacctgtaatcccagcactttgtgaggccgaggcgggcggatcacttgaggtcaggagtttgagaccagcctgaccaacatggcaagacctcgtctctactaatactacaaaaattagctgggcgtggtggtgcgtgcttatagtcccagctataatacttcggaggctaagtcacgagaatcgcttgaacctgggaggcggaggttgcagtgagcccagatcacagcactgcactccagcctgggcgacagagcaagactccatctccaaaaaaaaaaaaaaaaaaaaaaaaagaacttgcgtaggcagagagttttaggagaatgtagaatattcagagacaaagatgattgaatcagaggaagagggaatgaagtatgggtgaggaagccagagaacagcatcatgtgggagaaagagcatgatctttggattggaatgagggtgctcttacatcagatgaagtgtagagaggactcaccacagggctgacacactgtagcttctcaatagatgttcgtttccctacctagaactggagaagtaaaattgagaccactttgagaagagccttgcatttcatactgtaatagtcagaggaggtgtgggattttatgacttttgaagtcttttctgcgatcttctaaatagcaatgcagcagaagttgcnnnnnnnnnnnnnnnnnnnnnnnnnnnnnnnnnnnnnnnnnnnnnnnnnnnnnnnnnnnnnnnnnnnnnnnnnnnnnnnnnnnnnnnnnnnnnnnnnnnnnnnnnnnnnnnnnnnnnnnnnnnnnnnnnnnnnnnnnnnnnnnnnnnnnnnnnnnnnnnnnnnnnnnnnnnnnnnnnnnnnnnnnnnnnnnnnnnnnnnnnnnnnnnnnnnnnnnnnnnnnnnnnnnnnnnnnnnnnnnnnnnnnnnnnnnnnnnnnnnnnnnnnnnnnnnnnnnnnnnnnnnnnnnnnnnnnnnnnnnnnnnnnnnnnnnnnnnnnnnnnnnnnnnnnnnnnnnnnnnnnnnnnnnnnnnnnnnnnnnnnnnnnnnnnnnnnnnnnnnnnnnnnnnnnnnnnnnnnnnnnnnnnnnnnnnnnnnnnnnnnnnnnnnnnnnnnnnnnnnnnnnnnnnnnnnnnnnnnnnnnnnnnnnnnnnnnggggcatgaaggatcttctgttttttcgtattttctgttttttttccttttagtattcagtaaaggccttttttcagagttcccacctgtctcaggtaggccagagagagcaacatggtggggtcagcaagaatccgtgagaattcctgaggagaaggtgacactcaggagacagagccaaggccggctagtgtcctctctctagcagaaattttgcttgcaacgtcaccctctgttctgtgtttcgtttattctttaattgttactcaaagtatgcttctggaactgcttgcatcacaactggggtgctgagttaaaagggcagatttctaggcttaacccctgccttcctgaatccgaacttctcacgcaggcgctggataactacattcgtgtgcagatctaaaattgagagctacctgggcatggtggctcacatctataatcccagcactctgggaggctgaggcgggtggatcacctgaggacaggagttcgagaccagcctggccatcatggtgaaactctgtctctagcaaaaatacaa
